United States Patent Application Publication US 2014/0057251 A1 - sequence listing, part 27

SEQ ID NO: 28217 - DNA, 6369 bp, Cannabis sativa
  modified_base (6341)..(6342): a, c, t, g, unknown or other
aataatgggttacactcacaaagcataacgaagcttcatagtggttggttgttaacttggtcaaaaagcagtactttatattttgaaaaagaaataggagatatttaggtttcaaaataataaaaataagacatgtctcatagtgttatctcatattttatccacctaacgtggcatgtccacgtacgccaaaactaaagacacgtggaatacaaccttgtcaatagcggggcaaattctccttacaaggcatggcataaccatcaagcaacaagcaaaaagagttaagaaatctgtcaagaagctgcacaacgttgtctagctcgccaaggggagtacataggccagccaggagaagcttgtatggcaagccagggatggagcataacttggccggccaaagggatattgacaaacaaaaaaagggaagcctggcctttgcaaggaatattgtacaaaggttggccaacacttgccaaagctaccaggcacttggtgttgggctttgtgccataaattaaacttattttaaatgtaatcttctatattcatttatcagtaaagaaacagatttattttcataacttatttaatgtgttatttcgttcatgtgaccatttatttctttatttaatttataaattcatccaaatccttataacattgatattcttttttattatattgttaacacagtggaaagtaatcaacattatatgattaaatgtattactatgatttatcagtacacagggtgttgaccttgcttatagccaacgacaattagttaattattaagcgattagaaatataataaagacatagcaaaaaccaataaacaataaaggacaccaggttttaaagaagttcggcccctttagttcgggaatagtctactctccttagactgtattgacttgagaacaacgaataaagtatttcttctctcaaagctctcacaaagaaatctctaagtgtttctcttaggtctctctctaaagcaaatctcttgattccttttatagtacatcactatttaaagggacttaatgcgtgagggaatgtttcccttctgcttacaatatcgaaagaatatttattacataattagaatacatgaaatgggtgattgagatagcctaccgtatccttctaattcaatcccattattgtagggattgccttagtactttggtttcacgatatcaattctgaagtagccaagttttagtacacatctcggagaactaacctcatactttgctcaaataatctgccctttactctactcggataagaagactttgtgcgtgtagatacgttgcttgaagtctgtttggaatatatttctacccaagtacaaggaatgataaacactgtcactcgtacatgctgccacgtcatagtacaaaaaataggataacatttgcctgccaatgcgcaggacttccgaagttgcacgtggacttcacttggtttgaattcttatttgaatgggtggcacgtgtttgaagtgactgttggtgatccgacgtgattctgaccaagggtctcttcaatatttggctcattaatgctgactaatctgcacctcaaattactccaaaaaattagcacgcttagacggctgctcttcaggtacttgaatgcctaacatttactttttgtgggggaagggggaaccgaagcattttaattttgaaacgattgcccttcttcactaatcaacttataaatagggcataaattcctaataaactacttttagcatttttaatttttgaagatttaagagcaagaaagcttttcctgttaaattctttgaagaattcccaggaagtcccgatcagtgtcatcccaacaactctaaagcttcaaacagtgagtaagttcctcacctctttcttttttttatgcttgaatatttgattttttagatttccattgtagaaaatttgatagttcttgaacttgttctacgaaaaccgtagaaaatctaggtttaggaatatgagattttgattatgttcagccatgtgacttgactgtgattgcattttgattttgattccacgatatttggttttagttgcccattcagggattagtgaagattaacccttaattcaaagtcttgaaattcagggttataaacctaatatcatgcaaaatcccttttttaattcttcaatcggacctggtcggcatattcaatttgtttttattcgatatcccagccaaatactcatcttgtgtcctaccttttatagatgaaccttggtgagttttggggaggcgaacatcatatcaaccaagaccttcttcaacttttgcacgaggatcatcctcgtctttgtgccagtccgtcctcatcaagtgacggtctttccaatttgagctttgaagactaggagataagcagcgaacttgcaccttctctagaacccaaggtgcaacaccattttttatcccgccagatcgcaggtgaaggctacggacattttatctgggagctcaggaaggggtggatgtgatatttgtcgtccaattggacatacattgtttgaccagacatagttgacactattcccgtacgtcgcccaatttctgctgctgtaggtacacgtatagccactttcactatgaccgttaccaagcacactaatcaagctccgttcagggatagaatgatggcgcgtaccaaacaaacagttagaagatctactttggctgatcctcatgtggctcggcttgccacaatgctgagtgctgagtaggcccggcgtgctgctgaggaataagacaatgagggagacatcgaagtccaagaggtggaggatcagggcgaggtctgtcctgatactccatctaaagccgaggaggacagagttgcttgaggattgccctttggaggtttcactgaggaaggggaacccgtgtccgaggctggtgaagtcttgctagagggtgaagattactttactgaggaatacaccgaggctgatcctcagtgaacacaaggtgccataggagctcagtgggtttctcctccatgtatagtaacccaagccaagatgaagagtttggagaagcggctaccttggggatgttgactgctttttcccctctctaaatcatcgggcaactagtccaaggtaggtgttttgtgcctggatcagcactcataccaagcagggttcaatgctgcctttgcctccatacttcaagaagattacgaactactaccacctttgtctgacccaatttactcctaagggcatcaaatacttatccgccctattcatcctttatgcctcgcaaggatggagcgagccatccccgcacgacacgaactggctttttcgacctgaagttaactcctaagtagagcaagttgaggtatttctacttctctcaactggatgaaaagtggctgaagggcactgttgacaccgatgtcaacaaagtatgacattttgtggactagtactacttcgtccagggcatggatactgtcgccactcggttccagtaaattccctcgtattgtcgccctcctttcacattaggactcagggaaagggcacaaaatattcttcaactttcagaagctgctcggaacatcactttgctggccactgaggccaactatgttaagtacaaactcttcccaggggactttatgtcgaggcccgtgaaggagaagaagaaaaaggtaaagccaagcgaggctggtgtgatcgagcagaaaaatgagctcattcaactcaagcgtgaagctaagttgaagggagacaacgaagccaagcagtatgctcaagaatattcagagcagaagaggtcgagcaagaagaagcaggctctttcaaatgaccaagcaccagtagaacacgctatcaggattagggaacctaatatgtttgcttggccatctgctcctgtggagggaaaagggaaagccgtcctggtgcagtaggaggaagactctccagacgatgatattgtgtctatgcttgttcggccaaatgctcatgccgcgtgcagggtatttttaacttgcacttacttctttcacgatatgctttacatcgtatttgcttctaaccgtgtcattttgtttgcgcagaaatgtcacaaaaggtactcaaagccttgaagaagagagtgggggacaccttgggctagactcctcttccaaaaagataaaaaggcgatgagactccatccaaagagaaggggtcggtcgaacaagtcattgacctttctgaggaacggcctgctgagtaccctctaatctagaaggtctcgaagtcaaagagttccaaagggggaagctcgaatgagtctgattagactaggaccccttcaacgaccgtggcgctgagcacgcaagcaaagagaggcaaggacatgctccaatattatgtgaatcgatcacttctcgaagtgaacgatcaattgttcagggcaaacaatcagctatctttggaactagtcttgggatgagtcctcaaggaagctggatgggtaaatatttccttctttgtttttattctcttttctgtagtttgaattttaacattttcccgtgcaggtcaatctaaagatggcctacacctattcccgagccaagtccactgctgccaagaaccttgccaccaccaacacattgcagagggaggtggatgcatctaaaaaggaagtttaggacgtgaggaaggagcttggggaagtgaactaaaaaacttcttactgccaacaccggggttgaggagctgactaaggaaatgcaggagatgccctcgaccgagcagctagaggtagataacgacgctttgtctaaggagatttatgagcttaaagacgagagggagagtatccgcactcttctctcaatgttagaggggatgtccagactaagcaaaccagtgaggaagagcttaagaagtaggtggaacgcctggaaataaccgctcttgaggtcttctataaatttaggaaggctaaccccataggaaattttgattaccttggtgactccaaagggatgtatcttgattactgtgcgggtcagacgaccaaagaaaaccccagggcaaccacttctatagttctgactgacgagagagacaaaactcttgatgctcaagaatgttgaacctccggcccgcacagaccaaaccgatccatacaaagagcctaggatccttgccaactattttttttatcctttcttctttcttcttctttttatttatatatgtgtctattcgacccataggcctctttttgagacaaagacgaccgatcaagcaattcttaaacttgggttatgttttttcattttaagacaactagctgacctggtatcttttaatgccgggtttaccgtgctttgttatctttttcaatgaatactgtcccttgttttcataattgtctgtgcaactgtgtttgttttttgaccttgttatttacttttaccaatgctttgtacgggtatagttgcccccacggtgaccgagcagactttttactcttggtcacctgtattgcccaagtataatttttgtatgttcggttctttggattcgagcatacctttgtacacatttaatggtaaatttataacttgctaacagaattgacacaatcaaaatttagatagacatctttattcattcattggttggaatatttttttaccgtagtaacttacataaaagctattatatgatctaatccattctttagcaaaattgaaacaaaacaaattgcacttaaaaggaaattgtactttcaaaggtggtcatcccacctgagtacttagtcatttcatccgaaaccttgggcgagatccgccccaaaggctatttacttaaaagtaaatgttctttgatttggtacttagagtggtcatccgacctggtacttttactcatagtacgttcttaaatgttcctcattctaataccttagtactacaacaagttccatgttttcgtcataccgcccatgtttgtattgattctagaacttcaaccacctaatatggtccttcccagtttggtccaagcacaccagccttgctctttttactctcccaaggaccatatttattgatatgttctttgtattcgtctttcttcaatttcgtcctgtgattctactaggagggcatggttagcctcttgatcataggtcaatcttctatgagacggaggttctagttctacgagcaacatagcttcatagccataggccatagcgaatggagtccgcccagttgttgcttttttagttgtgtggtatgaccatagtgttgggctttatgccctaannaaaactctatttcaatgtaatatctat

SEQ ID NO: 28218 - DNA, 3828 bp, Cannabis sativa
tctagtaaaaaataataataatataatatataattataattttatcatattgtttttgtttttcttagaatcaatttaagtaactatcgagagagatggtcttcaactatctctctagtgtgagcctgcccttcatttcgtgtgtgtctagtgtctgtctctttgtttgttctatattattttcgactcctcctctcactgtgagttaggttagtcttgtagtggtgtgcattgctggttgttagtgtgtttcttcttgtctttcagtttgtttcttttgtttttttttctgtttggtggctcgtggatcatattcaccaccttttttttctgaggtggttttgtcagttttaggaggggttggtaagattcgtttggtgagtttggtttgtctcttaaaagctttgtttggtcttctttgtcgggtatttatggagtcaatcattgcttccaactccactcttaaaggcaaatgcttttcatgccttgaaacctctgtcaaactaactccttgtgacacttctcttaaggctctggcctcttgctgcttgtttgggaaagtcatagcgcctatggtggtggatgatatgattgtgactgattttgtggccaaaaactggaagataccagtttctgttgtggcattggaggatgaagagaagcaaactaatgtgttcaagtttggtttcgagtgtgccgatcatagggactgggctcttcttaatggtccatggtgtattcgtgggtacaccctggtccttcaagcctggtccccgaccttcgacggtccgacagccttcaagcttctgcgtgtttggattcaaatccatcaccttccccatgagtatttttcaaagactaatggcagtatgctgggggggttggctggaaaagttgtgcaagtggagatagatgaaggaaagcctgcttcatggagcaaatttctcagagttcaagtggatattgaggttgataaacctctgttttcaggttgctttttcgacttagcatcgggtgtgaagaaatgggttcaaatgaaatatgaaaaaattggaatattttgttatttctgtggatgtctggggcatcaacgcaggggctgctcactatcgacgtcggtgacggtggcgaaccttgatgatattccgttccccatgtatggcccttggctctctgttctgtcagcataccagaatgttttttctggccctttacctggtgtgtcccgtaggtcctcgtcctcggctaggaaaaagaatagtggtgctgtaatgttattgccggcgactacgggcgacggagaaaatggatcgaatggaggtccgtccaacctgtctcgacgtcagagccaacccgtgaaaaggactgctcatgcggctgagggtcttgggaagacccaccgtgctgtgtggttccctaagaggcgtcctttcgttgcagagaagacagttgccatttttggctttggaggagagaaagacgatctgggagtgagaaaggaagctgagattttacctgttttgcctttaaactgtcgagtcattggtttaaatgagggtcatttgaattctatgaccgttacagagaaacaagtggaaggtgggcctggggttattgggtcgtgtggtacgttaattagaaaggccggttttcatgaggcttttggtcatgggcccactaatttagttagtaataataatggaaatgctgataatgggcctcaagttatttctagtaaaatgcaagcgggtgggcctgctctggaggggaattatgctgagtctaacttaaataatggcttggcgggaccgtgtaccttgggtaatggctctaattctaatgggtcgaattctctagccaaagaccaagttgggcttgtgaatgctattttgtctactaatatccatgaagcccaggagcacttaaatgaagaaaatgctttggctcaattttttaatgctcaagagagcttattgcatgacctcaagcactttgggaaacttgacttgtatgagatccgaagcattggaggtgatatcggggtcccggcttcctctgaagttaatgagcgaacaactcctttcaagaaaagaaaatttgaagtgtctgcttctctctgctcgaggccccataaagtgcctcgcaagtatcctgacgtggttcgtgactttccgtgggacacaaggaataatggctcttaccctgagttggaaattgaagagccttcggaagacagctcaagctccccgagttgctcgggaattttgaagaatccgcttgtgggttcctttgtcattgatgaatctgtttcgagtgggtctgctaactcccacaaccctgtggaggagaatgtcgaatctcctccacaggagacatgagaggtatcgcttggaactgtagagggttagggcagacctctacagttcgggagctgaagtccctgatccagtctcgctctccggattttgtgtttctctctgagctcaaagtggatgccaatcctctggtacgtatcttaaagtctttacacttttactttaatatttgtgtcccgtctattggtaatgcgggaggaatcattttggcttggaagtcgggttttagttttgaatgtatctcttgctcgagtaatcacatctcgggtctcgtgtactcggaccccccatccttcccgtggcttctttcgtgtgtgtatggccctccttacatgaatgccaagaagaaattttggtctgagttcttgaaactaggggataggtttggtgggccttggttaattctgggagatactaattttgttcttagcggatctgaaagagaaggctcatctggccgtgatccttttatccctttcatttctactctcatcgatggtagaggtcttatcaacttgcccatccaaggggactttttgacttgggataaccatcggtctgggagacaccacgtgaaatctgctctggataagggccttgtgaatggggcttggattaagttatttccaaaggctaaactttactctgcccatacgagtaattcagaccatagacctttttgtcttttcacttcggacttggagcccaaattcaagagatgtttcaagtttgaggaaggttggacgcgtgacgttcgaagcaagcttgtagtagcacatgcttggaattccgtcaatcacagttgggctccatctcgcctttttaagaaggttggtgccaccagggtggccctcctgaactggaaccgttcccaatttggaaaattggacgtaaccataaaagagcttgagcaaaaacttaactctcttcaaagcctcccggctgggtcccgggattggaatcaggaacgcgacattcgccgagctttgaatgaatccttggaaagaaaggcgatctattggaagcagagagccagagtgtcttggctaaaggatggagataagtgctctaagttcttcttcctctcagctgccattaaaggcagaagaaatgccattgagagtattttgaataaagataaagtctggattactggtcgaggacctattgggcgtgaattcattgagtattttaagggtatttttgcgggatctgacaatattgttgagtacaattgcgtgcagttaatttctgaaagaatctctcccgaagatgcgatggccctggtgagtggccctagccctgatgaaatcaagaaagttctcttcgccatgagtaaccataaagcccctggtcctgatgggatgtcagttctgttctacaaacactattgggattcagtgggagctgacttctgtgatgcggtttcagacttctttgtcacgggcaatat

SEQ ID NO: 28219 - DNA, 1768 bp, Cannabis sativa
agggatattcgatgtagagtattgtctcccatttctacctgagacaacagagtcaccttcaactccggccatgatcgaagaagatgaatcgtctgaaaagctctgataccaagttaaaaaatacagagaatatgcaggggaatgttttgctcagctcaattgtagctgagataggtcatttcaattcatagatggaaattcttgatacaggaatattctaggcctttacacgtatacaaaaatatataaatctatagtacacagaatcctaacagaaattgtacaacaatcattgctcaatgatgagctgccctctaaaattgagtgcagagaaaagactgaaatgcacctagcctaatgatagaaatacacctgagaataattcattttcttcacaacgtgaattgtctttataatcccttcttgcacattctcccttattaagtgacaatctatttcgatgtgtttggttctctcataggaaattgaatttgcaactacatgttgagttgatttattgtcacaatgaagcaatgtaggccctttatgctcaattttcacctcatttacgatagatagaagccaaacaacttcacaagttgtattggcaattgctcgatattcagtttctggtgaagacctagaaacaatatgttgtttcttattcttccatgagatcattgaatctccaataaatatgaaaaatcctattgtggaccttcttgtatctagacaggcagcccaatcagaattagtgtaggcttgtactttaacttcagatgcagcaggaaagaaagttctttggctaggagattgtttcacatattctactaccctatgtgctgcattcaagcaactaactcttgtaatggataggaattgactcagtttgttaactaagtatgaaatgtttggtcttgtgattattaagtactgtagttttcccaatatgcttctttatagggttgaatcttccaatttttctttttcatcttgtccaagtctaagattggcttccattggtgtacttattgccttgcatccaaggcaaccaagatcttctaatagttgcagggcatatggtatttgggaaacaaaaactcccttatttaatctagtaacttccaatcctaagaagtatttcagttgtcctaaatctttcaatttgaaatgagcattaagtctaagttttagcgcttcaagtgcttaaacattgttgctagctaaaataacatcatctacatataccagtagaaagatgaatcctccattaaagtgttttatgaatagagaatggtctgttgtagtctcccatttatgttgattggaagaagaaaaaaaagatgactcctccattgaagtgttttatgaatagagaatggtccgttgcagagtgggagaatccttcagcaaataaagcgcttgaaaactttacaaaccactatcttgaggcttgtttcaagccattaagtgactttcttagcttgcaaaaagggtttggtggtaactccgccttatgtctatgccctagaagtagagacatataaacatcttcttggagatcaccatgcaagaaagcattgttgatatctaattggtgtagatgcaaacctttgattgtagcaagagcaagaactagtttaacagtaacgagtttactgacatgagcaaaggtgttagtataatcaatccctcgttgttagttgtaacactttgcaactagccttgctttgaatctttccacactgctatcaacattatatgggtt

SEQ ID NO: 28220 - DNA, 2392 bp, Cannabis sativa
aaaaaaatattaaaatatataatctatttttgaaaattttaattatgtttcaaaatatatcgatatcccttttaaaacatataaatccatatattattataatttaaatatcttttttcaaatatcccttttaaacatatattttttattctaaaaaaactcaaggtagttagtgacttatataaatatcacaagacgttattaggttgataataaaagctagaagattactatatgaaaactctcaattctcaatgacagagtaagaatcggaaaataattagtagtgcgatgacttcttcgatatcaattcttaatgatgatcttctactcgagatatttcttagactctcagattttacatgtatagtagagtgtgcacttgtttgtaagcgttggtttttggctattgttgattctaaattaaattttagtgtcaaattcaatcactttcaccgtcaaaaaagaattaccaactccttcgagtcaactcttccttttactctactatatagagaatatggtattcataatatatattcatgggagttttactccgaaagatcaaagatttttgactatggaaagggaccattattagggtttttgccttggaaggatgcttacaagtgttatttttatatatggtcgtcgtttgaagatttgttgcttgtccaacgatctcctacacgtgtatacatttgtaatcctttaacaaggcaatctgttgcaattcccgaatctccatatagccttcatagatattacaaatatgcattagtagtcttaagagattattatgatagtaataaccttataatcaagtacaaagtggtgaaaatcagtttggatgtgaaggatttaatacacttctcatcatcaaccctacttcatttatctattttttgttccgagactagacaatggaatcattcaagtattaaattcacaatgcctatctctttatggaatgaagagattgtcattgttggaagtaatggaattgtatactggccatgcggttactttaaacttgacgggattgttgcattgaatccttgttcacaaagatgtcgtttgattggtttccctaacgactataacatggcgattagggcacatgttggagtggttcgggggaggctacgccttgtgcaattctatcaaaactcgaggaagtttgtttacaaggcatgggaattagtagatgaaggtgatgataataagatgtatagttggaatttagttcgtgatcataatcaaataatgaagatgaatctaatatgtgatcagccaacgagcttaaatcaacttactgtgtttgctctccatccggatgaccaaaatgtgttcttccttaattatacacaaactgaaatttatgaatgtagaatacttggccaaaatcatagtcatgttaaatatctttgtccttttccacaaggatcacataacaataatacacgagttagagttatgtctcttctgcatccttggtggcctacacaaatccctcactaaaaataaatttatatttctgttatttttgtcattatgatgattttatctaaacaaagttagttgacatttttgcttgggaatttgtttatttcacaagaaaagattttttatcctatcattctttatttttctctttagtttgttgcttaatattttcatctgattgtgaaccaagaatcaaagtaatatacaaaaaaagataaattacagaaaataaacatatagccaatcaccatagtagttgattaatctttgtatttgctgaaccaacttattcacataactcattatcatattattaagccacagcgcactgagataattcatatagatgaatttctccctctttctatatatatggccttgaagaatatatgtcgttttttattaaaaataataattattattgtcgttttggttcaatttaacttagcaattcaatataactcagagaataagaatctaaatcttgcctcatttaacattcaaagacacaaaaaataatcttcatcacaggtttgttctccattaggggtgggttagggtcagacatgataacgcgacttgaaatcctcacaaagttaacgagtttgggtttaccttaaataggtttaggtcgtgtttgagttgatacgactaatacgaaacttacccattaatgacctatttaaagttattttagtactttaacaggtcaaaaatgagtcataaacgtgttaaaaatgtcataaatgtattaaacatgtcactaatatattagtaggttgacatgtttggacaaaatctatttataaacaagttatacgagtcgtatcgtgttaacacgtttataaacaaatcatatttgtgtttcattttctgacacgattat

SEQ ID NO: 28221 - DNA, 2172 bp, Cannabis sativa
agctatataatctgttaaacgatgcaaataacaaccttcatcctaccaaaatcctcctttctgaaaagtctttccagctctctagtagcttcaactaaatcttttgcctttctatcttcatttactggctgagaaagctctagtgtggcagcagcatagcacctatagttgatctgttagatgaattgccttacgagtaaagcaggctcaagtacttaacatttctaaaataaataatattataaaccttttccccttccttctttgattatctttactagagtgcaatagagacagcctccgctgcctcctgttctttaggtcttgcaaactaaattgcaaggtggaacatatctcaagaccagaagaacactttgaaacagccaacagctgactagaagaatctaaaggagtttgaacagaaacaccttcatgcacattaatagagagatcctcactggatgcagcatttgatgagacattagcaatgggaactcctttctctttagcatcaatatcctgtaaatggatcaagctaacttaatcccccaaaataaaaataaaaactaattgattccaaaaaacaaatttaagcttaaataataagacaaaaactaattgttacctacaagcaatatttatctctcacacacacacacaatacatcaaatttcaggatcattgaggtccttttcatatgtagtattaggattgaccacattagagaaatataaacaggaaaaccaatacacttgggttgacaactcaagagtaaagcacccaaaagttacgtgtacaataattcaatgcatttgtctgaactctgaagacattattattctatatttccatacaagattgtgagcattttatccttcaaattgcctagtttctttctctgtactatacaaataaaatctttaatctcatgaactaaaattatagcaatgcaaaacaacttatatcacgtagatataaaaaaaagggtccatcagagaaaaaataattagatcaaaaaaaaaaaaaggatccccgcctaaccctacaatatttgcggaccaaaaaactaaagcaattgatatgtaggagggactcaacagtcgaacctcagaacttgtgggagcaaaaccattagatcacttaacaccaacagacttacttctgcatattaaaaagctctgataaccacataataatatgctaataatagtattgaccaagctcgaaggaaaacaaattataacccatatacctcttgagattctctgccatttgtactgccttcagaagaaagtggatttgcgactttattggtggccctgtcttctcttaaatagttggacgattctatctcagctgcctccaagtaatgatcaaccagggtggggcttactgaggatcttggaactgcaaatttcacatcagaattgctatttttggcaagcccatgatgagtctgatttctcaagacaggcatctcagatagtactgtactgatattttcatgcttccttttatttacagtgacaaatttgttaagtaatgtttgaacagagcttgaacgatatgaatccttatttgtagcaatgccaccatcaacagttttcggaagaggaagcactttttgatcagttgtgatactatcatcgagaatagtgaactgtttactgtcttctgattctttaattttgtgtcctctaagagtaaagtccttcattttaatattgcaattgaatctttctacatcatgaatgtcttgaacttcgttttccaaagttttgacttgattatcatcctctgaaacaaggtccatattttcaccttctggaccactctcatcctgagataatggtttcaaagatgtgtaagatttttgctgagaagaacatgatggagaatttacagccttggcaggctcttcaactttattaactacgaaacgagcatggttagaggaataaatctgccgtaaaccctcccttagggcatgcaatatggaaccctcgtcagaaaagaatactttccttttatccggagtaacattgacgtcacatgctccagatggaatagtaaaatttaaaattgcaatgggatgttgctgggagttggcacctctatataactcattcacaagctttgtgactttaggcatgtccacaggtcgaccattta

SEQ ID NO: 28222 - DNA, 1196 bp, Cannabis sativa
  modified_base (27)..(47): a, c, t, g, unknown or other
gcacttagtgcggattggatgttgttnnnnnnnnnnnnnnnnnnnnngatcggatgaacacccctaattgaatctgtaatactggtttgcttgatgcttccttagctgcatcgcaagctgctattgggcattttttatataatttttttatatgtagttgctaatacatgtgataaaaatttttaaaaatatttatttttattttttaattatctttttacatataatttcaaaaaaaaaataaaaaaaatttggggggttcatgacaccctgtagcccctaactccgtcaaatttagattgatttagcacagacaccagaggatcttgattttttatagtagatataaaaaaattctcactttaaaaatgagaaaattagtaaagcagactatttgtggtttaatttagtagattagttgattataattgtaaaaaagtttaatctgtatttgttgtttggtgtgcgatgaaattcttctcatgatttaccaaatttaaatgatatgatagatcatatatatataatgcaaatatgtatatataaggtagtacatacgtacgtgcatgcacactaatacatatataattacaatacatgatatatatatatatatataattaattaagttctagccttattaaaatttatacatgcacgatagaaaatggctatatataaatatatatatatatatatttgtcagaagaaaggagcccttagaggaactccttttcttcttaagttttgcctcttatttggaaatgataaagctgtaataagcaactgatcttctttctccttattattattacagcttatttttctcctactcttaacctcatgatctccatgtatagccaacacctatacacacacatatatatatattatcaaattaatgaacattaattaataatgttattatgattagagggttatatatataatatgtatatataccttgcaagctatactgcaatatcgagaattgtcctgcaaagtcctatggcagatgatgcatttgtattccttgttattattaatattgttgagttggtgtacatgatcaccttgttgagaagaacgcctttgcttcaaaaataccacttttgctttatttgtatgatatgtctgtcaattcatcattaattgtttattataattcattaacaataacataatataacatatgc

SEQ ID NO: 28223 - DNA, 1903 bp, Cannabis sativa
attgacatgctaatcggacctccatggtttctggtcgtgaaagagctttgagaaggtcgttttgccactactttcaaagttagtcatggatccatgattttagtctcagttggaggtactcatttcttttttgggctacgatggttctcgtgtttcctctaataggtgtggcgtactaggttagggtctggtccagctacctccccttccatcaatgacatctactttcctagacttgtggccccaaccccgaccctgaacctcgcaccccggacccttgcatgcacctagacatgcaccaggacccaaactcgcaccccaaacccagaaacccaaaccctgaaccctagacatggaaacggatcaaaaccatgaactcagatccaaactcggaccccagactcaaacccaacctcgaaccccaaaccgagaccttaacttggacccgaacccagcctaaggctctcacacccggatcccgaacctagcctaatatatatttagtatctaataactcaatcatcaaatataataaaattgttctctttctttaataatcaaaatatctttacatacattttagaacataatctctaataaaatgcacccgtatttatatatgtatagtgaacttgttttgtattattgcaatcaatcaaataattatatgatgtgatcactactacaaaatgaccctttagcttcgatttttttgggcttttatttttagttttgataaaatttgcaaccggaggcattccaagtgaagcgaaaggggtcaaaaaaattgaagcaaaaaggcccctatgacttcggttatttgctaataatcgaagccataaataatttttttattttattttatatattttttatttattttttcagttcgatagaggatgattaatatagagaatgagagaatggattcttcaaatgatattaacagtccataataatattaacacaaacaatttttctcttgaaaaaaataaaagaaccacttgcaaataagaaaaaaattgtgagatgtcaaaaaagcctaaagagaaagagagagaaagaaaaaagaaatcataataataataaaaaagcttctagggttggcagtggtgtgttctgcagggttgaggcattgttggtgctagggctggcagtagttggacacagacacaaggttgtggggctccctgtaaaaaaaattgcattaaaaaaattaaatatttttcttttcatttgaaaattatagcacaaaaaattgaaaaaacccccacaaaaataaataaattaaataaagtaaacctaaaaaaaaaaaataataacaattaagccctcacataataaaaattctgcgtccgtcactggttaatttacggttgttttttagtttttctacagttgtttttaattgttctgttttgttgttttacgattgttttaggttgttttataaaaatacagtatttttgtaaaaaaattcgtgtggcaataaaattataaacttttacttaaaatttagtatttttgtgaaaagtccaataatcagtatttttgagattggatcggccagttgtaattgaattgaaagactttttgcatacccctagccacttgtataaatgaataattttttaaaaaaatttgaaggggtatgaattttccattttatctgatatttgtttcagctccatcacgatgttttgatggaagtatcatcctaacttcaaaaaaaaatgtgggttccattctgaactataatgttgtttttttcattcaataaattatcgttttctttaaaaagaaaagaataatagaataataaatgacggaaagtttggagcggctgtcgtggctcgagaccatgatggtcggttcattgaagccttcacggtcctcttggagg

SEQ ID NO: 28224 - DNA, 2599 bp, Cannabis sativa
ttcgaaatccaacgatcgcgcattaaaaaacctccccaccaaacaccaacgatcgtccaccagaattgcctcctcaacgtcatcctcaatctcgaacccacactcttcctcgtcgtccaactcgatatgaccatactagtcatccatatcctccatggccgtgctagtcgaagccattaaaaccagaaaaaacaaccccagaaaactgagagagatcaagaccgatacaaacctctgaagcctctggaatctaataagaaacgacgagaataaactacaccctctacaccgtgatccaccaatgaaatcgcagaacaacccagtcgcatgaacctgtaacaaaacgcagagaaaaacgcaaaaagacgaacgataaacccaatcgctgaagtctgtagcaatcgcagaaagaaaccttcgaaacctagagagaacctatcacacatgccagctggcaagacttctcgtttggttaattaattagtatacataaattaagaatagtcctagcacttaatcgctactctcaaaaaaagtcgtcgaatcgttattagcatcgactagatctttaaacttgaattaattactagtaattactttatttagttttctttctcaaaataagagaaatgctaaaagatatgagttatgcctagtactttcttatgtattattatcgctattgattcaaataaatataataaacttttagggagtattgctaggcaatcataaggggatatgtctaaaggtgctaagtactactggtgtccaataacaatattctcaaaataaatataatcaattttccgtattatatacctacacttattattgctaaaaggcaccacttgagtaataatttaacataaagaattgttaaaaagtattattagtactctttttgatgtcatactactattggtataattaagtatcgaatattatataacttaatgaaataactgttagattatatcactaacttaattgtaagacgctatttttataaaaagtactaaataccactattatccaataataatacattttaacataactatttttataaaatattgttaattatttacaaaacttcaccaatgataatgctagataatacaagcaaaactcatttaatatttaattgacaaactaaccataaataaaaatatataacagcaggttcacgatcattctataagaagtattattattgggtactttaaagtaactaacatcacatcgatatgttgggagtgcttaacagtttttaattttatttattaaataaaaatatatgcaatattaaattacactaatatcaacatatcacatttaagtgttatcatttttcttttagaggcctttaaataatctcttaatttcgaattcctaagtcaaatttttgtgtggcgtaaattgttgaattattagcctaattgcttaattgcttgattgcttaattgcttgctgttgactcatattggttcattttgatcacatggctgaatttttgttcaattcataactaaatttacaagaacaagtggacatatataaatataaatgctttactatacttgcacagaccatttcttttttaaataaaaaagtcagtaaccttaggagtacagctcctgaagcattaacaaaacttgtattattaccatatatagaggtcaattgttaattatgccttcattctactcttacagatagaaataccactggatatatgatatgacgataatgttaaagcattttctctttgtttacatttgtagtattctagctctcacagttcttgttcttgttcatgctcaaactcaatcaggtaacattacatgtaacatatgtacatatgaaataatttctaaatcatattctaactgtatcaatcataaaatataatgcacattaggaaacaacaattaatttaaaaatcccaccacttgttttgtttttttttttaattattatgatttgcattaggcttcatcagtatagattgtggaataccagaaaactcgacatacaccgacaaaacaaccggcttaatctatgtttcagacttaggatttatagaaaaccaagttggtgtaagcagtactatatcactcgagcaccattctgacactctcgagcagcaattttcaacactgagaagttttccccaaggccacaaaaattgctacaccctaagaccagcagatgggaaagggaacaagtatttgataagagcaagattcttgtacggaaattatgatggaaaaatgatagtgccagggttcgatttgtatcttggagctaacaaatgggggactgtgaaactagacaatgcatctataactgcgaccaaggagatcatatatattccaagttcggattatatatttgtgtgtgtagtgaatacagggcatggcagacctttcatttcggctttggagctgaggcctttgagtaattctacgtatacccctgctcaagctgcagtcctatatcgacgatatgatgtaggctcaaaaagtaattcatacatcaggtaattgctatatcttatattaacatccatacaataaagagagagagagagaga

SEQ ID NO: 28225 - DNA, 952 bp, Cannabis sativa
ttttttttttttttgttataattgttattttttttatgttacacgctatttataatatttttactgtaattttatatacttgtaattttatatactgtcttttatataagaagtataaaagttatttttcttccattttgatatttgtctcctcaatatgatattattttttttaaaattataaaattaataaaattttgatgtgatgttagttgtcacatttgtggcattttttttttaattgtaattatattaagagagaagagttatatattacaactcttctttttaaccgccaatgttatactattcttcttcatattttttttcttcatttttttagttttaaaatttcaaccacgtttgtttctagtgtggttggcttttgttcagttttgttgtagttgatttttgatcagtgtttttttttttttttttttacattcatttttctctgattttttcccttctaaccatttttctttttctcgtataaatttttattttattttctttttccatgtttgtaactcgatccaagtattccttgcttgtagttaaaaaaactcgaaaaaacctaaatctaccttacctcgatcgtcaatggagaataagaattttaaagatcaccttcctagtcctacttctcatgttccttccatacataagttagaggctgattctccttctaagaggaattctaaacgacatcgatctatggagaaagattctgattcaaattttgagcttgaagatgagtttattgaaatagctaaagttgccgaggtaaggcatttgtttttgtgttttttagggtttttatgtcatatttttaagttgtacattattgtgttttggtttttcaattatatttaaatagtgtaatatttttatttttacatgtatgtgtggtgttttcaaataatttataccttctttaacagttgtattt

SEQ ID NO: 28226 - DNA, 2454 bp, Cannabis sativa
aaaagcttagtcttatctctaccaacaaaagatggaagaccaagatattcctcattgcaaggttgaattggcatgttaagaagctgttggaagtagtgttggtttgattgcctcgtgtttggagagaaagagagcacacatttatccgggttaattgcttgaccactagcctgatgataaatgtttagtactttctgaatagacctggctgattgtgaagtagcacgacaaaagagcatactatcatcagcaaaaaagagatgcgacactgatggaggagttcttgagacacgcagcccttgtaaagacccattgttttccttagattgcagtaaccttgaaagaccttcagcacagatgagaaaaaggtatggcgagagcggatcaccttgtcgtatacctcgtgtgggaactatttctccaagtactttcccattcagcagaaaagaataagaaacagactgtagacatcgaagtataagttccaccgtggttatgccaaaacccattttcaacatgacttgagtaagataaggccattcaacacgatcaaatgcctttgacatgtcaagcttaatcgcagcatatccttgggtgcctcgttttcgattcttgagtgaatgcagcagctcaaaagctataagaacattatcagttatcaaccggtgagacatgaaggcactttgatactctgagataaccaatggtaagaaaggctggattctcaatacaattgacttggaaaccaatttatagagaactgtacacagactaataggacggtactgtgtaatgagctgtggttttttaatcttgggaatgagtgtgatgatcgtttattgagaagagtaggatccgcaccattattgagaacatctaaaactgattccgtaacaagggagccaacaatgtgccagtagttagtgaagaacataactgacataccatcaaacccagggctcttatcatcactcatcgaatttagagcattgacaacatcagctgctatataaggtgcagaaatggtttctcgagattgtgcatcaattgtggttgggataacttccagtatagcattaattgcatgatcatcaaccccttggctgctaaaaatagactgaaagtaagttgaaatgatattgagcaaggcaggttcactggtctgagtattgccagcttcatctctgagttttttaatgcgattgttgacagatcttgaatttgcaagttgatggaagaacttggtatttgaatcacctgatttcatccaggaaattcgtgccctttgatgccaataatcctcttctttagctagcaactcatccaagatcaattctgaattttttaatgcagcaaagtgttgagggtcagtgcttgatgaattctgaagtgctgatacatgattatgagactcttttatttcctgtttcagattaccaaaattggagaaatgccacttttgcagattggaagcacagtttgaaatattagtagtgagctgaattaaagggctgctggcgcaaggactccaattggcaagaataatctcagcacaagcttcttcctgcaaccagattttttcaaatctgaaccgtgatctaaactgtggagactcaggccgatcgataagggtagtgacagatgcttttaatgctctatgatcagagttataaaaatccaaatgttttaaagatggagcaagaaaagtagtatcccaatgactattggtaaatccataatcgaggcgttctttaacatttccattcccttgactcttattagtccaagttgttcgatcaccttgaaaaggaatttgacacaatttgcaagtatctatagcagaacaaaaagcattaatctgagcatcaactcgccttgatccaccaattttatcctcatgagaaataacttcattgaaatctcctaaaaccagccatggagataagggtgatatgttacagcaccgacgcagcagagtccaagttaagtgcctttgagaagcacaaggatgcccataaaacccagtaaaatgcaaagacggcccatcttgactttccaaaaaacaatcaatgtggtttagtgagtaattgttaatggaaagagtaaaatgggacttccaaaggagcataagcccaccacctagcccttgtcttggaacttcgatgccatgagggaaatgcaatttacaatgaaatctatctatactaccatattgtaacttagtttccattatgaaaagaacacagggagcttgctcttgaacaagcaagcgcaaatgcctgaatgcactcgggttccctaaaccccgggcattccaattgacgagaatcatggctgagcgcggtgttgcagagcaacaaccgttggaacttcaggctgggactcctttgaatccaaattactggtgttggaaacatacggagttggactgataccactcggtgctgaagagtc

SEQ ID NO: 28227 - DNA, 6122 bp, Cannabis sativa
ataaataactttgtaattttttttcactttgcgcaccatgtaggtaagaaatttgaaactgaaaaattctcatggtactttggtggattgggagcatggtctctcggaggtcattgtgaactaatttgaaaaaatattcttagcttctggtgcggattgtttagaaataattgattgtattgattgtatacttcctgatctggctaatcatgatcttgcaagacctatttctgaagaggaggttcgaaaagctctcttccaaatgcagtctgacaagagtctaggtccagatggaatgaccctgactttctatcaaaagtgttgggacatcgttaaaacagatattattaccttggttcaacacttttttgacactggagactttccagaagggtgtaacgaggcacatgtagttttaattcctaaaaagaaatgccccgatactatgaaggatcttcgtctgagtgcgctttgcaatgtcctttataaagtggtcacaaaggtgatgacgaatcgtatgaaaccatacatggactctattatcgctgattctcaaagtgcttttatcctgggtcgccttatctctgataacattttggtctcttttgaggtcctccattatttgaaaagaaagatacaaggcaaagttggttttatagctttgaatctcgatttgagtaaagcctacgcccacattgaattgaactttcttggaagctatgctttgtaagcttggctttgcaaattcttgggtcagattgatcatgaaatgtgtttcttcaacaaaatacaaagttattcatggggctcatgagagggggccaattattccttccagaggcatcaaacaaggcgatcccctctcactttaatagttcattctttgtgctgaagggatttaagctcttatctgtaaatttgaaaggaatgggtggatgtttatggttgtaaagttgctaacggagcgcctaggatttcacacatgctcttcgcgaatgatagctatctttattgtaaaaccatagtggaagaagctatgaagattagtgatttgctttggaaagtttgaaacatgtttgggccaagaggttaatttggttaaatcttcaattttctttagtataaatacctctcttactactagaacatgcctcagccagattctacaaatgaatattacagaggaaggaagcttttatctaggtcttcctagtacaatggctcgaaacaaaaaaaaaaaatgcttggctatcttaaggatcgagtctgtaaatgtttgcaaggttgggaaggcagactcctatttagagtaggcaaggacattcttataaagaccatcgtccaagccctccccaattacacaatgagtattttcttgctccagttggagatcagtagggatattgaaagtcaaagggccaacttttggtggcaatcttctagtgatagcaggaaaggcatccattggctttcttgggaaaaactgtgcaagcataaaagagggggtggaatgagttttcgtaatctatgggattttaatcctgccctcctggtaagcaagcttggagacttattactaggccgaattccctagtctccaaaatatttaaagcttgatactatccaaatggtggctttctttcgacccaactaggttctaatcctagctttgtttggcatattatttgagaaactcaagattttttttcagaaaggagtgcattggtgccttggcagtggaaaaatatccaagtattaggggaaccttggctgcctgatagttctaaccccatgatcatttctactcatctagctcttcgtacaactactgtgttcaacttattaaaagtggatggctatgtttgggataataatctgatcgctgatttgtttgaggaacgggactagcggcttattcttggcatcctgttacaaataactgaggttgatgatcactatatttgggccatggaaacttcgggtttgtaaacggttaaaagtgtttatgctctattgtaaaaactccatggtcaatgggttgttgaggatgcttcaggcttttggagcaagttttggagcttaaaactgcctccaaacattaagaatctggtctgcgtgcattgacgacttgtcttccaatcatggtgtagctacgttttaagcatgttcatgtaagttccctttgtcctctttgtcactgtcatgatgaatctattctctatcgtttcgtcaagtgccaagagattaaactctgctggaacagagtaggaataggcagggtagctactgctccgaatacttctttttttggctggtgtgcttcagtttttcagcaagttgacaaggagaaaaaaatgcttgattgctattgtttgttgggcaatttggggggctcgaaatgatttagcttgaaagttaaggctgtctgagcggaggacattgttgtgtttacaaaatggtaccttaatcaatggaataatgctcataattctgaaatagattcgtcatggtctgattttcagacgggtgattgtgtggagcattggaccttaccaaatggaaatagtattaaggttaatgtaggtgtgactctttttcacgaaggtcaggcttatgggttgggtatggttgctcgggattcacgtggtatgttgattgaaggctatatactaaactatttcatggctcggttgaatcagttcttactaaagccattgggattcaggaggctttaagttggatcaaggatcaacgatggaaccaagtgattgtggagacaaattgtctttgtgtagtgcaagctttaagaagttccattagtatgatttccttgtttggtatggttattcaagagtgtagacagttgcttgctaatttgggttctgtttctttattttttgttaaacgtctgccaatgtagtggctcatagctttgctaaagctgctatattaatttctgaccgttagcttggagtctgtttcaactgagttgctaccttatttggtaacagattttgaaacttaataaagatgattttccattaaaaaaaaattgtgtgaggattttacacaatagtatttttttttgggttattaagagttaaaaaaattaaaagtttaataaaataattaatcatattataaaataagattatttaaaacctgtcaaaatttgaaatttatatagttttataatttaattattactaaaaataatacaatttcacttaaaacacaatttatttcctaattaaaatataaaaaagcttcaccgctaatataaataatatccttaatttaatatctattaaactcataaaattgactgaaactaataacatattacttcttatgtctttttgttaaattggttcatgtatttttgtgtgcatttgatttttttaagatttagagatctgaatgcatatttgaataataagataataactctaaatctgaatattgaaatatttagacggtttgttttttaaatatatttttatttttttattttttttaagtatttttaattctataacattaactaatttattaattagattttgtatttgtaaaaatattttaatatatatataaaaaaaatcaaatatcaactttttgaaattatcactgtcatatttattttataaataaataattttttaattcaccaaacacaccataaatttatatgataagaaagatgaagtatttgaagaaactaatttatggttgatatatatttttttgaaaaaacttatatatgtattattcatcattaatttttgatgaatataatatgtatatatgattgtatattattagaaatacaccattaaaaaaaattataaggtgattgacgtgttgttatactgtttataatattatatattttagttttaatgcttcatattatacatgttagaagaaatgtgaggtgattgaggtgatgttgcaacaaaaataaacgaaaatggaaagaaaagaaatgaaatagaatagatatatgtgtctgaaaattttttaagtgcctatattatacatctgattcggtcagatgttttaggacccaaaaagtgtggtttaggaaaatataaaacaaatgctcttgatgagtctaaatctcacccaatcagagtaagactattattaaatgcaaacaaatgaattagtttacaaaatgagagttcacattcttcttcggatgtcaacgatcgttgtattgctgtctatattggtgaggattttttcttacatactcattaataattttaataatttacagtaaaaatatattctcaattgtaaataagagcttaagtttaatttttagtagtaatgatatttaaattatattttggaaactccttaggtacctagccattaaatgtcaagtcaatatctacgtgtcattttcttattgtatatttaaattattttttgtctaaaaataaaaatttaatgacttagaccaactaagatttgccatgtgacaatttacttaacacttaacattcaagtattttccaaaattgtaacttagatattattatcgctaaaaattaaacttacatatttatttacaatctatagttaaaagcttaaatatttatgccacaaattacactaataattaataaaaaaattctttttttaaatgtttatataaatagtattttttgaaacaaaaatgataaagtaatagcttttattatctaatatgttgtttaaatttaatttaaattattcttatcatatgaacatcggtgtggagaactatgcttgctggaatgtttggttgagcaacactaggccaaacatcattgacagaattagagtcgttttgttagctgccacgatttatcatatatggagaaaccgaaataattgtttattttccttttattctaataatgttaattatatagtgaacaaaattaaaagtgatgtgaaatatatgctcatcttgattaaagataggaaagattcaaaagaggagaagaatttacttcaaatattgatgtgtaattattaggagattgtttttgttgcttctcttcggagaagtttagtgtgtttgtattcagtggattaattaatgaaattctcttcttcttgataaaaaaaaaaacatcggtgtaaagataacatgtttaaataaaagactcaattttaatttttgtccaaagccctcaaaccgcttgagatgaccttatttacagtcaaataatttttttttttacatttttacaagagaaaaaaaaataattttaccggtatttattttttattataattttacaatgttttataaaaattatataaaaataacaaatatatatataaataataacaatataacatcaaaataatctaaaaacaatctaaaaataacaaaaaaaaaaaatcacaacacaaaaataacaaataacatgaaaacattaataaatatttgttgtaaataaaaatttataaataatctttcaaaaaatatataaataaacttatttaaaattccgaccctattcttaaaaattttggaacttttgagtatgtgtgaaatatgcgaaaatgaaatcctctgaaaaaagattttgtttgtttgagtacacacatatacataatctagtattggaaacttagtagcggcaattgttaccgttaggttttgaatccattgttaggaaactttgtttgagggagatgaagaggtcgatagacgacgtttacatgggttctcaactcgaatcacctactatgctcttttctcttgattcttttgaatatctaaggaccgtgaggggcagattttctccgatcgaaaatggtaaatatgaagaatttcttgtaatgctggaagactatgcgactcaaagagttgatactgagggtttgatagagagggtaaagggtttattagaaggacatccagacctgattttaggttttaataccttcttgccaaaagggtatgagattaccccaccaccactagaggttgaggatgaggatgacaatgttggtgttgcaattgaagaatctatcaaatttgtgaacaagatcaagacccggtttcaaggcgatgacgatcgtgtgtatagatcatttttacacattttgaa

SEQ ID NO: 28228 - DNA, 4483 bp, Cannabis sativa
tcggttgacatacactctcccaagttattagtccaggccctgttgttgtatgatgacctctccaaaggtaggctctacaaatctgctcaatgtcttttatgatcttcttgggaaggatcataatttgactccaataagaatggatagacatcaaaacagagtttactaacactgctatacctgctaagaacaagttccttgaactccatattttaattgttgctgtaattttttcagctaacacagcacactctttaccagaaattcgtttggcacaaataggaatacctaagtattgaaatggtacctctttcttcgaaaatcctgatctgtattatatatattaaataataaatataatcatttataaatatgtgaaaaaaaagaagataaatttatatatatgacatcaaaatttaattgtacaaaatataatatttttctaaaaaaataattattatacatatttcagaacaagaaaaaagaaaaagaagaattaggttggggcgtacgatactctctccctcttcccatggctcggaagaagaagactgtatcaaagccggtggatgtgatctccgacatcaatcaacccaccgatctcccttcgatccaagaggagattccagtagcagaggtgaaatcgttccttgacccgtgcgaagtgctggaaactgaagtgcttgacctaggtgatggggaaggtctggcttcttctccagaaccagtaagctgagcagtggaggttgaaaccactgattttcaatcggcagccaaggatgtatggagcaaatttaacactaatcacgtttgtactcctctattccgtcttgaatacactgaacccataaaagtgggagatcaaattgtagctagaattgacttggatgaagctgaagctaaggcagagctatggaaaaattcaattgtttgtatagtacttggagcgaatcctccactccgtgtgtgcgaaggtttcgtcaagcgaatttagggaaaactcggtattgagaaagtggtaaggatgcattccagttttactttggtctgttttagggatgaagaaactagggttataatattggaaactggtgtggttcactttgacagcaaaccagttgtgttgaggccttggtcaatggatatggatgcagcaagtatggttcggtcaattcctgtttggctgagacttaatggtttgggtctacaatattggggaaaagagaacctaagtgctcttgttagcactgtaggtagacagataatggttgacaaagtcacccaatctagatcgattgtgaagtatgctagagtgcttgtagacatggagattcaacaagatcctcctatgtgtatttccttcattaatgagaagaaacaattggttgaacaattgatagaatatgaatggcttccatccaaatgtgcagcttgtgaaaatcttggtcacattgtggctaattgtaacaaagaaaaatgatttgtttggaggaaaaaagatggcaaaggagatacaaaaggcacaaaacagtcgggggaatctaaactagctgaaacaactaagcagccacttgaaaaatgagataatgggagaggagactgctgctaaagaagaaaatgcagctgaaataaaagaggtagtggatccttctcggccaaaggagacgcaattgacagattaggagtggattactcctaaaaagaaacaactgagaaatgatactacaaaaggaaagaaaaaaacagaagttaaattaagtaatggttatgaggctcttcggaatggcgaaggcagtggtgacaactcctcttatcttatctgatggagaactttaatgtgatagggtagaatgttaggggtatgcataaaagagagaaaaaaagctatattctagaggtttgtaaagaaaataaagttggttttggtactctttttaagaccaaaatcaaggagaataaactagacggtatgaagagtaatttcccaaattgggaaatttattcgagtggtacaatttctagtcttcttcttctttggcaatttaaatttgtcaaggttgaggttcttgaagaggatgctcaatatgctcattgcaagatgaagatttgtattttgggggatgaatttcttgtcacgaccgtctatggtagcaactctaaaaacgaaaggaaggtgctttgggataatttggctgctcttggtaatccctccttacattggatcgtgtttggggattttaatgctatgttctattttaatgatagaatatgagggaatcatgtcaaagctaaagaagttgaggactcccaaaattggcttgcacaaggtcaattaatagagttcaagtgttcgggctcctatttcacttggaacaacaaacatgatgttgggagaaaaaaaattcaaagcttgacagagtttttgtcaatgaggtgtggttaagagttttctctagaatggaagcttgttctaaatgggatccttgctctgaccatagctattgtcttatcaagtatcaagatcacagcaacatgggttacaaaccatttcgcttttgcaaccactggagtcttcaaccggggtataaacaggctgttttagcttggtggaattaggccaaaaatttgatagatacggtgcgaaacttgttcagatccaaacatgttctcaaaaaatttaacaaacagaatgttagggatatccgctctaaatttctggctgccaaagatgaccttagcagagctcaagaggaccttgctagggacccattgaacccgattatgcagaataaagaaaaggaaaaggtgctggtttattctgaattaaagaaaagctatgcttgctttctaagacagcagagtaaaataagttggatcagacttggagacgagaacactaattttttgcatgcctgtttgagaaaaaaggaagcttgagaaccgcatcacaacttacatggaggaagacttagttattgatgattactctaaagtggttaatcattttttgaaccattttaaaaatataatggggagaaaaagcttaaccactaaaagagtagatccgaagattcttacatttggcaatgtttgtgtttggaacagcaagttaatttgattcgccctttttacaaaaaagttgttaaaaaagccttgttcaatattcatagctctaaaagcccaggatttgatggatttggctcaggcttcttcaaaggtctttggaatgagataggggatgatctcaccaatgttatattggatttttttccaaaatggcactttgcctaaggagatgaatgaaacggtgattgctctaattcctatgtctgaagctccgatgaatgcgaaggactataggccgattgcttgttgtaataccatatacaaatccatctctaagatgctctgctccagaatgtctgaaattttaccttggcttgttaatgagaactaaggagcctttgtgaagaacaggttactagcacacaacttgctcatcttccaggatctgttaaagggctatacaaggaagaatagatctgctcgttgtattatgaaaattgaccttagcaaggcctatgacaatattgactgcagtttgttgaagattgtaaggttcattaaatgggttatggttagcctaaagggtacaaactataatctgcttctcaatggaagaatcaaaggttctttcaaaggagagaaaggcttgagacaaggtgatccgatatcgcctcttctatttgttcttgttatggactacttgactagaatccttgctcagatgtccaccaggaagggattcgggttccacccgctttgtaagtctctttgtttgactagtctttgttttgctgatgatttgatattgttatgcaaaggaaatgctagctctgctgagataatgtataaggctttccaggtgttttgcgatacctctggtctctctgctaacaggtcaaaattccatattcattttgggggagtaaaggaggaagttaaaggtaagatattggactatgtccacatgacggagggatcctttcccctaaaatacttggggatcaacatgaggccaaccaaatggaaggcttcagacttcagcattattattgacaaactaaatagaagactcaactgctggacaagcaggaatctctcttttgcaggcagagctcagctcatccattctgtcctcttggggattcgcaactattggatgagtttgttcaccctccgtcaaaagatcactgcagagattgatagttgttgtcgtatgttcctttggagtgcttcgggtgcaagaagcaagcttcatcttggttcatgggattttgtttgccttccaaagaattatggggggattggctttcgagaacagaagaagtggaacattgcgcttatggcaaaattcctttgggccattgctcgaaagaaggataacctttgggtgaaatagattaatgccatttacttaaag

SEQ ID NO: 28229 - DNA, 4053 bp, Cannabis sativa
cttactttgcttgctttaaagaaagctttcatggttggtatcggagcttcttcttgactcacgtccatggcttcttccggcgacaactcgtccccagtcggtgttactgatcctcggcctcaggcgcctccttcagctgctgtctctgcgcaatggaatcctttctcaaattccttaacctcgtctctcacaatcaagctcgatcgagccaattatctcgcctggaaatcccaggttgttcctacggtcattggacatgacctcgatgaaatattgtttaccagcaactctcctcctcgtaatcttgtctctggtgaacctaatcccctgtttcagcaatggcgcaagaaagatcaattgcttctgtcatggcttcgctcttcaatgtctgaagccattcttggcactgtctcgaatttcacttcctctaatgcagtatgggttgctctcgaacaaaagtttgctggacaatcgaaagctagattacttcaactcaagggacaattgacaaatctttacaaaggtaatctaagcatttcagattatgtcgataaaatcaagtccatttgtgattctttagctatagccggtcatactattactgatcttgatctcattctccactgcttaacttggaccggagtttgatcctgtcgtctccggtatcacacctcaagaaatgatgctttgacacattagaggaagtccaagcccttctaatgtctcacgagactaggcttgaaagacattcttcaatgatggatctacccaccaaaatggctgcaaatcttacattcggctccagaccaggtccatacagacatccttttcatcatggtcgaatgccttctggtgatcagcaacccaaaatgcaagccagacactacagtcgcccaccaccaagcactagacccttgtgtcaattgtgtatgaagtatggtcatactgccacaacctgtcactacaggtttgacaaaaattgggttactcccaagaatccttcatctcagccgcatgttcatctcactgaacagaactcgcctattgatcatcaaactcaaatcctccctgactttggagatgacataggatggtatgttgatacgggtgcaactaatcatgtagccttctctatggactctttggacactgcaacaccttacaatggtcaagaatccgttgctgttggagatggtaagaaattacttatctctcatattggtaaaaccactcttccttcaatccattctaatcctctcaaacttcaatctgttttgcatgtcccttctattacaaaaaatttggttagtgtttccaaactaactaaagataatgatgtttttcttgagtttcacaagtcttgttgttttgtcaaggacaaacactcgggggctgtccttctcaaaggaattctcaagaatgacttgtacctgttgggagatggtcactctaagctgtctaacagttctctgcaatgcaatcttgtcaattctattactagttcttctacctgcacttgtaatacttttgatgtttgtaaaccccctgattctcaagattcatcttgtaatgaattttccatcaataaaagtgacattttctcatctcctactgtttttagcactaatatgcatcatgatataaatatgtggcactgtaagttggggcatcctgcctcggatgtccttagcagaattttaacacagtccaacattcctcattctgtcaaaaatttaaaattctgcaactcttgtcaattgggcaaaagtcatcgacttccattctccttgtccaaaaatcgtgcatctcagcctcttgagttagtgcatacggatctttggggtccctcccatattgtgtccaaagacaactacaaatactatatcatttttctagatgactatagtcgcttttcttggatttttccattaactcttaagtctcaggccttcgaagtattcatcaagttcaaaagcttagtggaaaaacagtttaacttacctataaaggcagttcaggcagatgaaggaggggaatatagatcatttgaaaaatttctaagtgaccaaggtatcaagtttcaattgtcttgtcctcatactcatgagcaaaatgggagagtggaaaggaaacatcgtcatgttactgaaactggtttaactttgttagctcactctggacttgacatgtcttattggtggcatgcttttcaaagtgctgtgtatgccataaatcgaatgcccacctctgttattggaaatattagcccatttgaatgtctattcaagcaacaacctgattacagcatacaaaaaccatttggttgctcatgttttccccacttaagaccctactctcatcacaaaatggagtttcgatctcaagaatgcctctttcttggttattctcccaaggcacaagggctacatatgtgagaataaagaaggtcgaatctttattgctcgaaatgtggtttttaatgaagcacactttcctgccttcctcaccaacaatacaacacaggtacaatctaatgaactttttcctactgctactttctccactcaatctgtacctattgttgctcctactaatacctgtcctattgttgatcatgagcaaaatggcactcctccaattgatgttgctcctctgaattctgtaccatcttccagcagcttctccacacagtccactccacatctgtcatctgctactgagccaacaatgcctgttcagtccacctcggctcctactgaactaatacctgctgcaccaacacgaactcatcccatgaccactcgatctcaacatggtatttacaaaccgaaggcatacttggcaactaagcataaactccctgaatccttgttaccccgtgagcctaaatctctcaaatcggctcttgcacatccagcttggaatgctgcaatgaacaacgaagttgctgctctcaagaaaaatggtacttggactctcgtaccatatcaaagtcatatgcatcttatcgataacaaatgggttcatcgaattaaattgaattcagatgggagtgttgacagatacaaatctcgacttgtggcccgtggttatttgcaagcaccaggaattgactatgctgaaaccttcagccctgtcgttaaaccagtcacaattcgaatggtgctcactcttgcggtttcatttcaatgggaggttaaacaattggatgtgtctaatgcctttctcaatggtgttcttgaagaaacagtttacatggtacaaccgaaaggttttgaagattcaacaaaaccaaaccatgtttgtcatttacataaagccatttatggtctcaaacaagcccctcgggcttggaatgacaaactcaaaactactttacttgcatggggattcactgcatctcgggctgattctgcattatttgtttatggctctggtaagaatttaatcatatttctagtatatgtggacgatatacttatcacgggccctaatacttctttaatcaccaagttaatttctgatttgaatcactgttttgaacttaaagatcttggtgccatccattacttccttggtgttgaagtctgcagaaacaaagaaggcatatacttgtctcagtccaagtatatatctgatttactagtaaaggttcaacttgatggagccaaaccatgttctaatcccactagtacagctcataaactttctctctatgaaggtactgcttttgaggatccgaccttataccgaagtaccttaggggctttgcaatatttgacccttaccagaccagatgtggcattcataataaacaaactgtctcagtttattcatgcaccgacctgtgtgcactgggatgcatgcaaacggctactcaggtacttgaaaggcaccattaacgaagggttactccttaaaccagcatctcggctatccttgcaagtgtactctgatgcagattgggcaagttcccttgatgacagacgttctacgggtggttatgcagcttttcttggcccaaatttgatctcttggtccgccaaaaagcaa

SEQ ID NO: 28230 - DNA, 1877 bp, Cannabis sativa
  modified_base (26)..(43): a, c, t, g, unknown or other
acataaaatattatttctgatctttnnnnnnnnnnnnnnnnnnttatattgaaatgggttttatttggagcacaaaacccaacaggaccatcgaagagtttcgttaagaaaaggtggagatttagatgaggacgtcctgatcgtacgacagccatgttatagggtttgtttggggtttcctgagtgagtgagtgaattgatttttcggtttataatgagaactaattaatgttaataataggaatagtgaataggttttggggtttatacaagacgggaaccaaatttttctatcgtgtttaggaaataatttttaaaaaattatagaaccccttttttcgtatttttaattttttacaaaattatttaagcaaatgtgggacattcttttcctattgctcttttaaattttaaggttttctaatatgtgggccattcgaaattcttggttgttgttctatttgtcaaaaaagaaagatatgatgataatgatgataatgatgatgttgatacgtgaaatggcatagaaaatttgatttttttatgcattacttggactaaaattgacccactaattcaatactatcccaaatttgttaaataggtcaactttttctaaaaccccattttaaccctctcattccaaaactcactctctctcctcctcacgtttctctctttctctttatgcccgttgaacccaccgaacctaccaaacccaccaccacgaaggaaaagagccaccaaaccactcgacccaccatctgaggaggaagatccactccacccaccacccaatcgacccaccacgaaaaggaacaaccaccaatggaggccaaggtaaattttccccccattttatttttgaatgtttttcttagggatttagggttaaaatattatttattgttagatttagggtttgatatcgtttttcgagtctgatattgattagatttagggttagatttgaatctgtgatttttgggttagatttagctcggtccgatgcaccgtgaggaaaaattggatctgggatgaaaaaaaaggcccgatggtcagcccgatggccagtaaaagaagttgattggcctgatgggtccgatgtagggtacgattgtgtccaatgggcctgatatggggttcgataggtgcccaatgtttatttagtttttttttttgttttttgttttttgttatggcccaatgtgggcccgataaggtacaatattgtaggcccgatgagatttctcattcataagtttgaggttaggtctaataggcctgatgtagggcctgatagtgggcccgattacaacattgaatatatttttttttgttagggcccgatatgtctaatgtagggcccaatagtgggcccaattgccattttgaaaatatttttttgttggggcctgatatgtctgatgcaaggcccaatagtagtccaatgcttatgcacaaattttttgacagccattttttttttaatttttttgtagtcttctaaagttacacgccttttacttccaatgtcataacattacactggttgtgtgactttgcggggtggtagttggtattactgcaaagtgaaagccaaatttgtggaaatggagttgtacaagagggtgaaggaggaatctcctttcaaaaatttttttgagagagcttagcattttcgggtgcacttatccatcagttgttcatgcataagatcaaattagataaggatgaggaagtgcatttttacattgcaaggaacagatgccgatttgcccgactaagtttgccctagtgattgggcttaacatgttacctggaccaattgaggctgagattgaaaagaaggaaacgtcagaccgtttgatagtaga

SEQ ID NO: 28231 - DNA, 13097 bp, Cannabis sativa
ttttttttttttttgctgaatattgctaaaatcttagttttcatttatgggataaaattttagttttctatagatgcatctaagatctagaatttttttattgtagaacttatactgcaattgtttcatgattgtcatgttttctagtgttaattttcttttaggactgatgttgtgtgtaacagacatactttttccttgtattagcttgacaattgatacatttgtttcttttaaagctccgggttaggcctactgcttaatttcatgaggtttttggttcatttctttgtgggtgctatctagttatttgctagagttttctgtgtcgacattaaagtgtatggggaaaggacaattaaaagatatattaaaaaaatacattggttttgttgtttatcttaacttttacttctattgaactagcatgatgttttttgtttctgtagatacttgagagtgaaaagttattggaactgctcgctggaagatcaacgcaatttcgtagtagttgtcaggattactataacaagctacatgagttttggctcaagggccagaatgctgttgtcattgatgaacaggtaagggttaatcagttatattgacatattgaattgtagtcattttgaaaaattagttatccatgtcttgaggcatttgttttcacttagcaatgatttggtgattgtctgttaattttgtgcgcttttgttggataaagttagctactggtaggtatttggatattgaatataaaagggttttgagggcttattgtttgatgattttaacattttgtggtaaactctttattgctattgtaaaagagtttttttgtagtgaacccttgttgtagcctgtaattctcagacatacttgtatttacttcacatcattatgaaagaataataactaatggatatcgaattttcaggagagaatcttgaaagtggcttcgctggttcaatcatttcgccctaaacctagtcggccttttcttattatatcgactttggcagcccttcatttgtgggatgatggagtcctttggtttgtcaatgctgtagtttacagtggggacaaagatttaagaagaagtattagaaaactggagtttggtgagggaggttccctgatgtttcaagtacttataacaacaatggacattgttctggaggtacttcgaaaaaactctgatagcgtgtttaaagctaatagttcagctcataacatgcttcaaggtttgcatattgtactatataagttatatttttttctctctcaactttgcaggagttggatgtgtttagaagtatagaatgggaattaattataattgatgaatgccaatgccctacaatctcttcacattttgttgaaattaaacaattagatacgggaagaaggcttcttcttgttagtggtcaactaaaggtttctgttttcttgtaccttttactttactttttttttggttatttcaagtggctgacatgagcgttgctactggtactggctatggcaggagaccatcgctgaataccgtaacttgttatcttttatagagtctccttctgattcacaaagcaaagagtccttgctaatcagtcccagtgataatcttggtaaactgaaggaaaagttttcaaaatatgttgtttatcaaagcaagttgggatcgtcaagattcaatgagtactgggttcctgccccgattacaaatgtgcagcttgaagtgtactgcaacactttgatttcaaactctaccatactttgttcatctccgaagaattttattgttgactcagtccatgatattctgatgtcttgtcgaaaggttgggtttgttgacttctttattagttgaataataacatgagatcttatacatttctctttcacaacttacaactttatggatcagatcttatacctcgggaagctagagattttatccccatgtatggttatttcaatgcttgttatttcttaaaaaatgatgttaaaccaaaataccccctattattgagaggcatattaggtaagaaatttttctattgtcttcctattttctcctgtctttctttttccaccactctaggctatatgtattaaggtaggtctaatccacttttcgagttctgtcaaagaaaagaaaagaaaagagtggcattgctgaagaattttcattgaaaattctcatatgacattgtcactacattttttaggtacgaacccaattcaaacaaggttcgatagggttcatgatggtatttggaccatgtgttttaaggttgctcaaatgtagatcaagcgtgaactgtgtccaaactaaggtcggacaaggtttctccaatgtgatactttagcaacaaattcaactgatgatgaaactaatttttagcaagaacaacttgaaaaatagataaaatgattttctaaacattaatcatatcaaataatttactgtgtgtgcgcatttgaatttgcatttgattttttttgagtagtaccaaatctattttcttatgattttgaaatgacattgaaagtacatgagatctacagttatatacacttttttttctttcaaatgtatattaaaatgtctgctactgtatttttttttaaaaaaattctgctactgctttagcatttttgtgtatgaactttcaaatgcctgattcctcatatttccttgattgttataatttgcagtgttttaatcacccttacttaggagatagaagagtcgtagaggtggttacgaaaggcttcaagaaagatacacctccttattatcgtgctggagtaaaagcatgtggcaagcttcaacttcttcatatgatgcttttggaaatacaaaagcggggtttaagagttcttatcctattccctggcgcggtatgtgactccccccaccgacacacacacacacatatatactaaaagaaacaaaactattattgatggccaaaaataaaaattacgagaggatgattaagtatcctcaaatagaattgaagcaaacctacaaaactgtacaaaaagttaaaccagactgttttaagatagtatacaactattatattttgtatagcatcgttgatgtgtattgtctttctccatttttaaaagtttcttcttcttatattggctatggctagcatccataaatacaatttctgctatcttaaaggcttaatgattcttaataacttttcattcataatatattaattattagtaaagctatttcttttgtctactgttgtggcttggttacaagggaggatttttatcggtttttaattattgattagttactttaatgatctcttctataattgaaatctatcaggatttaggaacggcttctctgggacacattttggaggactttttaatacatacatttggaaaagctttctatgagcgtgttgatagcgatttaaaaccttctcagaagatttctgctatgaataatttcaacaaggactgtgaaagatttgttttcttactagaaaaccgtgcttgtaacagcagcattaagttgtgctctgttgatattgtcatcatattcagtagtgatttgaacccggtgaatgatgtgagagccctgcaaaagataactcttgatttaaaaagggagcaagtaacaacatttcgtttgtatacaccatatacagtggaagaaaaggttttacatctttcaaaggaagggaagcctttagatggtaagtcaccaaacataaacttgagtatgagtcacatgttactaatgtggggggcggctcatcaattcaatactttggataagttccacggtgaaggtgtaacaacctcctccacagaaagcttagttaaggaaccctcactggaagatgttatgaagaatttctcgcagattatttcttcagatagaacagacaatgagtcaataatcataaatgttcaacaagttggaggaatttactgcacagagtcttcgttatatggtgagctacaaagtgaagttatggacaaggttcaacctcatctattttggacaggagtgttggaaggaaaacatcctcagtggaagtttatatcctatgatttatcgcagagaactcgaaagaaggtacattattctgacgagacatcaaacaacacaggaaatgagagtgaggaaatttgtaagaagcgcaagaaactttcaaatagtacagtagatccaccatctatagaacttggatcagatggaaaatcaatctctagctgtaaagaaggtaaaatcctgactttgttaattattggtatattatctggacaaagtctagagctagcataaaatattgtttagctgacttcttatttttaatggtctgaaagtgtctgattttgtaggagcatttggaacaaccacagataaccaggttagtttgtttcccaggtcaagtgcttgcataaatgaaacattttttttctttgaaaattgtacttcattctctctgtttcataaattatatttcttagaagtaccttagccttatatatttcttttgcagcaacgaaagaaaacgcttgatgcacaaaagagtctccatcgttctttgaagcctgagattttaaaactttgcaagcttctaaaactctcggtatgattttcttttaacctgtacagtttttcttctaattatgtactgcttctcttctttacatgatactggttaaaaaatgttcacataaaaagtgtcatagttattgtggataagaaaattgatgtgcaagattttgtgagttatcttacttggtgtttcatttacgttaggtgaatagaacaataacatgcatttaaatatgaattttgtataaatctcttacacaagagggtctaggaaggtttgggggtttttcaagaaaagttgggaaagtttatggaaagatttgtcatagttattgtggaaaagaaaattgatatgcaagattttatgagttatcttacttggtgtttcatttacgttaggtgaataaaacaataacatgcatttaaatatgaattttgtataaatctcctacacaagagggtctaggcagatttggggggtttttcaagacaagctgggaaagtttatggaatactacagctcagtcctttctttgggccttgtgattagaaagaaatgagaatatctattaaagatggttcatcttttatttggggtggagtgacacagttaaaatttatcaatttataatattttgtttctttattaacaatgaactaataaagaacatttactcaagagtcagccttctcatcttgaccaagagtgaacttgtatgtttaagttgtataagttggctactccctttatattatcaggtttggttgggtttatttaatctttggtttgagttatgttatgtctaaaagtgttacatgagttatgttaactattgaatcttagaaatgatacatatatagagatatatgtaggatgcctctacatatcatgttattcgtcttctgatctttaaaatacgcgtttattctgtcttttaaaaagtaggttgttttaattgtttatgagcacatttccttttgcttgaaaaataaataatataaaaagaattgggaagcctcaacgtgcttcaattgttacccctcgtcttacgcaaaaaacttccttttgtccaaataagccttttgcaacattataatccacagttgtgacatttgtacaactctgtgttagcaatatcttgatagtttacttcaccgtaatgcaggatcaagctctgggtgtggccgaagagtttcttgagtacgttatgaaataccattgtgtcaacagagaatcaaacacaatattgcaggcttttcagatatctctggtcagaatcttttcctctagtatgcggtgctgttttagtttccggttttaatctatctttttatcattttgatctaatgcctaatttatattcttaatatgtttgcaattggaacttttaaagatgctgcattctatttaaaacccgaatgatgtttattgctatggctgctacttaatatactaatatataattatgtggaaatagttcttttcttatgaatttgttgttttccatttgttttccctagaaatttggtaatgcatgttttaatgtgattaattcttcttaaaaaaaaaatgtgattaattcttcttaacttgcaagttgtaatgttgccttcttgacaatagccattgttgtattaaaaaagctttagtcaaaatgcatgaatttgtttgcaactttgatcaagctaaggtcgatgttgattacattccgatgcttacataaatcatgatgcacttcctttctaaagctcttagttaagatgtagacacttgatgggttgacttgatcttgcacatttgggttattcaaaagaccagttctcttccaagagcaatagctcaatcactatataattcttatgataccacaccttctgctttttattctccaatttgtacttctctatttttatcttacccaaaatcctttgctacaatttcccacatacttcacttgtatatgagttcttccttttcggtgggaccagcttagacatggttttgtggcagtgctaggttttggtagtttctggatccctcagttggaaagaaatggccttgtattcgatgttaagttgcagatgatggcttttcgtgtaatgtgcatttcttgatttcttatttcatttttcactctgtctgattggtagaatatggtctaaatatttctttctggatgattctttcttaaaaatatctttaatggaaattgtctaataaaagacatcatttggtatggtataaattgtctaatacgaaactttgatttggtacaagtaatcaaatatttagtgtgtattttcacataatgatgtccagaagtttctcgagtgacaatgtctttgtttgttctgcagtgttggactgtaacctctttgctgaagcagaaaattgaccacaaagaatcacttgaactggcaagacaacatctcaacttcgaatgtaagaaagacgaggcagaatgtctgtattcaatgctgaggtgcctaaaaaacatatttgcatatcagattgggaaactcaagattgcggattcaccaaaagctccaatgttgactactactgataccttggaccactcaaaagtgaatggtcaactgtctgtgccctctaacgtagatagggttaaagtaggggttcaagactgtacagggaatatggaaaattttgacaaacttctgtatgaactggcagaaaaagatattaacaagagtattaagaatgtcaagaacatgtttcagaagaatctggagaaactcattcaaaagctcgagatagaaaaaaatgaaacagagcagaattttgaagaaggaaagactagaatacagaaaaatcataaactcaaaagagctgctgctcttacatgttttgagcataatacgtcaatgagagaagaacaacttaagtcggtggataattctcttgctaaagaattggaagaactcaggagcaagagggatttgtgccttaaaaatcttgagacgaaatatctttttaacaagataaggttgcaagaggcggagtcttgttgggtgaaggacttggaatcctgggcttctgatgaattgttgaacaaaccacctataaaaaaagctgtaactgggtctaaatgctctctgagtgatcaagttagagttgaagataatcctgataatctccctcttttggctaatcttttaaataatcgtagtcaggaaaatctactgcatgaaactgctgctactgatgaggtgacgtgtattcatatagattcactggctgcttctgatagtttaccaggttcgggatctcttgagcagaatactactggacctgtaagtgatgctcaagtaattgtctcggctgatccatctgccaatatgcaaaattttgtttctaccgagagctcttcacgtgaagcacatattgccaatgaatctaccccaatcgtacctgagactgcaagttccattcatggtgataagattgtctacactgaagttcaaatttctactaaagaacaaattgcacagggagtaacattagatgttgatcatagtggagaaaaaggtactgaactctgcaatgtcacatcaaatggggttgctgtcatcaaccaggaagatagagttgataatgcttgcaatcagaattctctttcccaggagccgccaccggaaaattcatgtgcgcagcctgctgttactttggctgatggtatagcagcgtcacgtaatgaggtttgattcttttcttaatacgctgttgatttatatggagtatgtttcatttataatatgtcattcctcttgtataagtaaatattacattgttctccaaagatttttatgcactactttcgtcgtatctgctaggatattattgaatgtaatgtgttttacaagatggtttgtgtgggtaccaatttttttttttaaaaaaaaactgggtttctcttttaaccctacagtatttgagggatcggaaactatagctattgcattataggtaatccaggagaggcacgacaccacaccttgtaggtgcaaatacatatgtgatcgtattagctctctctcttgagtctggaaatcattcgtaatgttggaatgaaataaactgaaaattgttgaaagggatgaaaatttttgttgttggttactgaccctttgtattttcaggtgcccctaggtgaatgtgatttgccaccaatatcttgtggaacacagcttgtagatgcccaaacagctgataagcagaatacattagaagaagttgtacggtcgggatcagaaccaattccaccattatcatccactcagtctgttcccgcattgcagcccgtagcacaattggttgaggaaaatgaacgtcggcctggtgatgagggtttgaactctatacaggtttcccaggctccagtgcaacctgttgagaaccctcagttttcaaatcaagctgtttcatatcctatgacgagttcatcaaatacacccgttaggaattcaggaatgcatgttcctgaccttaggaacatgtctgtttctgaatcttataatcatcttgcaccacccatgccgcttccaatgatgtcgtgggggggtccgcccttgaaccctgatccacttcaggtggaactggagcgattatgtcaagaatttgatcaaactcgtaagacctatgatgataaggtcggtttcaaattactaaatgcgtttctgtatcaagtaaatatatcatttttagatgatggcttcatactgactttacctttttcttgagcagaagcagcatctaaaaggtgattatgagaaggagattgctgaaattaataagaagtatgagacgatgaacagggaggtcgataccgagttttttgtaaaaaataagaatttcgatgatcttcgcaacaaattatggttgaataaaatcttggcagaggcattcaggtcaaagtgtgaatataggtcaatagataggtctggtggacctcatcaaggtgtgtttctttctggcgacaacctttaaattgttttttgtgcttcgctctggtcttgagttaggaattgtgtgctgttgcatcatctcttatgaaagtgtgccaatgctaaatttgaaacaaaaataactaaatacgttgaatcatataaagcacaactgccatataatattgtcaatacatgcacaataaacaattataaaagtaaattttgaatagcattcattgctgtgccaaattcgtttttgtatcaatttttagcatattctaatatgacacttcttaacattacagcgaagagttgatcttaatatgaaactgcagtcttgaatatttcaatccgttgtccatctttactgtgaccatgcatttaaacctacttttttatgtctgccactgtcattttgcgtttgatttgtatggctattttgttactaacttatattcgtgggcagatgtgaatgctgctgttatgcagcatctggttcagctacaaaactcttttcctatgcaacaaaacttacaaaggcctccttttgttcctatatgttcaggcgctccaattgctactgcacaaaacgtacaaaggcctccttttgttgctacatcttcaaccgcaccatatgctaccatggtgcaaaacgtacaaagaccagcctctccagctttcatactgcaaaatgctcaaaggccagcctctccagctttcgctccgcaaaatgctcaaaggccagcctctccagctttcacacagcaaaatgctcaaaggcctgcctctccagctaccgcagggcaaaatgcacaaagactagcctctccagctaccgcagggcaaaattcacaaagactagcctctctagctaccgcagggcaaaatgcacaaagaccagcttctcctgctaccacagtgccaaatgcacaaagatcagcctctccagctactgtggttccagtttcggagccttctggtactacaacagtgcgagcttcagtacccttatctacacccgtaccaaccgtgccaactgcgccagcaagacctccccaaatcaattccgtctcctatccagctccaaatcttcaaggcagtcctcagattcgatccaccccaccacatctcctccgaccatctggacccagtcttacatctcatccccggggaatacaacaacaaacacggccaacaaatatccctgcatcagcattaaacacagttcccaatttacaaccacagatgccatcatctgtgaatcagtctgttcgagctgcttcaagtcaaccagttagtttgcctacagtaccagttagtttgcctgaagttaggcaaaacactcagcagtttaactcaaccggcacaggtagaccaaccgacgtagtttgtttgtcagacgacgactaaccaattacagcagatatacaaacctaacatggtcgcggggttctctgaccctgggagtattttttgacatgaccgaccgaccgaggtagacaggaaaaaaaagaaatggtagctcatttttgttctaaggcctttgcagctttacattacaaaatgatgtctttattatgtaaatatcaaaagaaattattcttaccacccttcctaatgcctgtcttgattagagttgtaattttacattattttggtcgtcgtttatgctttctggtagagtcattttaagaagaggaatatccaaaaccatgaaaaacaagtaaaaagaaattatgtataatatttaaacaaaattaaggttaaattcatgaaaagcctcctacaactttcttattctctatgtggtttttgtgttacaaatgaactctagacagtgtatcatttgtagtacaaagttttattatactttaatcaagtaaatgaagtaaaattataggtgttaagtaggtagaaggatagagcattgctattgggtattaaggtgtttagcaaataagtaaaaggtgatattgaattgcatggaatagatgctttttagcaattctcaaaaagacatgtatagtattgagaattgttatgttatttgttactagtggtacattaatacttagtgtatttttaaattgtatattgtataataattattaaattaaattatataagatctgataattaattatacttttagattgtaataaataccactgatatcttctagtatttcaatttggtacaatattagcacactaattgagattgcatattaattggaggctatagttgttatttttgatattttatcttgggaaatttgcggcataaatacatactttgttcaatttgttgctattaaatactcaaaatttaaaaatggcagcaaaagtactcaaatattcaatttctattatttccattagtacctattttaacagttctgttaagtccttcgagaatgacacgtgtcaattttcaattggtatactattattaaaaattattaaaataattttaaaatgaaaaataaataaaaataaaatatttttttctttctttcttctctgtctcttcaattttctccttctcgactttcctctcgcccaacttctaaccagcttagggctctctcaggccaatgacaacccaaacggaggccacttccagcttttcttctatatattactttggctctgctttcaaccacctccgatctccatctcaaacctaactcaaagccaactatttttaccagctaacccattttggaatcatctcaaaagatttgtaaaaagaaatggtaaattttcatctctccatctctttgctttgcatggttttctggcatctgggtattcttcttcttccgattaagctttctcatttatttatttttaatgattcctctagtgggtcggattttttagattagaatgcttgagttttgtatttaaagattgaatgtgaaatgtgtttgttcttctttgagattcacgaatttgataaatgtagaataatttcatactaatgaacccatttgattagtttttattttttaaggtgagaactaaagtaaatttcccaccttaaaaaaaatcctatatatatatttaattatttattaaattttgtaatttttttttttattatttttctaacttttctgtacaagtttttatattttattaaaatatcccttcacaagttttttatttaaatttttttatctggttttttagaccaatcaataattcgttaaaaagtcttcttcgaaacttagaattatttctctagtagtatggtttcttgttacttcaaggttattattgatcacccaatcatttaaaaaaaagttgatgttgaaactatggaaacttctgtgatatttttttttattattgacgatgctgacagctaccatgtgggattccacctcaccagcgccaatacgtagacatttaatattttgttctgagtggtgaaattcacactagcataacagtaacgattgcattggatataaacttgaagtaaggtagaaaataatactttttttttt

SEQ ID NO: 28232 - DNA, 1775 bp, Cannabis sativa
  modified_base (1720)..(1725): a, c, t, g, unknown or other
gatcataatcctacttcatttcccaagtaattacatatttaataaaatatgtccatttaaatattatttattttctgggatattacagttacaatgttaatatatagtcagacaaacatgtcatactgtgtagttgtctctaattaaacatagatctaattacaccgtgactttctaaatgccccctaagtactttgttatgaatatcttaaatctccgtgctaaatgccaaccgaaaaagtagtttcttaatgcactcttctaaaggatgtgaaaaagatgttgcaacatttaaaaataaaaaaatcaaacacgaaatttttttaaaaaaagaaaaagccaatacggccaaaaataaataataaagagcattgttattgagtattagtggtgttcagtattttttataggtgacgccctacgtttagttagtgatatttctaaaaagttaatttctaatttatataggactcgatacataattacactaatatctgtatgacacaaaaaaaaatattaaacagtagagacgtgaaactataatcaaataaaaccaaaaataaataatttaaaattatgcaaaagggtagacttgaaccctagacatcgatggaaaaaaccacgtgcctattgtctttaattacacagtgactttttaaatgcgtcctaagtatgttgtcatgaatatcttaaatcttcgtgctaaatgccaaccaaaaaagtaatttcttactgcactcttctaaaggatgtgaaaagatgttccaacatttaaaaataaaaaattaaacacaatttttattttaaaaaaagaaaatgcaaatacggccaaaaaaaataataaagagcattgttattgagtattagtggtgtacagtattttttataggtgacgccctacgtttagttagtgatatttattaaaaattattttttttaatttatataagactcgatacttaattacactaatatatgtatgacaccgaaaaaaaatattaaacagtaaacacgtgaaactataatccaataaaatcaaaaataaataatttaaaattatgcaaaagggtagacttgaactctaaacagctttctttaaattttaatatattttattattttcaaattataatattaatatatttatggagtgttaaaaggtatatatattgacgcaccttttacctgtttcgacatctaaaattttttttttatctattttctttttatattcgtatatgttataattttttaagatatcttactaatttttgagaaattcaaacggtctatttcacacgcgtatagaataaaatagtcacgggtgcaacacattatttgaatgagaaatgttagtaaataaccctatttttaactttagtgatagttaatgtctattttttaaaataattaaacaaatgtccttttttactttttaatacctaaaatatccttaattatataaaatgtattataaaaataccttagagtaatatgaatataatatacaaatactataccttagagtaatatgagttattatgtcatttttttttttactgatatgtattcttttaattttatttttatttctttccttcatgatatataatataacatataaatattataccttagagtaatatgaatataccacaacaattctatagtcaaataaatatacaaaagaaacttaaataaacttctacaagtttttttnnnnnntttctttcatgatataccatagcaaataaaaataatataccactctattt

SEQ ID NO: 28233 - DNA, 1863 bp, Cannabis sativa
agaagataaaaaaccttggtagacatggtcagatcgatgatgtactactcatcactacaactaaacttttggggatatgtacttctagcggctaccaacattttgaatgtagtagccttaaaaagcataaacaatactccaatgaattatgtaatgggaccaaacccagtttgaaatatttccatatttggggttatcttgctcatattcttaaactcaggatcgggaaacttgctcctaggactgaagtgtttatgttagtaggatattcaaatgaaactcgcggtcactacttttgtagtcatcaagacgaaaaaagtatttatatcaacaaaggctacttttcttgaacatgactatatgaaaaaaaaaagccaagttgtcaagtggttatcaaggagatcagaaataataagatatctgaatcaacgattttcgcaccattagtcgaacgacctatagtaattaccatagttcttaaaaacgaaaccctggtacatcgttgtagtggaaggattgtgagacaacttgtctactatgaacatgaagcacatgttcttgtctctaacatagacaaggacgatccattaacttacaaagaagcaatggaagatcccgaattagacaagtggaacaatgccacggatcaagaaatggattccacacacacaaacaaagtctgggaatatgaaactccacctgagcatattatgcccattgtgtgtaagtggattttagagatgaagataaatgctaaagggaaggtagagacctttaaagctaggcttgtagccaacggctacacacagggagaaggcgctgacaatgacgaaacctactctcctatggcaatgcctaaagctattcgcattcttctttccatagctacaacttatgattatgagatatggcaaatggacgttaagaccgcttttctaaatggcaatcttgatgaagtcatatatatggaacaaccagaaggatacgtgttaccaagggtagatcgaaagttgtgcaagttgcttaaatccatttatggacttagccagccttagatcttagaatgtcacctttataagactattaaagagaatggctttaaagaaaatgaagatgaagcctttgtatacaaacacattaaatctaatattgtggtattcctagttccatatgttgatgacattctactcattagaaacaatgtagaaaggttattggatgtgaagaagtggttagccaataacttctaaatgaaggatttgggagaagcaagctatgttctcgggatcaaaatctatagagatataatacagagaacattaacactttctcaagaaacttagattgataaggtgctagaaatattatcagtggagaattccatgaaaggactaccgtctagacattgaattactctatgtaaggatcaatgtccaaagactcctcaagaggaagaggaagaggacatgagaaagtacccttatgcatcaataattgggagcttgatgtgtgaaatgttgtgtacaaggcatgacaaaagctacgctgtagggactattagttgttaccaatctaatccatgttttgaacactggagaatcatgaagcacattctcaagtatcttcaaaaaatgagagatctcatgcttgtatattctactagagagtgaaaccctactagatataatgatttagatttcaatcagacaaagatagttaaaagtcgacatcagcgtcagtatttactcttggtggagcatctatagtttagaaaagcattaagcaaattagtattgtggattcaaccaaggtagtccaatatatagtagctcgcgaagtagctaaagaagcagtttggttgaa

SEQ ID NO: 28234 - DNA, 3257 bp, Cannabis sativa
  modified_base (3136)..(3138): a, c, t, g, unknown or other
cattcagaattaattacattaatagaaaataataaggagaaattttgtagaaattatattatactgataatgatcataaacttgctttcacaattgcatccattgtattctgttcatgaggactgaatttgtccgtccctgttcttaagcttcttgtcacctatttaatttgcaaattgtattttttgaaattgaaagaaacaattaatatgaggatcatgtataatacctagaaacacaatgaagaagaaaggactctgaagatcccaactcctcaatgcctttttggggtcctcacgatacgagttcggaaacaccacaaacttcaaattgctcacgatccttgacagatccctcttcatcgtatcccaaacaggctctattagcatgttaagagtcaaaactaacccgatacaggcaatgctcgagttcccgttggtcgaggtggtaagtagaggagagacttagccccggttcgaaagatgccaccaacactaaagcctcactgctgctgccaccggttctagcaaagtcattggggttcagggtacgatagagagaaggacaaactcttcgaggatgagagagggtaagaggtcttcgataatgagatgagagtgagagagaaatatgagggtctgagaatgagatgagtattttaatttttatatgctctttggtctcagttttgaaccgagactaaagatttttaaatcctctttagtatcggatttaaaccaaaatgaaaggtattttattttttttctaattattttaagtcttgggtattatattttttaaatgtgagttttgaacctacacttaaaattaagggtactctatagtgtaagttttttaaattaaatgaaattcgaaccgacactaaaagtgtcttttgtagtaaagagtggattataggcgcataacttgttgtaacacttcatacaagtgtactttcaagatgatttgtaggaggctatctaaagtcctccccagcttaataaacaaaaattagggagcctttgtgaagaataggtctcttgctcatgatatcttaatctttcaatacttgactagaattacaataggaagaacatctctccaagatgtgctttaaagattaatcttagtaaagtatatgacatagttaatagggaattcttggaaagactgttagtttgcatttgctttccctctcggttcatcaattgggtcacggtttgcctcaagggtacttcatattctcttatgatgaatgtgagaattcagacagggtttcacggagctaaagggctaaggcaaggtggccctatttcccccttgatttttgtgttagtcatggagtatctcactccacttttccaggctgggactaggcataacaccttcagattccaccctatgtgcaagagcctcaagatcattaaccctttctttgcgaacaatcttataattttcttgtaaagaaaatgttagttctgtgcaatgtgtgaagaaaatatttgatgagttttattcgaatacaagtcttggagctaatcataataagttcgaggtgatttctggaggagtgtccaacctttataaagagtagtttctcagggtgctccaatttgaagaaagagcttttcctctcaagtatatgggggttccttttttaccaaccaagagaaaagtcgaggactgtggaatcattctcaagaggattaagttgagtcttcattcttaggcgagtcgtcatctttcttatgcagatagatctcaactcattacctctattcttttcgggctacgaaattactggatgagcatttttatgattcctcaaatcattgtcaaagaggctgataaactatgtatgtggttcttgtgcggaaataatggcatgaggagtaaaatcactttaacttcttgggataaagtttatttatccaaatcttatggtggggttgggttttggtgaaggcgtcaagtggaataatattatgattgccaagtatgtttaggcaattagttaaaagctagattctctttgggttaagtgggtaaataataattacttaaagggccaaaaattttagaggtatcaacttaagattgatgttagttggtatttgagcaatttgtgtcgtatttgtgataccttttctcaaggagagatagatggagcaagcttccatgagaaattcagtgtttgaaactgtaaaaaagtcttctacatcatgagaaggtgaagtaccaacactttatgtggagtagattaagtgttccaaaacaccagtttattgtttggtaggttgttaatgcaagacttcttactcgtgaccatctacaaagattacatgtgtagcgtgattgcaccctttgtccggtttttagagctacaaaggaagaccattgtcatctgactgtatattttttcggcaggtcattagacaaattcatgccttgcttggtactgttttgtcttagtcttacactgactaggtcaagtggattgaaggaatgaagaagggaataaagtctaagataactggggctgtgtttgtagaagagatatatcatgtttggcacaatagaaatacttgttttttaattcttatacccatagtgtaaagtatattgtagatgatagaaagggatatacaatatagagtttatagtctaatacaatggaaaatgaggaagagtgataagagttttttatgagtatttgctctctgtgagaattggttttttttttttggtgaattttgcccttgctttgtattgtggttgtgattaataaagtcatcatcaatctcaatatcaatcaatcaatcaatatatttatataaaggagagtttaaaagtgatgatgtagcatctcatatttttttcatagtatttttactattttgtgggagcttcaagttttgtctactaaaaaaaatctactaactttgtgaaaaatcccacattgtttaaaaagtattgtggttttctatatccaaactataaataagctttcctttgccactttcattagtcaaattattattattttttatagtgtagaaaatattatagcaaataaatattttcttagtagttttttttttttggactaattaataaaattagtcttatccaattnnntatatatttttagttctgttttgatacttataaattttgttatttatatattttttattcatataatatactctttagtaattttattttaatgtcacatgttgaccgaggttttcggc

SEQ ID NO: 28235 - DNA, 1097 bp, Cannabis sativa
  modified_base (33)..(40): a, c, t, g, unknown or other
  modified_base (66)..(66): a, c, t, g, unknown or other
aacaattttaatagttcagggggtatttttaannnnnnnnaaagttcagggggcataatttggtanatgtcaaagttcaggggcaaaaatactaattagtctaaaaaaatgcatatatatacataaaacctagaattcatactcataaacataaaaaaaaaattaaaatgaaagaatgatgatcaagaactaccaaacaatacaggaataaaatgcaaaccaaagtgggatttacatttttgttttactagactttttaataccctttttgttggtaattgtattgttagttggatttcacgtgtgtttaatgagactgctcatgctcttgcgagttggggcctgcctcattcttgtaatagtttgcttcgtttttgggaggtgagtctccatgtacttaccaaatttttcgttttagcttaatgaatatgtggttttcagcaaaaaaaaaatgatagagaaagtgcaaaaagaatttaaaaccgtgaccaaactataaaaaacgatctagattaactaaactattcacaccaaatttacttagttcagtctcaaatgatttggtctgtattaattagggtttaaaagcactgattatgaattatatgaacaatcctacttaatacttatgccataaaatatttcttttaaaaataatgtgtactagggggtgtacgtcggttggtttagtcagataatagtatatttttatcaacccaatataaatatcgagttgcaaatatttaatcgtaacccgcccaatcaaaaattagaaaaagctcaacccatctaacgattttgtcggtttggtcgggttaacccgtccaaactgttattcactttttttttataatttttattgatcttagttttttattcaaaaaattagatttaaaaaaataaaaatatattatttatatttcaagttaaaaaatattatagtccaaaactccaaattaattttaaaaactttaatataaattaatataatttagtaaacataaaataattgaataaaataataaaaaaaaagtaataataatgtatagattttaaactttaacttcaatatttaaacacaataaaaattattaact

SEQ ID NO: 28236 - DNA, 2015 bp, Cannabis sativa
acttattttctttcaaagaaaaaaaaagaagcaagtgataattgcagggatagcgagcttgatgtatcaagtttggatgaatcgaaatgattccctgtggaatgacaagatttaaacagttagtaacaagtaaaagaaaatgtaaaacagagaatcaatagcttaaaggagaaaaaaattcaatagaggaaaatgagtagttcaatacattgtaaatattgttttgcttatttttaggtctctatttgagatgcttatagtatgtaaattagtttgttgagcaatacaattttttgatacataacaaaaaaaaatattaataaaatgagataattataagaaacacgtgtgtataagattcatacattgattgattctatacaaatataattaatttttatttaaatagttggcaggtaatcaagatatgtatattaattaatatctcactcaacatgtgtaacattaattaataaattaatatgtgaaaacaaattctgacaaaaatgttagaaaacatttttaatcaatgcaatataacttataatatatatttttgttaaaaaaaatgcaacttattatatataatatagtaatgaaacaataatagaatcatttcttagcatacatggtgaacgcgttactttgtattgattatttttggtatattaattcaaagtatcaaatgttgagatttttctttatatttaactaatcattttttattttgttttattttttatttttaaataaatgtgcaaatgaaatcagaagaaatattctatttacattaatatatacatacaataagatctcaaataaaatatttgtacgtatttaatagtaggataaatatagcagcataattattaaaagttttaagcttgtaagtgacataaatttaatgtttattttagtgctcaatgtatataaaactgtattttttctctaatttcgtcagtatagactttattattgtcttaaacatgacacatataagactcaaattttagattatttaaataaaaatatgtagttacagttacttccaaatattgttttaataaattcaaaacagagtctatattgacaaaattagcgaaaaattacaattttataaatattagatatttattccgataaacataaacattaagtttatgtcacttaaaaatattaaacgttaagtacttatatcactatttaccattaacatacgtaatatcgtgttatgcatttatatgctataatatttcaaaaaatattatttagtaaaaaatatggaaatataatgtattactccaatatcaatattaaatcaattttagactgtcaatttgaaaattccaaaatacattctaggttatgataggcttccaccatttatgcatatgtctaatcttaacaaatatatatatatatatatttatatatatatcaaccatttttttttcacagtataacaagtatattagcatcaatatgggtaactactaacatttggtgattgtatgaatgaaaaatgttattgaaaaagatgtatacagttgtggcttgctgccaacatataataaaatatatatataataaagtgtttatttcataaatacttaaaatcgacaaaaatattacaatttacaaatattcattttttttaaacgaaaatacagagtgttgtacgtttttttttttaattatttttatataataaggaaaaaaaagtctgattttaaagtaatttgtataaatttccttataataaaatataatgtcaataaatcatatattcaatatccaaataataaactaataagttcttgttctatattttcttttttataagcataatacataaatttacttaacaacttttagtttatatatgaatataactatctttgtacattctaatgaagatatatattatgaaatatttatttataggcggcgaaacttttatattttgttccataatttttcctataaataaactaattaatacacaaatgtataac

SEQ ID NO: 28237 - DNA, 1459 bp, Cannabis sativa
tttggccttggccaatttttaattcattgaacctttcttggatgcaccataatctcgtcctttctgataatgtctcctagaaatgacacctgtgacagccagaattcacactttttgaatttccatagagtttatgaaccctaagggctaagtcgtcgcagaaccatgcaaagatgttgttcatgctctgtttttgaccgagagtacacaaggatgtcatcgatgaatacaaatacaaagttatcgtggaaatccttgaatactctgttcataagatccatgaaagttgttggagcattcgttaatccaaatgacataaccaagaactcataatgattgtacctagttcagaaagttgtctttggaatatcttcttctcaaattctcagctaatgatagcctaatcgcaaatcaatcttggagaaacccgtcttaccttgaagctgatcaaatagttcatcaattcttggtaaagggtagttgtttttaatggttaacttgtccaactcccgatagtcgatgcatatccaaagagtcccatttttttcacaaacaaaaccaaagctccctagggcgatacactaggttgggtaaaccctagatccagcatcccttgaagttgtatcttcagctccttaagttctgtcaaagccattcgatagggtgcttttgaaacagattctaccccaggtacaaaatcaataataaaatttatttctcgctgtggtggtaaccctagtaattcatcaggaaacacatccaggaattccttaaccactctaacctccacgggtccgagtatcacgaccctatcagaattaatcaacactactaaaaatcctacacatccactgcgtagtaaatccctagccttcagagctaaaattcttggaacacaagaaccttgaaccgttctaacataaacaaatggttcctcgttctttggttgaaaagtcaccattttttttttgcaatcgatattggcaaagtatttggacagaaaatccattctgagtattatgtcaaactcggccaagggtaactccactaagtcaacacttagttctctgccctcaattccgattgacacggatctaacccattttctgaagataatcaattctccattaggtagcagggttccaaaattccatttcaaagatatcacaaggccacacaactggctaagcacccttgatgctacatatgaacgtgtagccccggagtcaagcaaaacaatataagtgaggttgttgataagaagatgacttgtaaatacagaagggctagctgcagcgtcagcttgggtgataaaaaatacccttgctagagtaggcttaacttcttacttaggttcctctttcttcagctgaggataatctttcttgaggttcctgactaatccacaataaaaacaagctctctaattacacgccccaggatgatgcttcttgcagcg

SEQ ID NO: 28238 - DNA, 2728 bp, Cannabis sativa
gatagctctaatatccaaaagcttcaaaatacaaagtctgcctccaatcgagaaaagcaaagagtaaactgaaggaaggaactgtaacacaataaaattctaatttgggtctctactcgattaaagcgaacttatcaatttccctaggaatcatcgaagggaaagaaagttcaaaccaagtaaagaaacaaaaataaaaaacccaatcaagtctttaccaaacccacaaccgacccagagagagagagagattcgtcaccgaaaccacaaatactaaaaacaacctgattcgaggaaaagaaaaacgatccaaatttgaatcagaggaaaagaagaaagaaactcacttgggagaaaaaaaaaagtctgtaaagagaaaacaaacaaaagtaggaaaaaacccaagtggggttttagtttttacaggatcggattctagattaggctttggagagattctttaaaaccctaacaatgagagaaagattgtaattgagagaaggcagagattaaagtgaatatcactttttgagctttccttttagcaaattccgacgagtcatgccaaagccaaagctcccctaaagtgcatgacagtaaggcaaaaccagaaacacagacagaccttcctcttctctctctctctctaaatctgtgtattttaatatataattattttgtattaattatgaaataataagttcttttggttttgaggtatcttaattaattaatttgttatacacatgttgttctagtagtggtggtactttttattttgtaccatacactcatatgttcaattcaaactcaactcagtctcaaggccaaaaagtcatgtctactgtactacattttttggtctacacttttttttttttaatttttatatatttaatttagtaataattataaaatattacttatcataatagtaacgtatataactttttttcataaaaaaagaaattgtatgatatatttagagatcatggtatattagtttgttattaaaaattgaaattttgaaattaagtacttgatagaagacaaggagaatctgggagaaataaataaaagtagtttattattattattataattaaaaagagggaattattgggtggaatgcatgttacattaatgttaatttgagttgttttaagaaaagtccacatggtggcttgagttgagtttacacattaagttaagcagttacatttcttgtaggaaaatttagtttatttattacctatatatttatataaaggaaggaaagcataaaagggtgtatgtgattctctctctatatatatatatatataaaaatttgtctattaaattttgtgagagtataatatgattatttactaagtttaattctacattgtttaaaaaatatagttggacatatccactataaataaattattttcttgtcatttttatttgtatcaaaatttatattttttctttcttgaataattaatttaataaatcttatctaattaattagttataatatcttttaaaaaaatcataaatcatttaatttataatctataatatatattatattatgtatatgcgtatataaaagctaaagatatatatatatatatttcattttattttaaaattttatgagaattttatattatttttatatgatttttctctttaaacatgcgttaaaaataaataattttttttatttttatatatgccaaaatttatttatatatctatatttatataaataaatagttataatatttttattaaaaaattatttaatttttaatttataataatatatattatgtatatatttatataaaagttaaacatacattttttttattttacttttaaaattttatggaaattttatattattttatataatttttttctttaagcatgcgcatgtttttttattttatttgtcttaaaatttatatgtatatttatataatacacgtcaaataaggtgtcatcctataatcattattgtactatttatctatttaattagagttttgatgagattgtgtttttttttttcaacttatttatttattgatttttgtaactatttttatttcatatttttttctttattttatataaagaaaaacacaaaactgtgtagatagctttttaaaactattttttctatttttctaattttgtaagaatatcatgttaatgtgctaaaaaaatatgattattcgctaagcttaattttggtaataatctcaaaagtatagtaggacaatattacatgtctatctatatatttatataaataaaaacctaaaaatatgtaggtggttccctatattctttttttctttcgattgttctgattttgtgagattgtcatgttaatgttctaaaaaaatatgattatttactaagcttacttttggtagtaatctcatattaattagaaagtatagtaggttacatatactctataaaaataaattattttttttgtcatttttatttgtatcaaaatttatatttttccccttttgggtaattgattaaattaatcttattcaattaattagtttaatatttaaaaaaaaaatcatttaatttatattcgataataatagggaaatttaattttttatgcttacatttagttaaaaaaaaattctaaacaaataatgactaatatttgtaggatatgacaacttttatgatatcccta

SEQ ID NO: 28239 - DNA, 2375 bp, Cannabis sativa
tttttctcccacgcccactgaagagctaaaagaattgcttttaattctgcaatgagggctgactctgctttggttcttgaggtcttgtgcgcccaactctctaaattcttcattctcattacagctgccagtcgtgcttctcctctcaaccatgatgcatctgtgcagatgactctctttccatccaaaattctcggccaatctgcctcctccagtctgttctttggaggatcagagaagatgtccacaaggtcatctttaccaaaataagtagaataggattggaaagccatcttaatattccttttcatcatatcttgattggctcctatccctctcctacataagtcatttctagatctccatatctgctcccaaacacaacccatgttggttaggatctctttcttgtcataatttgagttttcaagagatgtcaccatgttttctgtgagatcacattttcgccaggaatcttatccactaacaaaggaatcttccctgagaaccataacatttttgcaaacccacagttcttgaacaggtgtagacaattttcctctgcagagttacaaaggggacaatccttatcaaggagaaacctcaacttttccctgactggaagagcctcattcagtacacgccaaagaaaagtcgataaccttgggtgaagatctgaatgcccaatccaagtccagattccttttttttttttgatcaaaatgagcttcttgatcagtcccgtaggcacttttgatagaaaaaatgccattttgttttcctgtccaaattatcttatccttgtgatttaaaggaagtctaggaatttccgttatcctattacccaaatcaccaaagatttgttgcaccacctccttgttccattcattccctatcgatagatctgctaaggttctaacagtgtatcccttcggtttaatggattccattagactgttgaagcaattaaaatcaagccatggaatccatggttgatgccatacatctatttcttcaccacttgccgccatggaaaaagaacctttggctaaaatatcacgaatatcaagcgaacacttccataggaaggaatctcagtttctcttttttaccttccaaaaattttcatacttccaatacttgctaataaaacaacttacccaaggcttcctctggccctaaccctccatgcaagtttagcaagtagtgctctgttaaggtattcaaatcttcttatcccaagccctcccgaatcttttcgctagcaaatcttgtcccacgatctcatggccatgaatctatccttgttcgaattgcctatccaccagtatctccaaactaacgcatccaactctctacaggtagatagtgggattttgtttgtcgacatcatgtaaaccggcattgcagctgctaccgtcttgattaaagttagtctctctgcatatgaaagcagtctcattctccatccctctaatttctgcagcattctgttcttcaaattcatgtagttttccttctttctgcatttaaaaacaaatgtgtttcccaggtgtttttcttctccttgagattgttttatgtctatcaactccaaaatttcttttcttctggctgctgatagattatttgagaacaaaacactggattttgctttattgcactcttgaccagaccaatcctcatatctcttaatgcattccatcatctcctttgcttccacactatttgcttgagtgaagagaattgtgtcatccgcaaacattaaatgagatattggaatcacatttcttgcaatttggataccatggatcttcccttcgttttctcgtttttgaattaactttgaaagcacttcctgacagaggagaaaaatgaagggagatatagggtctccttgtctcaaccccctttgaggcttgattttctttagaggggaaccattcaataagaccgaataagttacccctgtgatgcaagacatgattaacctgcagctcttctcgtcgaaatcatttgctttaagaactcttagaatgaaagaccattccattctatcataggcctttagcatatctaacttgaatgccattaaaccccccatgcctgattttttcctgacttatgcaccaattcttgagtgagaatcgatgattcagaaatccatcggcccggaataaatgtagattgaaaaggggatattaattgctccatatagggtcgtaatcgatttgaaagaatctttgttattaccttatatcggaaattacaaaggcttattgggcaaaattgttccgttctcctcggattatctaccttcggaatgaggtagatgaatgtgtagtttaatttgggatggatttctccaatcctaa

SEQ ID NO: 28240 - DNA, 7808 bp, Cannabis sativa
cataccactagaccaaacacccttagtattcgatttaattcgaattaaattattatattaattatataatttaatatagaaaaatgaaaataaaatctttttatcgaaaaaggaagcacatttcgcagtaaactgaattaaaagaaactaaaaatggcggcagtttcaggtgcagcgtcttatcttctccaccgaattcttcaccggaaaactccatcgccaccgtcggcgtgttttctcaaaccccttattctagtttccacagtttcgttctctaagaacttacccaaatactccattggagggctctcacctcgtccccatgagagcaccacaacagtttcccattctcatatctctccttggctttctcctccttccgtctattcctcaagtgggtctctatccatatctgtagaagaagatgaagatgacattgatgatgaagaagaagaagaagccgaagagcttgaaattgaagattacaatgatgttgaggagaaggaagagagtgaggataagagcgataaattgaatttagcggaagaatctaaagtgggtttgagctctttgcgtgtgaggactcatgggatgaagctaccgagtcttacaattaaggaaaagaaggagctttcgtcttacgctcacagcttagggaagaagctgaaatctcagtcggtggggaaatctggtgttactgctagtgttgccacttcttttgtggagaatcttgaatcaaatgaacttcttaaggtaccattaatcaataatcggtactttttattactgtttttgcttttgttgtgatgaagttctttaggtgtttgataaaattccttactgagctttttcatatgaaaattgggaactcatcgtttttgtttttgcttaaacataataatcttgctgttttagttgatttttaactcaagggacttgaattaaagcgttttattcattgttgaattgtattaactgtaattagagcttggtttcttgtcttgcactcatgattttgtaagattctttgaaacttggcattggttagtttaataagcttatattatgagcattatgaaatcacaaattagattcaagaacaataatttcaatgctcatgattcagccaagatctagtgatctacattctactttgggtattgaattgcacaatatatgcacatgtaccaccaacgttgggcactgcttctccttgaaccatttttgaatttgattactaaattgtgtaaggtccctgcttggaaaaactttccaggtcatccattctaaaattatcccaggccaaggctaagcatgcttaatcgtagagttctttcgtgatggactaccgaaaaacaagatgcaccttgttgatataagtagtactaatcaatccatttaaaccctcttcaagtgtgtagtcccatacttacatacacagtcttagaatcatcacacttgaccttctccaaacgatgtgcaatccgaaacaacaagaacacacaagatatcaaatacaaagatgcaagagagaacatatttcacaatcccacagaacacccaattcctacatccaccctatatgtacgatgacacgccctttagcctgaaggttatattggtctcatcacattagtaatgttagactatgatttaatgggtcatcctatagttaatgtaattagttgttattaacaattaatagatactttgactaatagttgtgaatatgaaattatgttattagttctaattaacatcttcttcaacttaaaatataagataagcttgtatggcttatgttggtagttcttttactgctgtaattggaaaaatgcaacctgtattgtattagttagaactttcattccttgaagtttaaatagaccaacttattagattcgcgaattgttagtttaaattttgaagtgaagactttgatgtgcttgtccagctaacctaaagctgcaatgaaaatgttgtcaacagattaaaatacacaggacatgtcccggggagctagatgatgcagtgaagcaattggaggagctaactggttcggtagttattagtaatattggtagaacagttattctttacaaacctagcctcacaaagatgaaagcagaggagaaaaagaaggagaatatgaagattttcatgaggaggaaacttagaagagctactagacccccatttcaggtaatcaaaaaccaagaggccaaacctcttgttctcagaattcctatcgagtttatttattcgttgtcatcattttgcctattgaagatcctcattaagtgtttttgaatgttgcagaaagaagcaagaccagcaatttctagccgtggaagacggggaagtagcaggtcttagagcatttgaccatggtgatttggcttctctttgaaatgtaagtgagtagtagttctctgagtgttgttaattgtatcttatgttctatgaatgtcaaattttggttaaaagtcaatctaaattttaaaagattagtagaaatggaaatgcatggatggaactgtacttgccaaaaccatgaaagtctatagggaaggtagtcactgagattctgtgcataaatacgacttgcaatgaagaaccctcaatttggatacataatgtgttttcttaactagacagtacttagaagacgccatgaacttaaaaaaaaaaattatttttacgctttaaagtagtttttctttttttgtatttttacgggaattcatatagcaatttacctctaaaattcacatagcaacttatatagaaactaatgaaataatttaaatagtaaatttagaaaaaaaaaaaaaaaaagccaaaaaaataatatatgaagtaatttttctaaaagaatagtaacagtgatatttttttaccggaacgaggagaacttaatttagaactttgttttaattttcatataatatgctagctaatgacttgtcaattcattaaacccaaatccatgcaatatcattacttagacatctataaaatcaaccatttgtaaaaaaattcaaaacaattatattaattaatttcttacaatagaagaagattacaaagaagagtaagaaaaagacggtttaaatcggtaatctcaaaacagtaaataaacttctcaagggcaaaatggtctttcaaggagacccctatggctaggaatagtgaaatgccttaacctcccttcttgttgagtcaaatacccttcacaaagaaaagccttagagaatttatcctctacgggcctatccacgtcatgaacgaacacctcactctcaccaccactctctctattcctcgccataatcccagccgtataaatcgccgtcatcctccccggcgcgtcggtaacccacccagtaggcgcgtcgaccataatcaaatcccactccgtatcgtacacgtcactaggtaaattcttaagcgcgagacgacacgtggagaatcgtgggtcccccacgactttacaagcctcgtcctcggcgccgatcttcatcaattcatcggcttggtgtaatttagtgtcgtacgccacgtggtacgactctaaacccggaatacgacgtcgtatttgctcaatccaagatttgtcttcttctagaaaaaccgtacggcctccgtggtttaaagcggcccacatgagactgtcgtggccgagtccgaagacgaggaaattacacggtgattttttctcgaggattctcattgagactgagatttctttgagggtttgttgtggggttacgtttgtggttacgtagtgaaccagtgctttggccaaaaacgacggcgttttggtgcatgtttgttgtactggagaaatatcgttgggactacaattattttcattagtggtggtcttttgatttgaattgttatttgagaggtgggtttggatttgtggtggagaatttgagaagtttgatctgattatgaggatgaggaagaagagaaagagtaaggtgaagacgagtttttgagttatggaaagttgagctacattgttcctcatcaacctcattttttttttttgaattttggagaaatagtgtaatgggattttgttgtttggtatttttgatgttgatttgaggtttttatttcaatttgatcatctaagaagaagaagaagaagactttgatgattaaattataggaaagagaaagaaaaaaaaaggtagtatttttaattagtattttgttttcacaatttctatgttatttttcctttttctgaaccagcaaactattttttttgtcttaaaaatgaagcaactaccactactatactactcacaacatttttgtataaaagaacaaagggttggtagatgtatctgttgaattaacaatattaattatcatgtggtttgattattattattaattaaaaatattattatgatggtttaaatgtatgtggaagatgtggtaaggtagttgggattaatgatttggtgtatataaaattgtgtaaggaataagagaaaaaaatattgtgtttgaaggaatatgcatgtatgtattattttagagaagtggcgttgaatcttagaaaggacgaggtgaggagtggttataacgtcaaattatttgttgttataatattattattacgtgttgtgttgtgttgtgtggtgagacagagctattaggtcagatcactatctaaatttaacatctaaaattatttgcatgcaatttcgtactttctttcctttatattatatatggttagttagatttagaagatgacaagtcattttctttggtgaaaaaatccttactgtattattttatagaatatggtagtattgtaattaattagtggtttttttatacttctttcttttagaaattttttgcaaattattatactcttttaacaattctataaatttgaagagaaaaagatgagttgatattatattaaaaaagggcatgcaattctgtggagtaggcagaagaattggcgtcaaagccaaacatgagaaatttgatagttaaggatgagtgagctgtgtgcaaaaagttatgagttatgataatgttgcttatttgagaaaagtgcttgtttgatatttgtaaaaaatgtcccaagagattataactggattgtgtaaatagaaagaattctacatacacaatagtcatattaaaaataggttttgtgcatttaagatgattttctttacgagaaatgttaaaagacacttgtagttaaataaatttaagatttcaaataatttaatgtattgatttttatagaatcctaaggtgacaccttaggtggtgttagcaagcaatgctctttcttgtttttttttcttgatgagagagagaaagatgaacgagagttagtaagagattgatgtgagaagttaactgcactgttatatatttaactaaaaatgataagaataaaactcgtcaatagtaaccaaagtaaacttgtatgcatttaggtggcttttggttgaggaatgaaaatatgagaataggaatagaaatagaatagaataaaatttaaaatgcattaaaaaaattgatataaaaataatacaatttttttcttgttacattggaatgatttttccttcctttttaagatgtaatagtcattctaccaaaatagtggaaagagcattctattggaatgtcattctaatactttaaaatgtaaccaaataaaaaaataaaatgaaaattattttctttccatttcattactccaaccaaatgccaccgatacaagaatttacttggttggacataattctaattctacctagtattttcaccattgtacttgctattttccatgagtgaaaaaatatgtcctaaccaaacagtttgagtggagtttgacgggttacccgctgcctcaccgggatttgtcccaccccgtctcattttatggggtggggcaaatagggtggattattgtgtggagagtgtgcatggcatataaatacaaattacaacaataacaagcacctacaagtcatgaacgtctcatccttacaaactaaacagctttaagtttttccacattatacctggacaaatcttctgagaatagtacaccattaggagaaagaaggcgtcgaagggcgaggaaaaatcgagcctaaaagttttgaaaagcaaaagagagaacttgttgagcttcaaatgaatttagattaaaaaaaaaaacaatcatcttagttgtgtggttcttacccattgaaatgctgctagtgtgtaccagcagcttaccaaaccaaaccctttattgctaattagctggtagaagaaatgaggatagtgttaaaatggtaattatggcaatatgaagattataagagggaaataaaaaagaagatatataattattcaccattagtagaattgctcccagagtgaagcagccactcattgtcatactaataaattttaggtctcggccagcctgttggaaggaacaaccagatatcaaagatattctaaagtagaagtttgtgcatgttcttattgaagggactgatgagaatgaatgaatctgaaatgagggtccttcatctaatttggttgcctctaacaaatgatgaaacctttcaagtcaaatgaatcaacttaaggaatagataacaccatggaaaagagtccaaaatgagatgagctttccatcattttaagaaagtatatataatgtgtgtgtgtgtgtgtgtgtgtataatatatatttctgtaattatgagatgagacaagaaatagaagcgcaccaacaatgttccctcaaggctgtgaattgaaggtgtagcaactatagccaaaatgtatggtataagaactttgtgcatctgcaaggaatgataaaaaataccaggagaaatcaaatcagaaatccacaagcattatcgtcctaaaaaaaagaacaattataatattgcaattgaaatgaacaagatgaatagatgaaacggcaaatccagtctaattaactcaacaagattcttgatcataaaaataaataaattaaggtaatgattataggaaaggaatgttcagaaagaaagatctaacctcttgtatgaccagctgatcaggtgtaaaaatattcggaaataaccaaggaatagctgttccaatagaccctaaaactattccaagaacagcacctacgagaacgagcgacttgagcagcattctagcctgtaagatattttaaaaactttcagactgcattgaaaacataactacttgatacagatacatatatatgtgtttgtatctacatacatagtaaagcaccaaaccttttccaaattacgtttcactccatatatcaactcaggcataaatgattgtgcagtttgtgataaaggttcaccccaaacagtgcacatgcagaacgtttgaatcataacctaaagaaaaatagtcaagtcattattaatgcaaattagatttacgttcctaaggaataattctaaagataaataaatgtaactagttttccaagtgtaaaagaaagcaacctgatgagcagccatgctgattgtgcccatggatgtagcaaaatatatgaggagactatagaatgccacctaaagatataaacaccttagatttttgaaggaaaacttaggaaagattatatccaatattggaattgagtaatatttaccttagacgtcatagtaatgaataccggagcagcaagctcaagtatagcgataagttcttttggtgagggaatggagagagcatatgcattgtaacctttcttgttcaga

SEQ ID NO: 28241 - DNA, 4154 bp, Cannabis sativa
tcggacccatttaaaattattatttttctaataagtataattttaaaattttgttttatattatatccttgtagcataatatatctaatattcaattttaattgagcgtattaaaatggcatttggaatggtattactgggttttgggttagaacccttgcacttaggtaacttcaatggcttaccatgtttgatgttataagaaagaacattaaaatcaaaattattttattgggttttacataaaaaatataaaaacattgaaatttagtgtaaaaaggattactacgttgaaaaaagattacaacaattatactaatacttcgattcctttataagatccattgcgggaccaaacatacaaatagataaaatttttataaattttaataaataaataaataaagcgttaccatataccaaaccaaacggataccgttggtttgtttttaagaactcaaaacatgttttctagaactcaaaagtcaaaacatgacataagttctaataataaatcttcactcccacctttttctttttcatttttcaaccccgctgttttaaagctcaaaagccaaaacatgccataatcaaaatacaagtttttaatcttcttagaccaagaagactttatagaagttcagtacactacaagtacactatagatggcttgcatctttctcaagggaaagtatattagagatttgttgattaaaacacaaatgcaaggagtcaaaccagcatctagacctatgaccaatggactcagactgtcagtctatggcagtgatcttgttgagaatattcaattgtatagatacacttttggagatcttcaatatctgaccataaccaggccagagatctccttcagtgtcagcaaagtgtgtcaatttatgtacaatcctctgcaagttcactgggttgttgtcaagagaatactgaggtatttcagtggcataatgaatcatggtttgcatttgaagaaacccccacacactgaagttagttccttctgtgatgatgactgagcagcagatgttgatgacagaaggtctacttcaggttatgccatttactttggcacaaatcttgtctcttaacttcatgcttaaatctcttctctcttaaatctcttctcttctctcgtaacataataaatcacatggcttaaatctcttctctcttaacttcatgcttatccacctagaactccaattgtctggtgtgataatctcagcattgcgctcctaattgtcaatcatgttctacatgcacgaactaagcatattgaacttgatttgtattttgtgcgagagatgttgacatcagacatgtaccagttattgaccgaattgcagatggcctaagcaagtctgtttcaagcaataggttcagctcttttcgacacaaacttagaattgaagatgcttcaattctaaatttgaggggaagtgtcaagggtgtcaaatatgttaaaacagttagtgaagtactctaattgtttctctggtagtttgttagtgagttgtctcagctcattctctcttccatcttgtatatatagatccttgtatgattctctcgattgtaatgaattcaattcactctttctttcatttctttctctctgttttctctgtctttctttctctttcgttttgtcttcagcttcaatgtctaagaaatttaataagagctcacattttgaacccaaaagactttctaaacaataaacttgggaattgattttttttttttgcaaagtgaacttggaattttgattaagatttgtagttgtcaatttttcatatattttttttttcaaaaatatttacttcttaattttaattttcttctccatatgagtttatcgaacaactggaaaatctatttttgctttcgtgctacaaatgatgtttgttgggtgtgcaaccaaaattctacattgattaaaaataaaaaagattgttgatataaagaatggacaatatctctactggtatgatgccttttggaaatgtgcccaaaaacaagtctgtaagggcttagacccaaacggacaatattataccaatgtaaagatacagtgtccctcctaacaatgttctagtgtggaaagacttaaacttatcatatagatttgtaatgctagcattgaaaatgcaatagtaattgctaactttaattttgggctcactcttacatagttaaccttctttcgcaaataataaaatataatatcaatatggtagcttctcggttaaatctgctcatagatgatagatctcctaaccaaacaacaacttagagataccgataaccttttcaagtgccttttgaaggcacctctcctcaaaaaagaaagtgaaacctttttcatggaagattaggaaaggcattctcccctgtggcattctctagttctatgttgcagtttgattcttctagggaggttgtccaatggattttaaatcctacggccagtggcggctctcaggtagcagatttggaatatttctctcaatttgtttcttatttatgtttagctctgtggattgcgcctaacataatttttttatttatttatattttaaagaatgtaaaaataaatataagaattaaaacaaataaaataaaataaataaacaatataatttccacatttttccttaaataaattcattaaaacctttgatttaagagcccaacacatcatttcaaacataatagaaatttttaaaacacactataatttacatctttgttattttttttacctaggcaaattttttaaaaataaatacaatattttttgataaattttatattgtatttgtatatcatgttaaattttcacaactagttcacagttaattttttttagttattccactgttattttaaaaagacaataattttataaaaaaacttttgttcaaaatccagtattttttgttaaaaaacccaatataatatccaatctaataatttaagtgccaacacttttggatccaaaattcaagtaacttcgcatacgggcattaaactattaatctagaacaaatatcagtgaaattactccaattgaactttacccaaaatgcaatcatcaagacgaaataatacttgtacaagtagtctgggaaaatatagaaaatatttcaaaactgctcaccaataaacaaagacatgttctatctcaaaaaagttggcccaaagtaacaactctcaaaagctaaattatattattatataaacctaatgaaaccacataaatgcttgtattccagcaggttcaaacaactatcctgcccgaaacctgatcaaggtcacgccgaccatgagaagtaatttttctccctctgttacacaaaaaagagcaacagtaaagcaaattgcaaattaaaaaacagaacacaacaatattagtagcaaacatgaatcaaaaaacatatttaaaatagtgccacaaagacaaaaatgaattgctctaaaatcccacagtcgattgtctcgtgaaccaaaaaccattaattccaccccccaaaagaaaaaattgaatcataatctaactagtaactaaaagtattgacaactcatgtaagaaaaaaaatctcaactatgatcatgatgcacatatttgattccaacaatactaattaagattaaggcaatagaaataaacaaatcaatcaaatatttaaattcatagtcaaggtggatacatattcttcagtgctacaagcaattaaagatgaaaacgtcttaccctttggggtcgacctccacaatgttattgttagccaattgttgcaggatgtgcctaagaaccgcaccactgcttctgcagaagtgtggtgggcggcttccgttccgcttacttccaccgtaaatcctacggaaggccccaacaccgagaccgcctcgcaagtagatcttccttgcaacagatgctacataaaaaaagtacacattagacagtaataaaacaaaatacaaaacaattacatatcaaaacacacaccaattaaacacataccagctcttatatagtaccaatctgggtcatagggggccaattccttaaacttggcagtctttaccagatctgtgtagtctggcaattcaatctgtgtagataacatcataca

SEQ ID NO: 28242 - DNA, 2134 bp, Cannabis sativa
ctctctctctctctctatcttttcaaggagaattggtgtttttccaatttcagggtacagtgtctcatgagttgagtacacactgtagcaaaaaaagtcattcatcctgtttaatctataagcccactctcatcctgagtgttgaggctgatctggaagatcttatgtgaattcatcatcaagcccattactggattggatgattaatatattatacgaaaagattcaaggaaatcctgatagtcaacaagaggtaattttttaatctaactagttagatttggcttacgtaatattgtgttgagattcaggatttaaggttcatatcaaattcaacaaaatatatttttttaaactcaatcctatttctactttcattgtaactctaatatgaaccctaaaaaccaacaccctaacccttgaccctgtgatttcaatgtgtttgttgatgtcgcaatgtgtggtgatgaggcgttccttgctattttggtgttagatagtcaaggtgagcttacgtgaagttcttactgtgaaagccaaggtgtcttctctccttgaggcagagactcttgctcttcaccacgccatttccttgtgctctagtcaatgggtgaagatccactaatttttttagcgattgtcgttagttggttttggctattgaggctaaagttcctccagtttggcaactcacactaatgtttttattttcttgttctctttattaggagattgctttttctaacaatgtgttttgaattcctcgaacctctaactttgctgctcatgatattgtagcttgagcatcttcctgcaatttggcatgttttctttcttttggggagattgccctttgtgacttctatgagattgtctttgtaaaatttgtttgtttggttagtttttttgtttaataaatttgctttgctatatatataaagtaatatagaacatattttattttttaaaaataaaaaattctaccttcatttttgtaattaaaaaaatttaaaattaaaactatgaccaaacaccatcaaaggtaataatttttgttctttaatgtatttttttttttttttatatttgttagtcactcactcactctctctctctgatgtaatatttatttgagggaattatattatatacccactttatttattttaatttttacctttattttcatattatttaagatatacctacttttatagataatgtcttcattataccccttaagttaatgtaaattatgtgctagacttaagtggatgataatggtatattgagcaactcactcacaaaagtggatacattttaatgaaatataatataaaagtatttttttattaatggatacaaaaatgaggtatttctcaacttatccctatttatttagtagcatttgagagtaagttacactacatacctcttttaacttgatgtctttaatttttaccctctctttcaaaatctattatatttacctcttttttcaatcattctactaatattagccctatcactttacaatagtttttattcttctctaattaaaatttctccaacttttctacaaatctatatattcatctacaaagaacacaaatctattatgtttgaaattatatcttagttatgtgagtgtgtgaggataattttagtataatactcataaaaaaaaatatatatttaaattaattttttttttgaaaataaatttaattaatatataaaaaaaatattctacaacttctctcggagtagcaattgagagtatactattagggaaatttacatgctttactaactttttcaattttctttcatttatactgtgacacgctgaatataacttttttactgtttttttattattattatttcggcagtatactgccttggttcaaattgtatatgatgggtttgtggcttacaggtgtcgtcttggggttgtgccacgttttttttaaaaagtaaatgtttttaaaaaagttggtttttacggtttatgtcacatttttgtgacagtttatacttgtttttttttattttttatttattattttcaaatacaaaaaaggtgttaaatcatttattttagggaaatttgaatttctatgcatgcatt

SEQ ID NO: 28243 - DNA, 8627 bp, Cannabis sativa
atattaaaaaattaattatctttgtcagcgagttaatgtgcaccagcaaaagtattttttaaaaaagcattaaatatttataatatataattaaaattaaagttaaaattaaaattaaaataaaaataataaataaataaatatcaaatatattataatacttaaatttatattgtaattacaaaactacataaaatttcgtaaactaaagaaaagtatttttagtccataaacaattataatatattgtacattgtaaactaaaaaaactacagatccacagcagtatcatcgttatcgtcatcaccgggatgggcagtctgtgaggaggacccagcaacatggctaggaggctaaaatgtggaatcggtgaaatcagaggcatctcgggcatgttaaatcttggaacagtgctagccaattggatcatttattgctgaaacacactcatgatttgactctgaatctgcattatttgttgttgccacttgttgtgtgctttctgctcttccaccccttgcttcagtgtctcatattcctcttgagtgatagtgggctgcccggagggacctgccttgggagttgctctttttgcccctgtgttaagtctcggcacctggcccagtcctcttaagtggcgtgatcgctcacgcagcacctgtgttgtaacagatatatctgcatgaaattgagcgggatcgacattgtactagaatgagacattggttggcgctggttgagtttcacgaatctcaaccattttggcctacaaaaatttccatcaaatgttagagttaaatataaattaaaatatacaacgagtttattaaaaatataaaattacttacatgcagctgttgtgtgtgctcatcgcgtcatttgttgtccttgcagtggagctttgcaaaattatccacaacactaggaagttcccctctctggggatcagcctatttttatacaatataaaaaattagaaaatattattaaaaaattattactatgttgaaaatatcataccccgctcacaatgtgaccaattatggtcttagatccccatccaccttgaatcttcatctatcctcaattttttgtattttgttcggctcttgcctataatttaaagtaaatttattgttagcaaattgagaaaaaaaaaatcataagttaatggaagttttacaactttcaattaatacctgttgttttgggtctttccagtaggcgataacctctactagcacctccggtgtcaccatatttggacgtgatatcctagtcgcttcttcctccccatattttttaatattctccttccatgcctttttcgtatatgctctctagtcacgtaatccttttgacgttgatttaatgacgtaatctgcgaacatagaattatttgttgaaaactcaaacttggtctagaaaagaaataaacattaaagtcatatatattatttttttgtataacaattttgtttgatctattacaataaaaattagaatgttaccgctattctgtcccatatagtctgaatgaccatatcctcaacgtcctcgaagtcaaacttgttcaaaggaatggtgttgcgaataagaaacttgatataattattaaacttgttgccatagtcgtctactgaggccccgatcaccatatgaaatctaaatttcaatttctggcttgcaagcagcttggccaattcttgttcaatatttttccccttctactttcccttaactccctttttcttacttccgcttgcacctgcatcagccattctacacatacaagctacgaataattaattaatcaaactattaacaaaagagacatgtatttgatttaattaacgatgggtttaaatattacaatactttaaagtctacaagtaatcatcatcattaacatgtatattattttcattctcactatcactagtgtcttcatcatcacttttataatgaaaccatctaaatctttacggttaagctgctcacggtccctgttggtcactttaatcaggttaacatcatcacggacatatttaacatcgtccagttgtgcaagttgaatgactaacaagattcccgaagagtttctttcttgtatagtcgtggtctcatcatcatcctcatctgagaaattccagatattgcgaggggtgtaaacattgacaagtttccaatcaactccattcttcaggtcaagaatgtaatatatcaaattttcttagaatgcaagtatgaatggttcattttggtaccattcacggcaacagagaaactagtgaaaaaaccatcactttttgtcctgttaccgtttgtgtcccaccactttcacctaaagataataacattgcaatccttcaagtaagtgaactcgtacacttgtttgagtacaccataaaaattgttaccatcctctccagacaccaaaataccattgttttaggtgttacaattatgatcctgatcctcaactgagaatttaacactgttaacaatacatattggataacaataacatgtttgattagagggatttgcgatggcgtacaactcatctgatacttttgcaggattatcggctctgagttgattgatctatcattgagtaaaaaagtctaatcaatactagaacaataaatcgcatttgaatgacaaaattagtagaaagcaatacttactcgagacttgaaccaactaggaaactcattctcttgaattgtgttaagattttgatcacctctaagttgtagcttgttcctatgctaactacacacaaatataatcatgttagagaatgtcatcagtgaagacagctaaatttagaatgtaaaaagtatcttacctgatatacttctccgcttcattacaattattcagaatgtaccactctgcctttagtttctcttacatttgtaaagaaacgatggtcctcttaccaattggtcgctcaacatgcttaaatacagagaattccctttcaagtttatttgggaggacatcactattttgatcttgtcagttgaatcgagtttcaacttcccaaaagtacattgaacaaaagcttaaggctttgttaactggataagcttcacaaatagatccttctagtcgagattaattttttacatattatttatacacagacacggctcgttcaattggatagacccacctgaagtgcattggtccctcaagcattgcttctttaggtaaatgcatcaccaagtgaaccattatctcaaaaaatattgatgggaaaatggtttccaatttgcaaagaatgtccaaaatacttttttgcatgatctaaaagtcttaaacattcaatgttttagagcacaaaatttgaaagattacacacagttcaagtataccggactcctttcttgaaaaacttttgaatgccccagcatcaagctttgtaataacacatggtaatcgtgagacttcaggccaaaaatcttgtattcagtctgattcacattcttctttaaatttgaatcaaaattgtttgggaactgaacagacttaataaatccgtaaaattcacgacgttcaggaagactaagcgtgtgactagcaggcggtttcctccaatttccattgtggtctttaaataaccacaactcatgatgtattttaaggtcctccaaatccaatcttgctttgtctgtatccttagacttgccctcaatacttaaaagagttccaagtacattgtcgcacatatttttcttgatatccattacatcgagattatgtctgagacacaggttcttccaatactctagttcaaaaaatatactcttctttgaccaatttaactcaactatagaatatttacgtttgactccaccaaatttcttgtgttttccagtcaaacgatattgtatctggtccacctgagctaaaacattgtcccccaacaattctagaggcagtggtcttttctatatttttctattgtattttttacttctctgccttggatcgtccatttcaagaaatcgtttgtgtccaacataaccaatcttgctacgcaaaccaatggaaggggtgagttcgttacaggtggggcacgccttgtaccctttggtgctccaaccagacgccttgtaccctttggtgctccaaccagacatcattgcatacgccggaaagtcattaatggttcacaaaatagcagcacgcattgtagacatagtcctattgtaagcatctcgaccttgggcaccggactcccacaactctttcaattcatcaatcaatggtctcatgaaaatatccataacttttccaggggcagtgtgcactgaaatcaacagagacaacatcaatgactcagctttcatggacttcaaagggggtaagttatacgggactaagataacaggccacctactgtaagagttacccatgttaccatatggattgaacccgtcaatcgccaaacccaacctcacattttttggtacaagttcaaaggatggatggcgtttgtaaattgcttccactattctgcatctgcagggtgcctaagcatgccatcctctttgggtcttttaaagtagtgtcatcacatgtcctcagtcgagtgttttgcactatataacctctctagtcttggaattaaggaaaagtactgcaaaacttttcaagcaacttttttttctgtctccctttttccaacgactctcgccacaaataggacaaaaatattttttctcattctctttccaaaacaagacacagtgatactttcatacatcaaaggattcataacctaaactaaggttacgcaacttcatcttcgactcgtaatgggacttgggtaattttgtaccctccaaaaataactcattcaatatggagagtaacatatcaaaagaatggttactccacttattgtgaactttacaatgcattagcttcaccaaagctgagcaccgattttttgcaacccaagtacaattcagttttcatatccatgaaaaaatcgtcgtacttaccaccaccattcagagggggctcgcggaaggaagtagtggtagaacttgtatcatcaaaactaggttcttcttttaaaatatcagacattacatccgccatttcttcttcatcgttgaacatttttagatacgatgaatattaaattattaatatttattattgaaaaatttatatataaatattgaaaaattatttactcatgtatgtgtagttgtacaaagaactaagatcacttagccatgaataaaatagtcagcaacatattaaagtttgggaatctttaatcaatggttgctagtacggttcactgatgctcgttcttcggtgtaagtaatctaggttcagattatggatgtagtatgacatcaaagtgaaggtattgtatataatagagattatatatgacaaggaaagatatgaatgaagttgtctttatctaacatgacatttactataaagacctaattcatatcataacgataatcaatggtagattggcctaaatcttgagtaatcatgagctcctattcatgttattagtttctttaatacactcgttaaagtttatcagagaagatgattcttacaaatttgttttgggaaactaataatgtggatggttggggacatgatctacaattatagaatttcgactttcttgacggatcgaaagctggttccctttatgtgttaattctagaactcgaaagttgtgcacaaatttagatgggatcgaaattatacttacactagtgaatttatggtactaaaggataaataactaattagaagggtaaaacagtaatttaatcaaaactaattacgaatcaacacatggagggctaatcattggaattgattatatcaatggacattacagtaaaattcagtaaacataattctataattattaagagttcaattctatatttttagtggagtaatcatggaattaataaacaaagattatttggttgagactcaataaataatctagtttattagagcttagaattataggtacatggtcctcgaattgccaccttaaaatactgtcaagggaagtgataaagagcattataatgtcgttggagaaaaatgtattttgaattgttaaaataataattaattaaataggaaaaagataaaaattattaagacaatatttattgagacaaaagttgtcatgacaaaagacaccgtccttatcttaaataagacatagtagggtgcatacccctattgcagggttccctatggttttatattttcgggttaattaattcattaattcaattaaataaatatttgaatttgaaaagttattatagatatttcaaagttgttgagatattctctcaagtagttgagagattctctaataaatatcaatacttgaattcagttatagatagtaatttattcaaataattaaatataatttaattaataaggttttaactactataaatagaagcctgatttgagaaatcagtaacacacttatgttatccgaaattttattcacctaacgtggcatgtcaacgtaagccaatatagagtacatgtggagtacaaccttgccaatagcaagacaaggtctccatacaaggtctggcaaaatcatcaagaagcaagcaaaaggagcgaagcgagccatcaaggaattgtaccaacatgtttagacggccaagggaagcatataggctggccagggtgagcttgtatggttggacaagatctaggcacaagttggccgaccaaaaggtcactttcagacaaagggagctttcgttcaaccaagggtacctaacctctacaaggaaaaggtgtacaaagttggcctctacttgccaaaggctagcgtacacatctaaaagttgacctcctcttggtaaagctgacaaaaatatgacctgcaagatcctggcaggcacatgacctgccaagtcctagtaggagcatggccggccatacctcaacatgcagaccttgcatggttggccaaaccttatcctgcaagtgtatggctgaccagcttctccctggcaagacaataatgcacaaccttgttcaatggacagcaagccaggctgggagttaagccttgacagcccagcccattaagaggctacaaaaatatcttcttttcttttaagggaaggggaaatttggtcatttgtatttattaatttaatatgtacatgtctatgatttatttgctaagtagggtttatactctcatatataaagggtcttaactcaacgctagaaaccttagtcactctaagtctacatgaagcctctaagtctgaaaccctagtctctctctctatctctcttatacacgcacaagtggctctctcttcctctttctcacacgcctccaaggcttcatctctctttcattaaagatctgcctactgattcatacattgtaatttgaagagaactatatcagatctcacctatagtgatttgaatagtattatctctcggtatcaatacaactaaaaagggagtaggtcattacccgctaacaaagggggccaaacttctataaaaatccttgtgttcttttactttatagttctaattgtgtaacatgtggcaagcatcaatattaatatgactccgctatcggttggccactttttgaggttaatagtttggtgcttccattgagagcgagcggatatcatatttgatcaaatgccatggttaacacaaggagaaccccagttgcaccatctgcatcattgggtcttcttcaagatcctctaactacagatcctaatatccatgttccagctacgactggaactcccatgaacactacaaatgtggtcaatcctgccatctcagcaggcaccacgaatttggccactaccgctggccaggatgacacaaacatcctggtagatctgaacaatcggcccctgcctccaaaggaggaccctctacaggcccctcctactgaaggaaggacccttgaggaacagccccatggaaccagatctcgtccctgatactatgtaggagagataggaccaagaattggtgagcctactactggcaaggcccatgtggacgggagaagatctcgagttagccagactatgagaggctgtttgtcaggtcagccttactgaagaaccacacgctactaattgcgatgcatttgctgagtaaagacaaattattgagatggatggatgaccaagagtacatccttcaatctcaccaggcagagctggatcgctacaaaagagaggccgacgacttaataaggcggttcaatcagagaaccaatggaagaggccaggactcattagagatccactctataagcaagctaaccaacctggttcttgaggaacaaggacagaatttcccttacctgaaggaagacaggccttcccacgaaggtctaatggcgagaatagccagatccctgcaaccagtgacatgtggggcaagtcagggatctcaggctcaataatagcccccatctacaaaccttgggccggccagccacctgcaggagtgcctctggccggctaggggagtacactcccccccaaggggagcgagccactcaaagg

SEQ ID NO: 28244 - DNA, 1551 bp, Cannabis sativa
catgttcttatatatggctcaattctttaccatttattctatgtgggacaatatccacaatagtcatgataactatctgtggtcgcgaccacaactttgtacgcgacatgggcaactttgtcttttttcaattttaggttgaaaaactctattttaatgaaaggccgggggtcacaaattttagtggagttaggatggaaccctaaaaatataagaaggttcttggagcgagcgtgggcgatccgtgacaatcctccatctagttttcttctctcctatttcctatatttttatttgtgtctagtttaaaaaaataaaaagcaaacactaaaatctaacaaataataattaaaaaaacattacaataatatacacaatcacatcatattaagaaacactataaaaaaacataagaaaaaaagactaaaataaaagacttttttaaatggagtttgaataattcttccacgaaaatttgaattggaaacttcatctacatatgagtgtaggtagatttttttagcgggtcttttacggtttggctgctttctacttttttttttttttttgatcttaactttcttcacactcaccggccggcaataagatattctcttcattatagtcaatttcattgaactcaggagaccactttgagtttgcactttgcaccattgaaaaaatttaaaaaaagaacaaaataagatattataaaaaagaaatagtagatgaagattaaaataaaatgctaattatatatatagccaatctaaaattttatattaattaacaaaatattaaaatataaaaagaataattacataaagtttgtaaaaattttcacttttacgtttaatttttttttttatatttttatggtatttgtaaaaacataagaatataatataaaagtaacaagaaaataacatcaaatgataacaaaataacatcaaatatatataacaaaaaatcaacaacaaaatatcaagagtacaacataaaaatatatcaaaaaatcatattttatgtaaataaaatttaaaaaatcataaaaatattaaaaatttcgtacaaaccgtattttttgtaattttatccatatttttgtgttttttttttaaaaaaattatccccaatagaaaacatatgatctgatatgatatgatcatatagtttaaaaacatatgatatgatcatattaattaaaatttatttatttctttaaaagtttgaaattgaaaagaataacagagaagagctctaattacttgtcccatcagaactgcaactgtagtacaatgaattctgaaaagagatctcctacccctagcgtataattgccctatatatatagagactatagtgaataaaagtgaagaaatgagaaaaagattttatttacaaaaatttacaaaattcattctatctttcattattgatctctttgggcccgtttggtacgcaggattggactggactggacaagattggattatgctgaaagtaatcctgtgtttggtttaagagtggattggactattttatttattt

SEQ ID NO: 28245 - DNA, 2191 bp, Cannabis sativa
aaactaattgtttggctagaaactctagctattttagctaatccatctacaaaagagtttagacaacgcttaataaagaaaaaattatgttggaaattagctcactaaactagtcactagcagaatgctacagcatcagttcaacacctatgtatgtttttctaaagttgataatcaattacgttagttgattgttttatttaactgtctaaaactgtcaatacatataaatagacttaacaaccatctctcaagacaacttcatcacttagaagatttctctgtattgtctagaactctttctctttctttctctctcaaattgtatttttgctctggaggattaaggtatggagaagggttgtaaaagttttctagcgttttttatccagactactcagtgtgagattttttgtaattagtgttgtacaccaataatgagggtaattgagtttaaaactcttgctataatgtgatgaatatcaataaagattcaatctttttgttgccattgattttgagataagctcccctgttttattcattttggtttaaatttttaattctggttgaatgtgtgaacttgtgattcttataagttgttatgaatcataaaatctagattaatgtgaatctaattcacatcaaaatggtatcggagcatgggttatagtttaaggcttcaagatccgcattcaaagtctttaagaaccatattcaaactttcaagatgaatcagattcaacttccaagaagcaaatctgtaatggctactattagatttgaggtggactaattcaatggctcgaacgactttagcttgtcgagaataaagatgaagattttctggtgcattcagggatctcagaggcattagatgatgaagctatgaatctcatagaggacaataagaagaaaactgagatcaaggcaaaggcacatagtaccattcttctaagtcttggtgatgaagtgttgagagaggtttctaatgttgaaaaggcacttgatctgtgaaacaggttgtcattaatctacatgaagatgtctttagcaaacaagttgtacctcaagaaaaggctatacaaaccttggatggtgaaactagagaattcaaaaaatatcttgatgagtttaacaaaatcatccttgatctcaataatcttggggtcaatattgaggatgaagaccaagcaatcatattgctcatctctttgccaaagacgtatgagcattttgtggacacaattctatatggcaaagatactctcaccgtgacagaagtgaatgcaactctcaactccaaagatattcaaaagaaaggtgatgaaagaggtgagagcaatggaagaaggattggtgattgtcaaagaaagtaccccaagaaatgagacaaaggaaattaaaattcaaatgggtataaagggaatcaagctaagccaaacaccatgaactctactaggggttcaaattccaaaggaaactcagggaaacagtgctattgctgcaagaaagaagggcacttcaaagaggaatgtttggcatttaaagctaagctgagaagaggcaacaatcaagggaagaacatgaaccaaggtgaggttgatgttgcagatggttatgaatctgtaagagtacttattgcatccaatttagactcgggtggagaatagattatggaatcaaggtgctcattttatatgacactaaataagaatttgttaagttctcttacaaaagaacacagtgctgtcttaatagggaacaacaaagcctgcaacatcaaagggattggtactgtcaggattaaggctcatgatggacaaattagaatcctgcactaggtcagatttgtcccagaatttaaaagaaatttgttatccataggcatgtttgaaaaacttggatatagagtagatgtggatgatggtgtcatgataatcaaataagagttataggtcttgatgcaaggaaagttgagtaatggtttgtacttcttggatggagacacaatagatgaatctattgcaccagcttttaactcaatgagtgcaaatcaaacaagactgtggcacttaagacttggtcatgtaagccaaagagggcttgaagaacttaacaaacatgggctattcaaggataagttgaaagaaaagctagaattttgtgagggatgtgacttagggaaggc

SEQ ID NO: 28246 - DNA, 2156 bp, Cannabis sativa
ttcttaaaattttgtaggttatcttaaataactataacatacatgaatatgaaaaaaaactagactaaaaaatttttctggatgcggaaacaaatgaaatgtgcatcaatatatctctgttaaggggttacattgtagaatcatcctatattatatatgtgaatgtgaattcatcaggattcatgatatattatcatacatatacttaatttgctgttaattttttttttttttttaattttacacaatgtacttaaattcggtttacagtttttcatttttcttacagatttttttcctttgtattttatgaattatgtttttttttacaggttttaacttttttttttctttttcctaaaatactaacgtgaaaacaattttattctaaaataacaaaaaataaagaactctgtattgttgtttttcgtagcaataccattgtttcaatatataggcaaaaaaaaaaaaaaaacattccatatttttttgttttaagaaaagattaaaatcactaaaaatatataaatattatcatttttaaatatttataaaataattccttatttttttcatagtgggctgctgccttgttatatgggtatgtctagtccacatactaataaaatttgggccaatttagcgtaactcgttgaatatcaatgatttgttctcagtcacatattcgcatccatgtacattggtaacatgatgtcaccttacatcatagctcgcaatttgcagagtggtttggtacccaaacgggagaggtggcattagaccatgagaggctggaacagcaagatgcaatcgtgctagtttttattagaattaattccatattgttaatgtattaaagtaaattaccatatataaaatgaatcagttattttttgtattactaattagttttgagatgaatcaaaattacttgtaatctattatgaatttaaagtatcgtcagtctaaaaaaattatttgtgattaattgtgaacctaaaatagtgtccatctaaaaaaaactagtgctattagaaggagtagttttccacggtacttaataatatttgtacacgtaattatcacatgtgtcgtgatcaagtacaaggagaattaaatagcatcgatttataaataacatccaaatcaaattaaattaaataaaaagcatataggtatggttgataaacgatggtcgataatttcaaggcaacttagaaattgaaagagcttaaaaggcaacacgtccaaacttggaggggagtgtgctgtgtgtgaactgtgaagtagtgaacaatcagagagtgagtcatcaatcaatgaaagcctacttgtcgggtatgaggattgtaaatatattttgcttttgttttctcattaaaataatattattaatagtaaaaatagaatggcttattttggtacgtacgtacaatttaatattgagaatttgagaagtttcgtatattttaatataaattaaaaaatagtgtaaatgagatactagcaaattacatgatgagtaacattactgtgtggtttatatattgatttatgagtaatttgtaatataaatatttaaatttaatttttaattgaaaataaatacataaatttaattttatcggtaataatacttaagttatattttactgaaacttctatagtgacctgtctattaaatgttaagtaaattgtcacatagtaattcttaattggtccatgccattaaacttttttttttttaaaaaaatagtttaaatataccaagaattaaataacttgtgaataatgatatgacatttaattggcaagtacttacgcagttccaaaaatataatttatgtattattgccgctaaaagttaaatgtaaatatttatttacaactaagaattaaactttataccgcaatcactttatatttaaatatttatataccaactacactcaatttcatactaattacaatttacataatagactaaaaatttgtttaaacttacaaaagtacattaacaaagaaaaaatttatttacaaaaataaagtaaaaataataaatatttttttgattattttatagtttatttataattgtttattatagttattatgaaattatattttttttgatcattttttgttgttatatagtt

SEQ ID NO: 28247 - DNA, 3259 bp, Cannabis sativa
tttttttttttttattaattaatttttttttcctatcccaatctcaaaaatggagtgaatgagttgcttggaattggtccacaggtagggatagagattcatgtcagagaagacaaggccacaagtttgttgttttatggtctctaataagaaaatatgaaaattctatgaataatatgaaaatattaacaaacttgtggattgtctaatttttgcctccaattcaacacaaacctatagacatacatctctgatccacttgaagattgccccctatcttttggacattttaaccaaacaattaaatgatcttatgcttaaggacataaattattaaatgcttcattttctatctttctctcttatattatatagatatatatttctattgagaaatctatattatactatactacattgtctatgcaattataatggggtctaccgatgtttcgtttcgtattagggtttaatggctcggtttttgaaagcgacttttgaagctcggaaaataattttgaagttggttgaattttgtgcttgttttgaccttttattgtgttatctttactccctcacaataaaagtgaatagcaagcctatttcgatgagttttgaagttcgttaacagtaggaattaagtttttttgccttcaactgcaataacgaaacaacactacacgaaatgaagaaagtgaaagtatttgcaaaacaacttataaataacaatatatcgtagaaaatttataaataaaatcactaattcataaaaccctaattaagaaaaataacaccagaacaacaatacgaaaaaaaattcaacttaaagaaaaaaaattacaaatgaagatgcacttttttatatatatacatatacacaaaaaactttacttaaaaagaagaaacatatcacaaaattatgggtaaaatagaaaaatcaagattaacacaattaaaaactgaaaatcaacaagatgatatatgcatcaattattggggttgtgagaacttagaaaatatgaaaattataaaagaaaatgacaaaatgcacatagtaagaaaaatacaagattttgtataaattattgaactataagctgaattgggctaaggtggggttgtctgcaaatggggcccactaatgagcccaagagcacaaaaaatcattatttttaaaagtacacaattattttgtaataatttcaaaaataccacatattgttagaataaaagtcttaatatttttcaaggcccaaaaacacttcaaagccagtcctgcaaacggggacaaaattaagcctgaaagtaacagctcacacaataagtgatatttaatagatgacatttgtctaaatgagcaatggacaaagattttgctctataaatgtagaaggaaaatcaaagaaaacaaatgagacctagctaattaataatgaaaaatcaaaatagttaatagaatattaaggccactactatactactctactacctaatactaggatgtgttaaaatttttaccacccgaactatgatttatgtattattgtgcccctgaactttttagcctgtgaaaaacagtccatgaactatccagtgttgtatattggtccttttatcaagttttatcacacgtgacgaaaaaaaaaatgatgacatagttacttaccagttttcacatcagtgccatgtcaacgcaaagtgtgtaattaatttgattttttttttttcaatttagttttacataattcttaatcattaattgatttttagtttaattttttttaaatacctatttttttttttgatgttaagttatatatgtgacactaatgtgataattggttaaacaaccatgttatcattttgttggcctcgtgtaacaaaacttgacagaaggaccaatttacaattatgtgagtagtttagtaaccatttgtataacgagctgaaaagttcaagaagcacaataatgcatatgtcaatagttcaggggttaaaaatctaaagaaaataatcgggataagttaaaaactatttttttattacatattaattaaatacaactgtaaaataattttaattgataaatacctttttttataatcaaaatactaaatataacttcacataacttattaaaatttattaaaattagagttacctataaaattagttataaattaaagagtaataaaagaaaaataaatataaaaataacaaataaaagtgcttataatttcctaaaaataatactatatttgttataattgggccagctcaggacaggcccaacccaatccaaatttaagtaagcccaacccaaataataaagaaaaagaaaccctaaactcagtacgttgatataaaaggaaaaccctaactcaaatctctgattctcagtcgaacgaggagaagaagatttaggcctccacagcatcaaggctaaccctaaccaccaccagagcttctctctctctctctgccgccatggggttcgtatatgctttcccatttcttctatcctttgattatgctgtttttggttgtaaaaatcgttactttgtatctgtagctatctctttttttgagaattttattgtagatgttcattagatttcgatgtttatgttggtaagttttaaaaatcggtgctttttatctgatgaagtatgtactgttttgatgttatgtgattcatattgttcattgtgataaaccctaatttagtctggttctgctttaattgattacgaattgaatagttgaggagtgtttgctatcagattctgcttataatgtagttaattttttaggtttcattgtaataaaccatagtcttcaaaaattgagtatgttggggataatattgtgtgcttgattttctagatttcattgtgagctgataaaccctagtcttgttctgcaattgggtatgttaggagtctttttatttttgtactagttaataatgataattcctgtttgagtatggtgatgtgtttgattttcaaaatttcattgagatgaactctaatcttgttctgcaatttggtatgttaaggttttgtttttttagtaattgttaatgtgcggttggttttctagttttcaatgtgataaaccctaacccggaacatggaatctttgttgcagtaagacacgtggtaccgtagctgggcgcaagttgaagagccaccgtatcaagcaaaggtgggccgacaaatcttacaagaagtctcaccttggtaacgaatggaag

SEQ ID NO: 28248 - DNA, 2947 bp, Cannabis sativa
ggctgccattgccgctgccacagcagcttcatcttccacgagaaagaatgagcaagcagccaaaacagacacagccatggcgtctgcggccacgttagtagccgcacaatgtgctgaggctgctgagtctcttggagctgaccatgaacacctcgcttcggtggttagctctgctgttaatgtccgctcttttgatgatatcctaactctcacagctgcagcagccactggtacctgatttctttccctctccaagcattttgatataattgttttctctaatttagtgtagaatctatgaaaattttggtgttacaacttcaccaatgacactaaatattaacataagaactaactaatttgtaaaataattttgtattgcatacaaagaggtacaaaataaaaaaaaaatcacaaagattccatatggtttcggcattttacatcaattgttagagtttttttttaagattcaagccataaattgttggttttttttctttatttaatgtggtagctttacgtggtgcggcgacactgaaggcgagggccatgaaggaagtgtggaacattgcggcagtgataccagttgagaagggaatggcactcggtgtttgtggcaaagccagtacggatcaacttaatgccaacatcagtggagagatatgccctccagaaaatttgccacttgtttggaaccaagatcttctagctagggggactgagctactcaaacgaacaagaaaaggtaacataatgatttgtgtttgtaacctcttgtaacccattaaaaccacacaggaatgatatctctaatgcaaactggtctttatcacaggtgatcttcactggaaaatagtctctgtttacattcatcgatctgggcaagtaagtgagacattcatcatccattttggcttatctaatagttcataaaacacattgttctgtttgattaaacccctttttgtaggtgatgctgaaaatgaaaagcaagcacgtaggtgggacattcaccaagaagaaaaagagtaagtagttggcttggctgttattttttgaagcatctaaggttgaaacattttgtcatgacaccttattgccttgtaaatctttgtagatgttgtgctggaagtttgtaaggacatgccggcttggccaggacgacatttgttcgatggtgcggatcagcgtcgttactttggactgaaaacagaggcacgtgggcttgtggagttcgagtgcaagactcagagtgactatgaactctggactcaaggggtctccaagctgctttccattgttgccgagggaaagagtaatcgttgaacaaaatgtcctatttgcgttaaaacaacaaatatttgatcttctagatagcttttaagactaagagttagactagtttcatgttctaattgttgacttcgatcaattccattactgcctctgtgtaaataggatattaagacatcaaatggtcaatgatggagatattgcagggcctgccagagctatatacattatcgaaattagttgaaaaacgagtcagatttaaattgaagattaagcctagagtttagccaagtataaattgtattgttcgactgatcatttcaccagaatttctcaatttaaatataaggaatgtcatattcattttactatgaacctttgctcagactgatctcaaagtggttacattttcttagtttgcagaactatggtctaaaccctaggcaagtattgatccaaagaaacccaaaaataaagacattttcatcaagtgacagtgatctatagtagataatccgacaatagtttcaacacaattagatcttgtttctatgtacataccattaagatacaagtatatttgcttcaatataatagtctacatggaaaaaagaaacaatgtcgtgaagaattggtttataccaaagaaggggttacaaggaaaaaaaggagcaaaaggatttgtctgctcagctatcagctgctctgaaaatagtcaacagtgagaggaagaggttaataatatccaagtacaaggaaaccgcagcccaaatgtattcatcataagtatagcgtttaatcaagttgtctgtgtcgtatataatgtatccacagaatatgattgaagccaggcacccatatatcataactgagatcttgcccagcggaaagagaatctgttattagcaaaaaaatcctgtatttagaaacccatatgccataaatttgagcctaaacaagaaaatgagtttggaggcttaacatacctgaataaaagcaaacaccataagaaccatcatggctccaaacaaaaagggtccaaggaagttgaagtcatgacctctccttgcagcccaaaatgtgtagagtgtgagactaactactacaacagtggttagaattacagactccaaaattaccttgcctgtctcaaattgaaaataccataattcattgtgtcagatgattaaaactagaaaaataattgtgaaaagacaaattaaatttttttcaaaggattccttccattgtttgtgttttaaatcttatttctcatacttattaaacgcaaaataatgtgcattgatataagggacttgcatagacaactcttagctgatactctataatagttgttaaattatattacatgagacccaatatttagagggtgctaggcacactgccctttaatatttctccaaattaaattatatcctttacacatttcctttccccgtaatatctcattaaaaaagaaagacaataatgcatgatccataagaaggcgagtaatcaaattttggttatttgaacaagccgtaagatattccatttgagtaatgttatcagccatagccaacctagtcacgtttaacatcaaagggggatcttattcaagaaccaaggcactatcaaaacaacctaatga

SEQ ID NO: 28249 - DNA, 1651 bp, Cannabis sativa
tccctgtgggatcgacctcacctgtgtgagatttactacttggttgcgtatacttgcgtagcgtttataattttcagcaacaatggcctcctctgcctctattacctccattatagccagtatcgttattgcctcctgaataaccatgatgaccaccagagtagggagttttgtttgcataatttgcgtttggtgaggctgaagtgttgggttgcttgttgattcctgagatggcactcagcctctcgatcttactatcaaaactcaaaaggatatcctgcaaaataggccaagtaatggaggacctagcctcgatctggagaacaatagggaggtaatcgagatctaaaccagacaatacattagagataagtaaggattcgggatatgggtcacctgcaagggctaatacatctgcccactgcctcttttgtttgaggtaatcaaccatgctgagagatccttttcttgctgtttggatctttgttctgtattcatccatttttgccttagaatgagctccatatagggcttcaagagcttgccataatgctgctgaagagtcacaccccatgacttcggttgctatcccctctgtcatggacccatacagccaacccatgagcagttggtcatgaactatccactgctcaaattctgggttaacatcgagtccaaatcctggctgtccatctacaccagcaggagcaggaatgaactctgttggccgtggctttgttcctttgagatatccatcgagccgatgtcctctaacaatggcagtcatcattgttttccatagagagaagttattcctgtcaagcttgagtgcaaatggttgattaagtgtgcttccaaactgtggaacaaccacgctggatgttgtgttttcagagactgttgaagactggttggcaccattgctaccagctggagctgaacgattttggagtgtgcttggtgttgatctatcgccagtcgacatcttgccagggccggctctgataccaagtaagaaattatagacaaggggatttgattgaatattcagctcaatgagctcttgccttcattcattccttaaatagtatacaaagatgattctagaaatattacacctcaccaaacgtaataacagaaagagaatattcgtacaaaaggtaataacataaagatatgaaaaatcagaaattgatgattggaaaataatgagctgtctgatattgaattcaggactacaatgacagatggcagagtgatgtgtgaagcaggggctgatgcatattttcatttcttaacatcactctattagaataaacaactgagaaattctcattcactttctctttatctcttcatcttattctttttatctattttatattattctatattattttgtaacatacaaatattaattaggttattgacactacaaaaaatgttactttaatttagtcacaacaaaacttatgactaaaagtaaaaaagttttgaataatcataaattattattcctacgttgtgactaaaaagtccgtgattaaaagtagtagttataaaaatcacaattaatttgttgtgactaaatatatttttagtcacaatacttgttgtgactaaatgtatttttagtcacaatacttgttgt

SEQ ID NO: 28250 - DNA, 2167 bp, Cannabis sativa
  modified_base (30)..(32): a, c, t, g, unknown or other
tactccactcattgccaattggttttgagnnngaaccccatgattctcaacacatttgatggcgagattgattcttcgttggccgaacttcatcatttgaaggaattgtacctggtcgctgacatgaacattagtcatattccaatgtttattggctctttcaaagagcttacggatctttttatttgcgggaatcccatcactagaatcattcctccacagcttggaaatctcaccaaattggaaactctttttcttcaaagcacttctcaaatgattattgacaaccctggatggctctcccaacttacttctctaaaggatctcgacttaactaattgccaacttcttaaggtacctgatcatatttcatcatcatctctttcccattcaaactattccttcacttctcttcaagaaattgaaatccttgacggttttatacatcctgcaaccattaattgtttactaaattctagtgttaaactaaatagtttggaattatctaataacaaccttagaggaacattacatgatcttcttggaaatatatcaagttctaccaagaattccttagagactttgtacttgagttttaaccaacttggtggattgattcttgatgactttaaaaacacctttccatctttgactaatcttcgtcttgacaataatcagttggaaggtcattttcctaactgtttgaaaagatttcccaatcttaaaagtctagttataagtcataaccaattctttggattattacctgacctttcatcaatgccgaatttggaaagtttcgaagcatctaacaataagtttagtggtgtttcaagtgagagtattggaaagcttgattatttatatttgttaattgtctccataaattctctcactgggtatgtgtctcatgtaaatctacaatgcccgagcttaaagaacttagatttttcctttaactcagacatgtcattgaaattcgattccaaatattatatcccctcatttcaattggaaaccattagtttggcttcttgcaagttaggtactgaatttcctaattggctaaaaactcaaacaaatctccaaaaactagacatttctaattctggtatttatggtcctgttcctaaatggttcacaagtataactcccaacttgaactacttagacatgtctcataatcttcttaacaacaccttgtccaattttccactagcataccctagtatgtttgatgatgtaatagttgacttaagttccaatcaattccaaggttctgtcccaccttctcttctcgttcacgcaacatgcttgtatctctccaacaacaagttcaacagattcagttctttcctatgtgaagcaaaagagcgagtcaagtcaacacaattacttgacctctcaaataacaatttatttgagaacattcctcattgttgggataatttctcacaattatttgtacttaatttaggatacaataagttgttcggaaatatccccaactctattaatatgaaaagtttgaaaactttacaattgaggcacaacaacttctcaggaaattttcattcctccttgaaagattgcacttcacttctagttctagatttggagaacaatagtttggaaggtccaataccatcatggattggagaaaaactaagcaacttggtttttcttagttcgaagtcaaataaatttgattgaattataccattgagtctttgtcaacttactcaaatagaaatattagatttatcttctaatgatttgtcaagagccattccttcttgcattaaaaattttacttcaatgattcgaggtaaataattcaaggaagaccatttcgtcagatgtgagattttctaatggtccaatactagacctgagcagatgtagtcattgcagttacagtgagtatacattttcttatgagaattatgcatccatcatatggaaaggggtacaatacgagtatgggaagattttgggattactaagagttattgacctatcatgtaacaaattgaatggagagattcctgtggaagtgactcatctctctttgttgggtgctttaaatctatcaaggaataatttgtctggaaaaattccgatacagagtgggaaactgacgaacctacaagtgcttgatttttcc

SEQ ID NO: 28251 - DNA, 3050 bp, Cannabis sativa
  modified_base (176)..(184): a, c, t, g, unknown or other
  modified_base (1529)..(1540): a, c, t, g, unknown or other
gatgtatgtacatgttcgggccaccttagaccaagcgggttggggtctaccagtgatgatttttttttgtaactctgttttgccgcttaggtcggctattggaaacaaatttgtaatatttcgtaaattgtttttgggatcccgagacatataacttttgtttgtttgtaaagttnnnnnnnnnacaagtttattttcattccatttgcatttgaagctttaatttcccgtgctttattgtttagtaatcctgtttaggggattagggtttcttaattattttgggtagcatgcctaatagtgagggtgttacaggttcggccacctagagagaaggagaatctttttcaagagctgaattctagtgagagaaagtaaaagtgaaaaaagggtttccctttaactcacttatgtgcatgttggcccccttttttctcacttactttaccaactcatcataaaggcacataaaggagttatttctctattgcaataagatcaaacaatcaagaaaaagtgcttcaacacacaccactttttatttagcaaaagtaactacagtcccgataacatcaatcttgctggtaaagtccatatccatatagacgttcgcataaggatttgggaggcaaatgttatcccaatttttgtcctcgtgatgtggcatacttatgtggaaagttattgtgccatgtggaaatacaactcattaaaaggaagttcaagtgagcattcgagccaacgaagaccctaacacttaaacggggatcaaatgatagtccagctcattctcaagagttggccaaccacccctggccgatcctatggctggctacgctaggaaatggcatcatggccagccagcctggccagcacaaggccatggtcagccaaggaatacactataggtcccacaagactctcctactcgtgcacaataagaatgggctacgagttgggccccaaaagcccaacagataggctgagacgtatctagaatctaagggaatttttggtcttttgtaaatctctagctaactatcctattttcaagggatttgaattgtaaacctagggtttaggcctcctatatgaaggccttaacctctagcaaaaaacctaagttgcctaagcgtcctctaagctagaaatatcatattctctaagtgtccgactctctctctctctcttcctcactctcccacatgcccaagcctaggttttacagcacactaggctatccaacacttgagtcctgccaaatacagattcatacattgtaatcctaaagggcactatagtagaacccacctatagcaatctggatagtgattacctcggtataataaccgtaaaaggggagaaggtcattacccactatcacaagggggtcgaacctctataacgaatcctgttgtctattgtttcatatttttatttgtgcacacacgtggaaagcattagatctgtgagaccttgctatcggttgatcactttttacggtcaataatttctttcgagcttggctnnnnnnnnnnnnatgattgagatctcatttcagtaattatattagtttactgaaatatcatttgtaggtatctaagtgtttttttttttttgataaatcagcgatttgtattgctcaaaatatatttacaaactaatagcacccatacaagggtttaacaatctatacaatttctataattcttttctcacatcattccaacactttataaatcaactataaagcataaaaccaatctctatctatactttatattttctttggaatcaccatactaattcgagttcttaagcttcccttaatgtcttcaaccatttgacatttattcaccttgtttccattccaaatgattccatttctagcttgccaaacatggtaaactactactgcaatggcagcagacagcaccattcttttaaagttcgaaatccttgccctgccaatccactgaactagcttagggatgaacctggttcgagccttccagtcaagccattgcttgatttcatccaagcagtaacaggataaatcacattcaaaaaataagtgctgctcattttccaaattagaaacacataagctgcagtggtcatttgataagatgccataccttttcaacctctctttggttttcagtcgagtaagcattgctaaccaaagaatcacactaggttttggtgtgttcatccttgcccaaacctcattgcaccattttactcttggctgtggagtagtaaacagactatatccaaatgctattgtatatcttctttgctgaaatgagtcacaatcaatcaagttggtaagttggttcttgatggttacaagcttcttccaataccaactcgcatggatagaagcattgtaatcccaccaattttgatctttgatgtagacactatgaacccatctaagccaaagattctcttggtagctcgagatagcccacacatacttactcatggctgccttgttccattcttccaactttttttatgcccaatcctccttcagtttttggttggcatattttgtcccaagctacagctcctgcaccatgaaacatagcttgccctttccaaaggaaagctctacaaatagattcgattgccttcagaactttctttggcaaaatcactatttgactccaataggcttgaatggctataagaactgagttgatcaatgtgattcggcctgcaaaggagacgttcctagaactccagctcctgattctagccgtcattttctctgccagaatttcacattccttccctgatatcctctttacacaaatggaaatacccaaataagtaaaaggaagattctgcctcatatatcttgacagttgcaatatcttgtttacacttcattgatccatgttactgcaagaaattgcagttttacttggattaggatgaaggcctgatgtgatagagaaaaacttcaaagcctgtaacatatacaacacacttttaagatcaccatggcaaaatagaagaacatcatccgcaaaggccag

SEQ ID NO: 28252 - DNA, 3722 bp, Cannabis sativa
  modified_base (953)..(985): a, c, t, g, unknown or other
  modified_base (2225)..(2229): a, c, t, g, unknown or other
actaatctccaaaatacaatttttttaaaattatcaataggaaaatattattatgtaaatttatatgtatttatataaatataatattctataaccaaaatccaagttaagaggaggataattacatgagaagggtaatttcgtccatgtgaatatgtgttgtcctataagtttagggtgcattcccttcatttttttttatatttaagtagttgtgatattgatacatttttcttatataatgatttatattgttttttaaaaaattctacattaagaaattctaaatgatttctaatatataagttttgaaaaatttctgtgcattaaattattttaaaatttttaaatattacaagttatcttaaataaatattatatttattgttatataaaaaaattaagattaaaattatctaaacgttaaaaacacgttaaaatacaaaaaggtatatcggtttatttacttttagtaatactatattgtataatatttttgtacggggtaatgtattaagtttttacgattgttttatggttatattttagttgtttcactgttgttttaattgttctgttttgctgttttacgattgttttataaaaaaaaatagtatttttattaaaaaaaaattgtgtgacagaaaatttgtaaatttttacctaaaatctagtatattttgtaaaaacccctaatattattgttgtagaaaaagaaaagtagggtccaatacaaatttccaaaatgttccaatccaaccatccaattgtcttttaattaagctgtgaatcttacaatacaaaagtatgaaaaattagaacatggtggtgggggtgctcttgtgggggaccaatctgtcttttcctttgatttgattactttttgtttttctaatttctaacaatatcctttggcacatattataatggtattttattattattattattannnnnnnnnnnnnnnnnnnnnnnnnnnnnnnnnttattattattattattgtatgtattgggagacataattaataataatcatatattttatatttggtaatggaattccacttaggactcatgaaatatttaatatgaagtttgctaagccttacatccttaaatgtttatataattcactttctgaaccaaccactcctaacaaataaagttgtaaactttgtcaacctccacatgcaaaaaagtgttcatttttacttgtttaatgaaaataataataataataataaaattgggagtttcatagtttcttgaatcttaaaatcatcatcttcaaattaggtttgccaaatgtgttttgtctaatgcttaaggaaaaagtaattgaaattgtggtatattttttgcacaaaaaaaaaattaattttattgcatcacttattaatattatgataatgacagattttgatgaaaagttaaaattttaattattattttttgcaagaaaatatttttattttttaaatatataatttttcattaattttattatttagaataataaaataaataaatgtaaaatatttttaatttaattttatagctaaatataataatcagataattaaaaatagcatgaatgtacttagaaagtcaaagagtaatgattttttttttttaaaatattgcatcatatacctaccttaaaaaaaaaaatgcatcataataattgtggccacaatatttactgtgttaaatttacattagtttttaatatactatttattaatagcaatttttttttttactaaatgagccatattcacttttacatcacttatcacttatttcatttatatctatgtaggagatgttcttaaacaataatcacaagtaataataaacactttaatatataaaacattgtaatatataaacgctttaataaaaaaaaaattacaagtaataataaataagaaacttgttactacttgttgaagttgttaaataatcaaagactttatgatatacatgtatatataacaattatttatcaaactaatctcaacaattcttgacattattgtgattttgtgtttgttgggtatttattaaatatttatttattttctagttaacttttctcttgactcttttaattggtttggtaaaatcaaagctaggagttgagaataaggacaatctttggtcttttattgctacctaacaagggccagcagcatagttgttataataataataataataannnnnataataataataataatatgatttagacaaatattctttttttaatgttattaatttataataacattttcataatctttttttgaaaggttttagagttgttgtaaaaaattaaaaaaaaaaatccaaattgaatttagtaccaaataaagtgagagacaaaaatgtcaatttactttgaatatgataatacatagacacatgacaatcactcactattattatatgtgtatacagtaatagcatgtataaatatacattatttatttcttcttcttgttctataaataatgtacaacatctttaattggaagagattcaaacaaattggcttagttagttttgattttttttttttcatcaaaaaataatctttctattaatcaaactaaccatttacaatccaatagacaagaaaccccactaaacttacttacatttcttttctatttttttataatcaatttgtcataataacttattctcttgaacaaaattcaatctaattttgagattctttttaaggatttttacaatatatgctaaaatttttaactttttgacttttttactatagaaaagaattttttttaagaataatgtgtaagttttatactgttaagttttcattattatttcacggttgtttttttaattgttttactgttatgttttgttattttacagttattttataaaaaaaaataatatttttataagaaatttcgcgtgtcagtaaaattgtaaccttttaccgaaaattcagtattttttttttaaaaaaaaaaccctttctttttaataactctatctatacaaattggagctatatacttttttctcagatatacacaagttctgatttaaaaacatcaaccaaaagagcttggccaaagataatttggaagccatttcaaaagaggtagttttgaaatgtttgttagtgtgttttcattttctcttacagctttgtatgaaagtaacaagagagaaagaacaagacacaatatatatagccctacaatatttggcaactaataatattttggtgttgtttcaaaaaataatattttggtgttaatatatactaaggtggaaaatatagcccacaccacttgtatattgcattcattttcaaaaaaacaaaaaaagaattatctcaaataaataaataaacaataaaagacatttattttataatatagtatatacttgcttgatgtctttaggcttctcctttagaaactccttcatgcaaagatggattgggccatcccaaagcccaagactaagatgggttcggtctgtgcctacggcccaactaccccagatgtcccaacatttcttttctctttcaaacatatacatttttgtagtaattttttgaatatagcatttgttttaaataaggtcaaataattttgtgattatttcataaatataaaaaaattactatgttttataatttatggatctgcttttttttttttttt

SEQ ID NO: 28253 - DNA, 2526 bp, Cannabis sativa
  modified_base (2261)..(2269): a, c, t, g, unknown or other
agagttttgtatagaatgagtttaatcaagtctttttggtgttgttatactgtataaaagttgattgttagagtatattaagctgaagttgattcatcaagagagagagagtagggttcatattgattgagttgagcaaccgagtcaatttgttcatcttgtgcaataaaaattttacttaccaaaataaaaataaataaataaaaaacacatatgactaactatttaaatcttatttttcacaacacaatattattttaaatttttttcttaaaactggatatctactaataagtacaataatatataacgtcgtctaaaatattggacagcttgaattattgcacaatgtctcataatttgtaaggcacaatttactttatttatatatatatatataaataaaaactctaaaattagaataaaaaaataataaatgatagagcttttgtgtgatcccaaatcatgtgtatttttaaagaacacttctattcaaaaaaaaaaaaaaagttcatttaggtttcctagtttaatttttttttatgctttttatttattttatatttttttcttcccatttttcatttttttttgcccaaagtcctgaaagaacttagccggccctatatataatggatgaagattattatataaaaaagggaatataacaatatcaatagtgcaaattgcttggtctagtggtatgtaatgttaggcttttttaaatttgattgcaaccatcaagaataaaaaatgaattgtaatttgtcccactataaatttcaaggaactttccctcatatatttatgtacatattccatagacaaaatattagtcaataatgcaattactcaataagggcaaacattgtggcggttggtactctatacatatagtcacctatagtttttaccctctagtggggtcctatagcctctattattgattttaaattgaccaaagaaaaaacgagagatattaagtggtgtctatagcttcttcttcatctcatcatccacaaaatttccaagaaaaatctcacaagaccaccaagttctaaaggtaagtatatatatagtcaatatttactataaatttggtatgaaaatttatgtagttttgctcattattaattctattgaattgaaagttttgtagtgaattatgattctatcaatatcaatatgacaccaaatattaaatacgacgttttcataagctttagaggtgaggacactcgcaacaatttcactagccatctcgaaaaagcattgtctgataaaagtttacaagtttacatagataagaggctcgagagaggtgaagagatttcttcagctcttttgaaagcaatagaggaatcaaagctttctattgttgttttctcaaagaattatgcatcttcgaggtggtgtttggatgaactcgttcatattttgaagtgtaaagaaagagatgggcaaattgttgtcccgatattttatcacgtcactccaagtgacgttagaaaacaagtagggagttttggggacgcatttcgtgaacttgaagaacgctttaagagaaatgtcaccgagcttagtggattgactcgagtgatgaagactgctttaacatcgataaaaggtaaaattatcttattattgatattagatgaatatgaattatttgcttaagaaaaataatgaacattacatactattttatttactagctagtttgaagatacttatattacattaaatttagaattgaagacatatatatctaataagtacatatatattgtttaattttttgaagggtacttcaacggtgcacatgaagaatgctttagatcaagtgagtctgataaattgactaagtggaggactgctttaacatctattgctgatctttccggctggccaacaccattaaggtaacttttattatttagtttattttacttattatgaagatctaaattataacaactcccccattcataagtaaaacatagcaaattaataaaattttcaaaaaaaataaaataaaataaatgaacaagaaaatactagaccttatcaagcatcctataacaaaataaagtcactaaaataaccttttaatgtaacaatgtaattaattataaatgattatttttatgttgtgactaaaaagttcgtgactatagacattagtcacaaaaattacaatttgatgtgattaaatgtgtttttagtgacatgactgaaagtaaattagtgacaacttgtannnnnnnnntatgttttagtcacaagtaactttaattgtgactaaaaaatcacatttatgcatattacaaaaaaattatattgtcactaaaaaattgtcactcaaaatagttattttttataataattgaacaatataataatattattcatttaaataagtaaaaaaatacaattaatgcaaatattttaattattatttataatataaacatataaaagcaagataaattacaatttaaaatgaatttggtacaccaaacaaat

SEQ ID NO: 28254 - DNA, 2285 bp, Cannabis sativa
  modified_base (1248)..(1258): a, c, t, g, unknown or other
aatagagtagctcatatttttatacataactcaatattttgggataagttgagaattacttttttttttattacacattaatcaaatataattataaaataattttaattgataagtactatttttgataatcaaagtatcaaatataatctcacatatcaaaattagagtatctaatgcacataacagggatatgcttataaaactgaatataaattaaaaactaataaaagaaaggtaaaaaaaataataataataataagacaagtgtattttcctctaatatttttataacaatgtaaaattgattggatgttaattgccaaaatttcaactgtaaagttaaataggttttcattccatatatttggacccaaattcgttttgtcttgttgatcgtgcatgtattccaaatttcacattttaagtttatttcttaaattttaacttgtcatcttcatagtttgcagctctgataagttggtaacaatttcttttctcttagttattcatcatgttcaaatgaaatccaagtttcaaatcttaattacatagcactgtggttatgttatatcaagaattaatatcatggttttcctgttaatggagtttcaaaactaattgacaatatataagttaaaacaactcataatgtttttctagcttgacataataatgtttctgagtttaattgttctgatcttatcattacaagtctttgctatggggctcttgttaagagaatatggtattattgcaaactaaatttagaaatatggtaacatataaaactgtgattatgacaacatattagagaaataccacatttataagcatgtagattaaatctattacttatcaacaactatagtatttataataaacatataacacaaaaacaacccttgtagacttgtagttactagataataaaaattagaaagaaagaaagaagaagaaaaaaaaccgaacctggagtatggtaaatattgtctttgtccatgaaatagttacaccttctctctaagtttgcgtttgaaaagaataaaaatacaagaataagaatagtaataaaattaaatgaaatatttaaaatgtatgaaaaaaattaataaaaaataattaatttttttcatcttgcattgataaatgaatatttaagagtcttttttttctattttaaaaatatcaaaccattgaatttttatctaataacgaataatgaaatcacaaatttgaatttctatnnnnnnnnnnnctacttaattaaaaaaaatataaaaaaaacatctctttttacactatatcaaaaatatgttcatacaaaaatatttagtttaaacttaactttttcttttcttatttttcttgctaaaaatttttttaaatttttttttttaccaatggaacaatctcagtccatatgatataaaagtaagagattttttttaattagatagaaaaatcaagcataaaaactcaaaattttctaattttacccattcatgaataattctcattaagagcgcacccatatatatatgaacacaataacaaccttgtagacttgtagctactaaataatagaaattagaaagaaagaagaaaaaaaaactgagcctgaagtatggtaaatattgtccatgaaatagttacaccttctctctaagcttgcgtttagttggttgaaaggaataaaaataaaagaattagaatagtaataaacttaaatgaaatatttagaatgtataaaaaaaattaataaaaataattaatttttttcatcttgcattgataaatgaatatttaagagtctttttttctattttaatataaaatagtcattccatcaaaatattaaaataaaaatgatatttcaatactttaaaatataactgaataaaaaaatagaatataaatgtattcttttccactctattttattatttccaactaaaaacaacttaagtgttgaactctctaaagtagcgtttggttggaattaatgaaatgaaatagaaagaaaataattttcattttatttctttgtttggttacaatttaaaatgttgaaatatcattctattataatgaatttttcatcattttgatggaatgactatttcattttgaaatagaaagaatgattatttcaatgctaaatgagaaaaaatttaataatttttttatcaatttttttatgcttttaattaattttgattctattccatattagaatattttatatatggaaattattttctaattaaggaaatgattttcta

SEQ ID NO: 28255 - DNA, 2615 bp, Cannabis sativa
ctttaattattttaatattcaaattcttatagtttttttcttctttcaaatatttaaaatatattttatttatatgtaatttttaaaataataaaaaaagaaaaaaagtataaatataaaaaattaaaaacaaccatagttgaagtgagatatttaatggcaaaaatttttcattactccaagagattcgatgaacgaaggctcaaagctgaataaagcaaacaagggtgttgcagacactagcgcctgcagacccgatcgtacacccgggcgtgtagagccctacggacacttgagcatgctaacccctatgggtgcccaacccaactcatatccaaaccatcaatacgttgcttacaaaggtaccaaatattagattgttctctttgcgatcactttgtacacgaagcctttagagttcacgtataagtaattcttcacccgtctttcaaagaagttggaaagttatgtactcaagcttattcaaggaaatagacatcttcttagtcattatttttctccataaatttccaagtttacaaatctaaagcttgatcattttcctttgatttcatagttatactttaatttctcaatgtagctttgttgatgagttctccgtcaacaaatttatttattcatatatatattataataataatttttaataaaattgaaatgccttaatcaattttaaagtgtaaatataatactcattttgatatactttttatttattacttaattgatgttgtttctttttttcctcacaaatgtttacttttacacagggataggatttgtaacacactataccgatataactcaaaaataataaaaaaataaataaatttgagtgacacatttaacttccgtgttaaatttgggtcgacatgtttaacacgtttattaaacatgtcatttttaggtcaacacgcttaacttgaaaatgacattataacgtatataagtatttttatttttttatatcatgtaaaataaaataaaaatatattaaaaaatctcataaaaacacttttattctaattttcgtaataaaaaaaattatgaattttataagtaattttgtgtttatatccataattatgttaattatgttaacttcgtgtcatgtcataacatgtttaatcacgtgttaaatgtgtcaatctcatgtttgtgtcataacacggttattaaagtgttatcgtgtcgtgtcgtgtcgtatgacatgctaagaaatagtgtcgtgttcgtatttgtagtcttaacacaaataataattgtatcgtgtttatgttcaccataaacatatcgtgtcataaatgtgtcgatacgataatataaattgtcagccctacttttaaccccttcaaagatttatcaaattatttaatttagaataaatactatttttttttctctcaaattatgactctggtagaatttatctcttatttatttatactaaaaaaatcttctaaagtctatttagttacactgtttatttttctacatagcttgtggatgtagcatcaacgtgatgcggatatggaacaactccaaaatacaagtgttgacgcataaatttggtcaactctcgctcactagatagacaagaggagaaatatatttaagtaagcaaatagagagatacaaaaaatttatagcaattcattcctcgtgtcacgacagcaatagagctatgtctactttgagtttttatttctcacgagatttacaagaaaattggttaaggcaagaactcaaaatttttagagaaagaaagtagagatagatgctctagccttatggaaatttagaagaatgtgaaaaatgaactagaggagcttaccttttatagggaaggatgtctgattaaaatattaataaaataatacaaaaaatatattaaaaaatcactttgggctgatcttggccattaatgatgatacaacggtgaaaattaactcttgatgaaaatcgtcaatttttgaagtttgaatctcgtccgtcgaaccgttttcaggtaatctatggaaataattgcaactgtcttaggtacgaattttggacttgaaatcttcaaaattgtgatatgggtgtcatacatgacttgatagatcttcataatagcttctaaattcaagttgaatcacatcaatcaggtcaatattgagggagttattattgttttactgaaagttgtttagcacccagcgcccaggttgacatctaacgtgttgacatcctgacgtcaacctggacgctggataagtaaaaaaatgtcccatacttgtatttttttgatgcctaagtgatatgttaacatcacttagtcatattctttgttatggtgaagttgttcaccagttctcggagatgtagctttttggtgaaattgggtagactcaaaatttcctaatgttgccaatattccaccttgttgaaagggtgaaatatcaaagtatgaatttaatttgtcacaagtcgtagccctcgtttactacaagaaaatagtcggatggtcaagacgaaatcagattttgataagcaatacctagctcatcaggtcacacgtcaacctgggcgttggtgcttccccggtgacttcc

SEQ ID NO: 28256 - DNA, 1907 bp, Cannabis sativa
ctattttgtaggagccgtggcaagagtgacatgtagtccaaattactcatcatacgacaaagatgatgttccttcatccatgttgagttacgaaagtgacgtaaatggtttcttccttgtcaagttattagtttcacagctcaaaacagggttgaatgtcaaagaagattgcaaagtatttctcgagtattctccacttcagacctgtaatcttccaaccgatgttaacgatggaattactggtgcaaatctttctttcttcactgctttcaaggacaaggttttctacactttgggagcaggacctctcatctataccactacccctaaaactgacaatacacgtgatcaatattcagcacccactcctggatattaaaaataggcaaaagcactattcttttttcttttataatttccaattcttgctaatttttatttattacatatatatcaataaatttgatatatttcttgattcaccaaaagtaatttgttccttcttcatagttgaaaaggttgtgtgaaattgtttattgattcaaagttttaataaattggttctctcattataatattttttataatatatatgttgatgctcaaaattagttcaataataaatttataattacttcgaattctttacattaaaattgtttcaaaattctgttattgcacaatttctccttcattatttttcgttctgtcttcgtgtggtggtctaagattcgagtagattgtgctgttggagatacaattcggcagagttttgtgtgggctattatagtcatgaatctttcctctctttgaatattgtggtctctatttatagtcagcaattggtgtcgaacgatttttattctctcatcggattggtcctcgtgggtccgttctcctattcccccacacattttttttttctattctagctatcaagctccgtccttaaagctttttcgaacttagctcaactcttttgctttttccttcttcttaattaaaacaatgtgtttctactttctttgccattattctttattaattttcatgcttccaataggatgaaattacctttatacccaaagagtacttttatcccttacaattgcccataagttctacaatttctaagctcttgaccgttaagtctaagtttatatgttgtggaatcagttacctaacattattccatacatatcttttcaagctgcggacttctaatttaacaactattccttttcgatttagtattgcaatgactcagggatcataagttgtatgcgaagttcaaaaagtgtgaattctagttgtcagaggtatcttttctgggacatattgtcgggaaggatagaattatggttgatccaagcaagattgagtcagtgaaaaattggccgaggccaaaatctgtgacagaaaatcgaagttttctcagtttagtagggtattatcgacgtttcgttgagggtttctctaagatctctatgccactaaccgagttaactaagaaaaatcagcgattcgtgtggtcgaacaaatgtgaatcaaatttttcaggagttgaagcaacagttgataacagctccggtgttagctttgccatcagatcaagaaaaatttgttgtttactgtgatgcatccaaacagggtctgggatgtgttctgatgcaagctgacaaagttatagcttatgcctctcgtcagctaaaaggctatgaacagcgctacccaacacatgatttagagcttactgttgtggtttttgctcttaagatatggcgacactatctttatggtggaagatgcgagatttaaactgatcataacagtcttaagtacttttttacccagaaagatttaaacatgaggcagagaaggtggctggaactggttaaggattacga

SEQ ID NO: 28257 - DNA, 3306 bp, Cannabis sativa
ttatcagtatttataaaactctggcttatcttaaaaacaatttggttcctcatttttctcaatccctttctttgatgaacaggctgttgctgcaggaagcttagtaaacctggcaacaattttgtattttaattccattcgagtgagcccttttcctttcttgtttctttctatgatctcggtaagagtttcttgtatattaagtattttgtttctcaggttcctgctatgaccgcatatgccttttgtgcatttttcggcattcaagttctcattggcattataaaggtaaagaagctggatgagcgtgaaagattaataatgggaactgcttaattggtaagtgaatcttgtttcttacaattgctctaaagttcaaggttgcatacttcatagatcaacttatgatcttcttgcaatttcagctgttggttcatctcagtggctattcaacttagaggttaaaccattcaactgttgaataaattgggaaactgaaaccttctaattcaaaaatttgcccctgcccaaatttgagatgtggagatgtttggcaccaaacaaaagccttgtcatgggcaattgtttcaaagccacattcagtgtaaatttccacttggtattaggatagagtttaggttagccaatgccgttttgttctataactacaccaagtaacgtccgtttatttcaagatgcacctgaatttcaggcttattattgtcttatttgagcagcctttggccttgatgtagagctgtttttgtaactattctgtagtttggagtggtgatcagtgtagtcacgtggcttcccatcataatttacagagcaaggatctctgcaatatcgttgtataattctgtaaccaaaacacactactcaatttcaaataaggagaaaaaaataatgcaagtaaatataatatatccaagctagatactgatttttcattttttttttaaatatgattttactgctgcgactcatttgtcttccttagagggcatatttgtcgtatttttgtgtgaatggttacactaactttatgaacttgttgctctctaatctgataaagtggactgtatatttatatacacaatataacaaagttgcagaatatgggttcagttgacatgtgatgttactctgttttggttcacatcgttgtaaagctgagccactttttatcatatataacataatatttatatttgagacaccgagagagagagagagagagagaggcagctagcttagctaggtagatgtttttggccccaatttcattatattttgtagagagaagagataactgataacatgttgggattggtgaccacaccacgtcattggtaattatttattcatgcagatgtgctgttgtccttagtccttactttcttcagtgtgtgtgtgtgtgttcacttgtttcacaactcgacaccactgctgacaaataagtgttcaacatgtttcgtctcctttcacttcattggctttttgtcctcatcctatacaacacttcctttctctttttctaatattaaaatttacataacgggaagataccactctctctattcaaatggaaattggcattcagttaatatctttctaaaagtaacttatttattctctatctctatgttgattacagttttctcatttgacttggcattttcattcatcttcttagcaattgttgccttatattgacaattagataagtagtttgttaagagtattttaaaattcaagaaatatgatgtagtaactaatattatatatgagtttatgcgacaaaataattaataattacataaaaaaataatattttttaataattaatatttaaaatagaatatttttactaattgcacaatttaataattataaggaaatttacacaacacactctacatacatactttttttattgttattttgttttatatttttacagatttttttttaccttcttacaattttttttattacttacattttcacaaattctattttttattacatttgtttttttctttgaaaaaaatattactttcacgttggtttcgcacaacaatagtgtgaaaacaacattgttttgaagcaacagaaaaatgacggagatcttacaaaaatactcatttttggttatttttacattttcactgtcatattttctaaaaaatatctttactgtactaattttcaaaaataaaaaaacaacttaaaaacaactaagacaactaaaaaataattctaaaacaacttaacaaacaacatgaaaaaaaaaatataaaataataaaaagaaaaatacaaaaaaacaaaaaaaaataacaaaatattattaaattgtaatgtccaaataatatgtttttgaattatgaaattcttttttttttcttagttttaacaatttgatttatctttttgtactactacattatttttcatgaaatttattgttacaacttcatactttcaacttttttttctctctcaatatctactactgcacaatgtgtctaaaaaaacaaaaaaaattatcattgtatttttaaaaaaaatgtgttaagaaaataaactaaatacatgtatctaaaactacaaagcaacatacatacaacaaaaaaaaaattgtcaggaataaattaaaactatacaccataaaaaatacatatgaataaaaaaataactaaaaaataattgttcaacacaaaaatattctaaaaaactacttaaaaacaacataaaaataacaaaacaaatgtagatatatacataaaaaaaatggtatgaaataaactaaaactatacattatataaatgcacataaactaaacaacaactgtacaaaaggacacacaaaaataacagaaaaataactatagaacacccaaacaacaatctaaaaataactataaaacaactataaaataacaaaaggacagctataaattgacaataaaataacaagacatctaggggtgttcattggactacatccaatatttttaggcctattcagagccgatccatatattggatgttaaattttagggaaatttgcggcaaaagtccccaaaaaggtcactttgatgcagattagtccccaacatccaaaaatagcggcaatagtcctaaagatcacaatttttatttgtccgtttgtcctaattttaactgagccgtttacctttaaaaaaattaccacgtgtcgaaatattattggtccaaattattattttaattttaataaataaataaataaataatttatttttttttgtttttgttt

SEQ ID NO: 28258 - DNA, 1968 bp, Cannabis sativa
aaaaaaaaaaaaaaaacccacaactcaaaactttatttatttatatcatacaaaaagttaaattttcaaattttcgccataatttctacattatattgtctaatatataatagatttttcaaaataaataaataaataacttttgtaatagtgggagaaatttcagtatactgtgccacgtgaggagagcgagtgtacatcggaaagggaaaataatttcatacaacagccttatctacaaccaaagccaaccgctgagaacaagaaaacgcattaaccttaaactatttcttatactcatcagtatcagtcacatctaatttttatggccacgactgattgattaaaactacctatagaacaaactgtgaaactaaaagagtcactcaacaaatgcgtcatcatattcataatcaagctgactgaaccagagaaatttctccaggtttttggcttctatctcaacaacttcctgcttgtacagttctctgttacattttgaactcaagtgtcagtgagttttgttacaaaactaacttcttatttgctaatactatgcttgtagatggtattaagctaacatcaatgacaaccatattctgtaatcttagtcttggttctggcttcgacaagcttaacgaataccatctaagccggagaatcttcaaaaggcaagtgggttggggtttaatttgttgctttctttctttctttgtttttatttacttattttcaacacttatgattatttgtttttgtactagctaagctaggcaattagttaaactgggaatttttaatagggcttaattattgggtggtgagttgataatggggatatgtttcattattggtatctgtgaaccacagaatttgtttttggcacatatgaataaaggttgtgctataaagacaattccctaatgagaaatcaaattctgttttcacattgaaatccagtgcccaaagaaaacttctataaatagtctatttggaaaaaccactcactcactgtatcaagcaaatgatgccataaaatatattgacagagatttgcttcttcatttttaacatatattagcaaaatgaaattttgcagaatattaacagctggagatttcagtctaattttccatgcatgtgttgattgaattaaaatagattagtaaacacaatggaactcaaaccattgaataactagaatgaattaacataataggaaacactaatttttggtgaaggcaattagatgtttttccttgcttggggtggatcttggataatgaagacagagagagatttggacttaaggcattaattttgtacaataatttgtatcaaacatctttcaggacttatttggattcgaaaagttgttcatgctatgatactcaaaatcctctccataagacttgtaatagacaattgaaagcaaagcaacggaatcgttcttcccagtcttttgtcaacaataaggaagattattactccaaaaccattctagaagaggataaagaagaaaatatttctaaggcaaccttgatatggagggcaataaagttaccaatatactctgttgcattggttcctctcactgtgagtttttccacactagccttatgaattgagtagctgattgagtcaatttcatttgcttgattgtctttcagttgttcttttttttctttctttatttcaattttaattacattttttttttttttgaataactttaattacatataattaagtaatctgtaaacataaaaaaattcgtttattgccttgctataacatgctaacttttgaagaagatgacaggactatatttatactagagtttcaaactgagagctgtgacaattctggaactgaatttagtatatataactaactctagttatattaagaaaattattgggccaaacaagtcgatatcaaggagacgcctaactcaacaaaatcggc

SEQ ID NO: 28259 - DNA, 2282 bp, Cannabis sativa
  modified_base (1427)..(1430): a, c, t, g, unknown or other
  modified_base (1797)..(1797): a, c, t, g, unknown or other
  modified_base (2097)..(2099): a, c, t, g, unknown or other
atccacataattattaatatttataacaggtatgagttttttgttttgtttatatttttatgggccttttttatgccataattttgtaaataacttattaaatcctatattttatcttttttcgtcacatttgaaagttggaggaactctgccttttagagattttattttagttctgtaatttccaagactcgacagttcagcctcctacgccacaacctttgccttttgactcagcccaaacgacaaccagaagccttgaagatccgactcagcccccattaaatctagaagcctctctccagattcgttgaccattgtgaaggttccaggatatggattctaaccaagtgcaagttagtcgcatctcagttcaaaattcattttcaggctgtagcgacgactctagacgttcttctgctagattcgatcaacattgggggtgaagtgaaagagttagtggatttggtggctaggcaagcgaggagagcaaggtttgagctagccaatgacgacgaacgagtagcggacgaagtgttcgggataatttctcagttcgaaaaaggaattgaacctgattgagatcgattaagcttgtattggactattttgaaatcagaaactagtctaattataacaaggagattagattctcagaagaagaaattggatacgagtttcctgattgcaaagagagagagagagacgttacgtacttgagcggtttggttggattgctgagttactgcagaggagtaatttttgaagaattcaatcatcatcgtcatcatcgaaactccaacgcggaagaggatcaattagatacaacaatgaatttcgaggggccaagtttttttaaatccagatgactttctcgatgtccgatttcactagagctaatgtcagacttaatttggcaacaagcataattggcatgactaaatctatattttaaaattaatgattttcatagtgcatttgagtgtcaaagaatgtagggtcacacatgtcacataccgagtcaaacacgtaagaagttggatattgcttgtttggttcctatcacatacataatgtgattttagtcgtaaaagctgcagtagaaacctaagtgttttatttattttttaattattattatgtttttattgatagtttagttttagaataaattgtttctttttctgtttttttttgtgaaagtagatctctttctaaatggtttgatggtattttgtatttaattgatttgttcaaatatctcatcttcgactatctttaagatcgatttttgatttatttactttatttaattggttttatatgtgggtttttatgttagttgctttacaaaattagtgtttttgtctcaaatttttaactagttggtaaatataactgatttatttatattatatttgagttannnngtgttattatttgtgtttatttattttgttatagaactagttccttttcatatatatgccttaatattttttggaattgatctccacttttctttaaaaaaaaattataaccggttttataatgtattatgtgttatgaggtattttgttgtagaactagctttgtttttaatttgtgtttcagtatttttaggaacttatttcctctttgtttttaattataatcggtttgagttattgtgtgttacttattttgtattcattatgttatataaccgattctattttaattataactggttttagttatttcgtgttatttgtttttattcattataacactgttatagaaccagttctattttanttataactgatttgagttattttgtgttatttatttttattcattatattacagaactggttatatttcaattataatcaatttgagttattttgtattatttaattttattcattatgttatagaaccggttttatttttagttatatttgagatatctaattctggtgacttttctagtgacttttccgatgacagtgacttttccggcgacagtgactcaaatataatataaagaaactagttatatttactaacgttaaaaatttgagacaaaaaaactggttccgtaaaacaacnnngataaaaactcacacaaaaaatcagttaaataaaataactcaaacaaaaatattcattcaacatactccaacccaacaaaataattacatacataccatatgtaccctaaaaatactcattcattatgttatataactggttctattttagttataacctgtttgagttatttcgtgttattt

SEQ ID NO: 28260 - DNA, 3137 bp, Cannabis sativa
aaataacaggattgcaaatactaataccccccccccctcaagatggagcatatatgttgtaaatggacatcttggagatatgattagtaagaatgggagatgtaagaggcttggtgaatgcgtcggccagttgaagtgaacttggaattggaataagtctgatagcagaatttttgattttatcacgaataaaatgacagtccagttctatatgctttgttctttcgtggaaggtgggattgttggcaatatgaattgctgattgattgtcacaatatatgaaagcagggtgttgttgtggaatctgaaagtcttggagaaggtattggagccatgtgatttcacttgtagtagcaaccaaggccctatattcggcttctgcagaactcttcgaaatggtgggctgcttctttgtcttccaggatataagactgtctctgagaaaaatacagtatccagttgttgagcgtcgagtaacatggaaagaggcccaatccgagtcagagaatcctcttagagtaagtgttgaagtggaagagtaaaggagtccttgaccaggattgcctttgaggtatcttagtaaatggtggactgcttgaagatgtgttgttctcggggtggccataaactgactaaggttgttaactgcaaatgtaataccggacctggacagagtgagatagagtaatttgccaatgatctgtctaaatgtggaggggttgtccagggtctctccatgttcattgtctagtcgaagcttggggtccattggagttttacttggtttactgccaagaaagctcgtatcttcaaggagttgaagagtatactttctttgagagatgaaaagtccttcttttgcacgtgcaatttcgaagccgagaaagtatttaaggtcaccaagagttttgagttggaatttctggtgcagggaggcttgtaattggtgaagaaggggaagattagggccagtgatgatgatgtcgtcgacgtaaacaaggagagcaatgaaattgtcgttggagcctctagtgaataaagtgtagtcagcttgggattgcttgaagccttcttcgagtaaggcatcagacaactttttgtaccattggcaagaggattgtttgagtccgtagattgatttgtgaagcttgcaaaccagatttgtttctgcagtattagaagaatctagtgttagaccttttggaagagtcatgtagacctcttcattgaggtcaccatttaaaaaagcattgtcaacatctagttgcaagatatgccattgtttaatagtggaaatagcaagtaaaagtttaagggtgaccattttggccacaggggaaaaagtatcgaaaaaatctagcccttcttgttgcgtataaccttgtgcaacaagtcgagcttctttaagcctttctacaacacttcctccatcactattgaatttaattttatagacccatctacatcctattgctcttttgtttggaggtagtttaacaacactccatgacttgtttcgtatgagtgcatttagctcgtgttgcatggccctcagccattgttcaaattgtatggcttcttgatatgatcgaggctccctcatagcagaaactgcaaaaacaaaagctttgtaaggatcagataattgggaattaagataaaaatttagataaatagtaaggagtagaagattggtcttgaagaattgaataacactcaaaatttttaagataagaaggtggtttagtttgtctgctggattttctggtaggctgtaatgatggatctggagcaacagatgttgaagcagctgaaccagtaggctgaggtagggtatctgaaggagctgatgttgaagtatcagcaactgaatcatgttgcagagtgtcttgatcattgatttcaggttgtggaatgccttcattactgtggtcaggtgctgagatgtcttcgtgtacctcttgaggcaaagaagatctaatattgctatctgtggggtaatcacaggcaggaatgttgtgaaaattcgtatttgggggaactaattgagagaaaggatcaatattagatgaatcagtattaagtgtatgaaatggaaatatattttcatggaaaacaacattacgagatataaaaaaaattgattgttgttgatgtcatacaacttataccctttaactccttgtggatagcccatgaaaacacacgttctggctcgaggtgagaatttagacctgtgagcagatagagtagatgcaaaaacaagacaacctattgatctaagatggttatagtcaggtttttcttgaaaaagacattcataaggagatttgtttttaagtaagggagtgggaatcctgttaattaaaaaggcagcagtcgtgatacactcactccagaatttgatggggaatttagcttggaaatataaggcacgggccacattgagcagatgctgatgctttctttcagcaacaacattttgctctggtgtttccacacatgtgaactcgtgcatgatgccatgctttgcaaataaatctttgaaaacaagttctggtgcattgtcggatctgaatattttaaagatgcatctgagctgagtttgcacataagataaaaattgagggataacaatattagcatcagatttatgttgcatcaaataaacccaagtaaatcgagaatgatcatccacaagagtaaggaaatatctgtgattagtgtgtgatgttatgtgataaggtccccaaacatcacaatgtatgagatcaaaaacatgttcagttgatttattactatttccaaaagggagtttcctttgtttggcaatagggcaaatgtagcaaggtttatgtttatacaaaagagaggtattacaatgcaaagtatccttgagaagatctaaacatttttgagacaagtgtccaagccgagaatgccaagtttcagtagacacagaaagaacttgggaaggatctggtgcagtatcaaggatgtagagatctttgacattgctaccttttccaatcatcctctggttggcattgtcctgaatataaaaatcattagcagtgaatttaattgtaacagggagatttctagtcatgaaactagtagagataatattgtattta

SEQ ID NO: 28261 - DNA, 1199 bp, Cannabis sativa
cactgccctttgtgcctccagttcccacccttcaagttaactccctccgagtttagagtaatttctcgacgaaaggacgacgccgtaaaataattcccagctgctccttcaaccttgagccagggaccatacatcttcaccgccagtcctatagttggtgttactcaagccgtagggtataagcagtctctgctcgagtgagcgagatgaccacagttgaaacacaaatacgacaacttttcgtatttgtattgaacccaggaatccggggtagcatccgccttcagaaaaaaacccgctggaaatggatggctgatccaaacatcgatccagcacctgagaaaacctcgtctaaccacctcttccctgctctttccatccgtcttcaccaattgaccaacttttttttgctagaatggggatgttattatccgagagacacctcgtgggtaatccatggaaccccacccaaaaccgagctacttcgaactccgatgtacgcacctccccttccaatggaaacggcctcaggttgagtaagacgccgttaactaaccaagggcggcggttcatgactttagagcagtcctcctccgaatcaaagaaaaaacccaacaccccttcttcgaacttcttcatcttccagttcttttccaagttccaaacacccaagaggatctttctcacgactgaggctggcattgttttacaccccatcactttacccacgcacgccttattaatcactatatcttccagggatagatcttcaaaaagctccatcatctctatctcatgatcactgtccctttccagtaattttgcggctcccgcatctattgaatccacccccactgtaacttcagcacactcctccactatcgccatgtcaagaaacagataagaccaaataaacgaaagactgagagactaaggaaatcacacactcataaaaccgagaacctgagcaaaaagctaccacgaagagcaaaaaccactctaaaaaactatcaataaacaccaagtctactgagagactagacccatcgcaagaccattttcgacagagataatagtataatgtttgtattttgcattttccaatttactgggtccgcatataattaggttgtctatttttttatggataatttgtacatggtagtttcatcaagattgtagtattcttgcaaaaagtt

SEQ ID NO: 28262 - DNA, 2598 bp, Cannabis sativa
atttggttaagaggttgaataagatagaggatgagcaaaagggtttttaagcctctctgatagagttcaaggaggtatatcagcgtagccacctagaaatgaaggctagccaggacattatgatggagcagttgagatttatcttgactatactacacaataaaccagcagtggatctaacacccgatccttcaatggaagaagatgttgatgtgtaccctgacggttatgatccttattttgatgaggcacctagtactcctgtggatgccgccattattgccatagatgatagccagtcatagggtgatatctagttaccaagttatagccaatcacagggtgatgtatttcccttagacaagaaaccaatgggaattaagtttggaaggaggaagagagtcccacctacttagtttaatgaatatactgagatgaagaaaaaacataagcccttcttctccaaagtttgatcccctcagtctgccggatgaaagactattaggtagctttcataggtggttgtgtggggccatccgtaaccatcatctttgagacatcaagactggtgtctggatcttttctatcaaattcttagttggtcaaatttattattttcatgtatatatttctaaaataattggggtatttgattggtaatattttgacaatagtttatgcaattatgtgtcataggaatacttttattatcaataactttttggttacaagtctgcaaactactactcgttcttttatagatatgacaaatttatatgacttaaaattttataatgaataagtacaatatatatatagaaaaattaatgatataatattgataaaatatctaaattatcgatataatgtctaaattatcaacaatacaaaaattaatatgaaagaatcatatcgacaaattatggatataatattaataatatatcaaaaagacaatttttggcctttgcatcgagaacatattgacaaaatgtcgatacaatgtcgacaaatctcagcatgcaagaatcacaaaatatagacctttccatcgataaaatatcttcaaaatatcaacaaaatctcaagatgcgaaaatcttaaagactaacctttgcatcggcaacatatcaataaaatatcgatataaaatcgacaattcacaacatgcaacaatcataaaacatgggttttacatcaataaaatatcaataaaatgtcaataatatgttgataaaatctcaagatgtaagaatctcaaatactaacatttgaatcgataacatattgataaaatgtcgatataatgtcaacaaatctcaacatgcaagaatcacaaaaacattggccttctcatcgataaatgtcaataaaatctaaagatgcaataatctcaaatacagacttaacatcgacaaaatgttgacaaaccgaaaaaaaaaaaaaaaacacaagttctttaacatattaaaaatgcacctgctaacaacctaatttcaaagcagaaaccaaaacaaaataagcagttctaaataacaaatccagttgaaaaaatatattattacaactaatagtacactacgcctaaaatatgggctttccttgttgctctattgtggcctgaactgtcacaaataatgcagtttcgaggtatcgtgactcttttatcactaaacaggaaacgattctcctatcttcttccagcctttcttttccttggatgacctattggtttcttctccacgggtaccccaaccttcatgttcttgatgtgtttagggagaaccgaatcatccttatcaccagcaagattgatggtatcatcgtaagtcttcctccatttatcttttgaataataaggagagcataatatgtacacactcgtattcattttcaatgtcgcaaaacatgcatgagtacaaggaagcttcaacaacgtaaacatgacgtagatgcatgtcctttcaactaggtttacatcaccacctctttcaccattaggccacctaccactgttatacatagctccattttattggactccccttaaccttccatcattatgatttttggccaagttattttcaaaaagagtcgctaaagaggttgtacatttgtctgcctttttgaggcgatcagcgaaccaagctttcagtgtgaacctgataaatttaactaaagtagttattggatatttcctaaactcttctttcacaatattaaagcttttagcagcattgctagtcatgatgttgtatcgattggccaaacaattagagtgatcccacttctcaaaccctatactctccacatatgtaggaatggcaggattcatctttctaaagttctcaaactgtctatcacaatcagttttcaaccatcagtaagctacaatatatatttggttgtgaaaaggatcagtcttgaacttgaagtttacgttcataacaatatagtaatagcatgcacaatggactactttaatgcctctctgacacaaacactaatttttcaatcaccccaattgcttccctcaacttctgtaagaaaacgtccaagagtcatcattctcactgtcgatgataccaaaagcaatta

SEQ ID NO: 28263 - DNA, 2100 bp, Cannabis sativa
gcatccaacagcccaatcacatctccaaccacatccatgcacgtgtagctacccaccgaaggcggtgcatcggtgtccccgtagccgcggaggtcgggggccacagctcggtagcccagggaagccagtgtgagtatctggtggcgccacgtgtaccatagctccggaaagccgtgaaggaataagattgttgggccttgtcccttctgggcaacatgcatgtttatgccatttacttctatggttttatgctctatgctctccatcttgctttagctatctctatctctctaaaaaacaactattggatcttatagggagtgagagagtgaatagtgagggaaagatattataaaatattttggccataatgcacatatatgtaatgtatggtaagtatgggacgttataaattgataaaatgggcattttgcttttccacatatcaagaagaaaaataatggtatataaagattgaataaaggttaaaaatacatggtagttttgtaaatattagtttgaaattctcttaattaagatatcattttggaattgcttccatgtggttactttgtgacctggcccatctatctggaggataatctgctgtcccaaaagtgtgtctctctccaatctccatatcaaactaataaaattgttacaactatcatttgttaacacaagttggttagctctagataactttcctttaaatagatgctatcttatttttgctttcttttctttaaaaagcctatttgtttttttttatcaaagcagagattttataaaccaaaacaaaacaaatgctacaaagatcaacatccacacaataataaaagatagacttacttaaatgttacaaatctattgatccctttaatttcgagagattcctcctataaacaacaagtaataggcaataattgtgtgatttaatgttattatattatttggtataatgaattgcttgatatacatgtgattattggtattaaattggcttgcaaattgatagtgaatttattgttatcttgtgattattatgaattatttggattgtttttgtgagaattgtttgggtattttattacttttttttttgttgagtctttgtggctcatggttactttattgtgtaagtaaaaacaagaatatttcttgagttggagagtaaggcagtttgtatatatgttctgacttgctcagcctacgttattgagtcaatggttgggaaccgatttccaaaagtctgctgtgttcgacctagacttttgtcaaaacatttcctatatgtcaagatattagataaattctcatactaactgtctcattaacaagttacaaggaaaaatataataagaccttttaccagcctcaacagatcattataactcttggagtagtcggatctgttttcataggcttagatctttaagctctttacaataaagaaataaacaacaatatctcaagactctaaccaactttcagcaagacaagaaaatatcaataacagtttttataactgttttctcagctcaaaaacacaacaaaatcacagtcaacaaacactataaataaaggagcaacctgcccatttgaagagagacattcgactcaaccatagagagtggcagcagcatttttccatgaagaaaaacacctcacaaacaagagagaaaaacagagagagttagagagttctattgtaatacaaaccagaaaaatagagtgaagaaaggagagaaaatttgagattacctactaagctttgtggctaggaatctccaatccttgtaaccgatattattttgataatgaggacacaagcaactttgagggtcgcttgacggagacgtacctctgttttagagggaactccgaaatcatttctttgtgttcttcttctttatttttctgatggttttttctttagtttttttctctagttttcgggttgtgttttgtgtgtgttgcaggtgcaaaggagctgctgtaggaggaagaaaaaaagggcagcaacaagtttggtttaggaagctctagaatcggagcttggaaaggaagaagaatagaagaaattgattgggctcggct

SEQ ID NO: 28264 - DNA, 1585 bp, Cannabis sativa
aataatatatacttgataacttaaactccctagcatttctcacatatattactatacctaatgttatatattatttcttcaccaatgcatagaataatatgtagaattaatttaaatgcacgtggagaattctatataaaaatatctttaatggtaagaaattaagagatatttgcttaggtagatatataaagtagtaaaatattaatatgttatattattggagggaaaaaatgttattctaagaatatgtgtgaatgttatacaattgatactatcattatttttttaataaacaattaaaactaaaaaattattgttgctaagaaattaaataataatgtgtgaaattataattatagaatttttgaataatgatatactattagagtaattttataagtaagagtatcaaaaatatcgtaaaaacaaaataaaataaaatattatatttttgaatggtataaaaaattttaacattcttaaaagatattaccattgaagatgctttaaataaactgttgcagaagttcgtgaaacgcatggtacaaaaaagaagatacaaaacatgtttggggaaagtggaattattaaagcctttgttaggttagaatcgaacacacatgctaatcacaccaacaaaaactcatatccacaaaattaaaccattcaccaacaaaaattcttagccacaaaattaaatcactctctctctctctcttctttgtaaacaggtggggtacgtaataggttttcatttatagaaatataagtatgtacgtgtccacttttgacaccttgtgtacaaactgcaaaatatcttcattacatagtatataattatataagcatattttacttcactagttcacttatacatagtataataatatatcatgtatgtataaatatatatatataatgttttattaatatattagtggcttctccatcaaaagaccgaactccaataatttaaactgatcgatggtcataatcaattaatggagttggatgttatcacttaaagcagtagctcacttaaagttgtgtgtctgcttattgaaaccaaatataatattcaatattctcacgtttagcacaaaaaataaaataaaataaaataaaataagtttagcaaaaaaaaaatatatattcagtattctcacgaatatatatcatataaatagaaaaattgcatatcacgaaaaaaaaaaaaaacactatttttgtctttttgtaattttttattttacaattattttttatttttattttttacaatttttttccgataatttgtgtacgttggtttttttttctacattttgtggtgtttagcaacaataactgtatgtaaccatgtattttgttatgaatgacaatttttttacaataacttgagaggggttttttcttaatgatcttaattttttttttgttatgaataatttttttatgtataatttttagtacaataattttttagtgaattattttttttattattgaacattattatttatgcccaataatattatacaaataatagttggttagcagtttctcatgttagtcactaaat

SEQ ID NO: 28265 - DNA, 2532 bp, Cannabis sativa
caaaatttgctgagaacaacaattatatttgttgtttatttatgatctttttttctacgattgagtactatagtcgtttttcacctaatttggatttgcacctttattgtttgtttataaattaatgtcgttttcactgctcaaaactcatttttgatctttcaaaattgtcgtaactattgcaacatctcgtcgttccaaattctagctcaaatggcaaaaaacatagctgacttattggaggtgcggggaatcgaaccccgtgcctctcgcatgcgaagcgagcgctctaccatatgagctacacccccaaacttgaattctaagctaatcaaaatgtacttatcactattatctttaacttataaattcaagttagtcaattttcaagtaatattttttaaataaaagttgtcaaaattaaaattccatttttttttgtcatcaatttaaaatagctttcaatatttggaacttaaagacttacctttgataagtcaaaagaaggaaagaaaaaaaattaatgagaaaaatatgatgtccacaaaaaatacatatagtaattagctaaatgaataatataataaaaattttccaactacctaaagcacccatcatttgatttgacgaatcgatgtgtacaagtacaatacattaaaacatatgtatagaatataataatataactagtttatatataaatatataatgaacgacaagaaaagctttttatatgtaataattcaaaaagaagaagaagaagaagaaaattgaagagaaaatatgagtgggggcggcgatgaagattgggggtcggcggaggagacgaagcttagtccggctgcacagttgtttcaatcatcaaaattcaattgttatattgtcacaatcataggttgcaagaccaccatggattctcaggtcatcaaagctggtttagctcaaactttgcttaaacaccctcgtctctcctccaaactggtaagatttaatttactattaacaatcccaattttatttttatattttattttttatatatatatatatataaaaaaaaaaaatagagagtaaaatgattctttctttccctttcttttacttttacatagttctgttcttttaaatagctttgggtgcttaaacaatttacctcaaaaaaaaaaaaataaaaattagtttacttttgtagttatagttatttaatatatttattatttagtaaaattttaaaaaattcgaaataatttacaatataaaataatttttttaaataatttttttatacttataaaaaaaaattacgtgtataattagcttgttaaatttttcctaatatattaaataattacaacataaataattataaaaaaaattaagttaattttttttttaaaatacaaagacatatagaaatacatcaatgatcaatatatattaaatttatatattaaaaagtacttttacactataccacaaaaattagtagatgatgtttccttattgttttagcatttagaaatttttttttagttaattttatttgtagtgatgtatgttgtaattatttaagactgtaaaattttaaaatttttaaaataatttacaatctaaaaatcaatattcaactaatctattttactaaagtataaaatgaaataattatgtatacaacaaactctttaaattttattttcataattaaaaaaaatgataaatactatgttagatcctgtattttgcaaaaataccaattggattctctattttgttaaatgttaaaatgaaccctctgttttgttaaatggtaaaaataagaccttatgctcaatttttaacaatttaatttttaatataatcaaatttaagataatttctaacaagaacaaatacagaaaatgtaactagttttatcataacaactctagatcaaattattattaagttttattttgacaaaaaatcagttcaggatcttatttgtataattttgaaaaatacagagttcaatttgtcatttaacaaaagagagagttcaattaataatttttacaaaaacacatatttcaaaatgatatttaccaaaaaaaaaaaaaatagatgcctaaacatataagatatacatccttgcaccccatttattgagagtattatgggcaagtgttgaagaaactacatatataatacctacattgatacttgtagggaaatgaaatggctgaggatggcaataagacacgtttctccatgtcacaacataatctctcaatcaatgcatcttcaatctctatacctacttagtactaaatagtaaaaaaaggcattttttattagcatacaaatacaataattttaaaagaattacataaattagacacaaaatattatttatattagtattgaaatttaaatgaattaaatactttccttttacaaagcaaaatttgttaaaatatacctaaaattttaaattattctttcaatataccacatttaaacaaatactctaaatattctccaaataccctaaaa

SEQ ID NO: 28266 - DNA, 6655 bp, Cannabis sativa
  modified_base (32)..(40): a, c, t, g, unknown or other
tgacttgtttttaaaaacttcaaaaactattnnnnnnnnncatttctaaaaataattttttgaaaacaataccaaacatggtctaagggattcattagtttatgatttaaaaattgtattttcttaaagatgtgttctgaaaacaaaaattttaattttgtatgtaaaaaattgtttctaaaaatatgattaattgtaatgtgatttattgtttttgaattttaaaaaattgaatatgtgattggttgagaattttagaataataaaaaaaaaagtaaaaaaaatatttaaaaagtttttgaattctataatttgaaaacataaaaaacataaaatgatgttttcattttgtagcttaacactcaaaataatatttagattttatttttaaaatacttaactaatcaagaatttttatgtgaacccaccattttaattttcaaaaacataaaacaattttcaaattctaaacctaagttaatatttttgattttcattatctgctagcgaatatttctgttttagtgtctaatttttctggagttcaaatctctcatgtctacagattcactaataatgctactcattatttagctaaacacgctctcacggagaacactgactgtacttagtttgagaaaatccctcctcctctaataactattgtattatgaaccttttcgttttaatataataacattttctcttttaaaaaaaaaaaaaaaaccataacaccctataacagaagagaagcttaagccgttgggcctaaataagcgatttttttcatataaagagtaaatactattttggaccatgtgttttgcaaaagttgctaattggaccttcttttttattaaatgacaaaatgaacattatatttccaaaatggtaaaactaggaccatgagctcaattttcaaaaaaaatatttttttaatatattaattaactttaagacaatttctaacacgaacaaatacagaaaatataaccagttttgtgataacatctctatatcagattattattgagatttattttaatataaaaatcagtttttggttctatttgtacaattttaaaaaatacatggtttattttgtcatttaacaaaaccgaagtctaaaatggtatttacctggtataaataggtgtaaatataaaattgaaagaagaagagaagaagagaagagatttggagggaaatggagatggaaatgagaggaaaagatgagatagaaatgggagaagacttaactccttcccttccacccctttccttctctctcaacgattccctcctcttttctcactgctccgcctgctttttccccctctctccacttttccatccccttttccctcctcctcctcctactctcctctactgctcctcacaatgctcaaattacgattctaccctccaccactccagcgctgagtcccaactcctccacctccttcaatcacgtccctctctcttcccccactccgccgacacctccgatctccgcctcgccctccgcctcatcaccgtcaccatcatccaatctcactcctatcgcatcgcaggcttactcaccaaccgccataaattcaccgccagttttggctcctgccacgagattctcctgagaatttcggacggagctagggctatggcattggctaggagaatgatgatgagagacggttttaatttctccgaagacgagattttgatcgaggatgatgttcagttggaggaggcggcgctttgcttggtgctaacgaacgccgtggaggtacaggataataagactgggcgtactcttggagttgctttgtacggtcagaatttcagttggatcaaccatagttgttctcccaatgcttgttacagaattttgttgccttccgagatcgaaacgttgccgttttcccttgaggagactcctttgagaatttccccttactgttccgctgaagaagaagaagaaactcaagtggtgagagtgagactctgaattttaacttcttttcttctcttgttgacattgataactaataaagttcacattttttttttcttttacagatgaagaatagtgtttgtagcagtgatttcttgaataaaggtgtcaacttttgctgttgttattaggtatattgttgaaaaattggttatatatgtgtatgtgtgtatatatatatgtttaattcgatgcatgaaaatgaagagtttcaggtttgttatggaccaagaatgatagttagaagcatcaagaggataaagaaaggggaggaagtgactgtggcttacactgacttgttacagccgaaggtatatatgttggtgtttggtttttgatttatgaactatgaaatgaattgtatataatttctatacaatatctgcccacccttttgaaaatgtatgaatcatataataattttttatcatttagtgggaaaaaccaagaaatagttattcaaatgtcaattttgagctgatattgtaagcttatgtttaagcatttaaaattgttctttgattctgatttttaacttctacatcactttattgttgcatactaggctatgaggcagtcagagttgtggtccaggtaccgtttcatctgctgttgtaggcgatgtaatgcatttccttcaacttttgtggatcatgcattggaggtaagatatcttgaaaacatgttcttttgttaatggcatctacaaacgtgtgattgatgataggatttggattttaccgggctgcaatgattccattttacctgtcagcataatattttgctcgactcttttgaattgtggttttacactgttagaccccaagagtagtggagtatggtagaagagagtaaatagttttaagtgagaataggatagtatatatagttgattatagggggagagattatgcaagaattgagattgttctctgcatcataggtccgaaaggaccactctgtaattgcttttcttttcaagaaatataaagaaaagccatggctgaaatggcttagtttttcctactgctctactgacctatttcacagttactgttctattggtttccttttgtttgttgtttgcttgctgaaatctgtactcaagaggattggttcatatcatacaatatttttcagtggacagacagaaatcatatcatacactagctcactcgcaaagcacctattcaaatttctcatttagttaacgattattttctctgaaagggagtgttacctgaacaagtattaacactagtgcaattgccttttccaggaaatttctgctgttaatgctcgttcttcatgtaccagtagtgactttgataaagacaaggcaactgaaatgttgaatcaatatatagatgatgcaatagcagattatttatcagttggtgatccccaatcttgttgtgagaagcttgagcgtgttttaactcaaggtctcttcgatgagtatttggaatgtaaaggaaaagcacctcagccaacttactggatgcatcctcttcaccatctttctttaaatgcttacacaacgctggcttcagcatacaaaagccgctcaaaagaattatttgcttcgttacctgaaaccaacaaacatctgtgtgaagcttttgatatgagcaggaccagtgcagcatattccttactgcttgctggcgcaacaaactatctgtttcaacttgaaccttctctaatcgcttctgctgcaaatttttgggctggtgcaggggaatccttgttagattttgctagaagctcaatctggagtaagtgtttgcctgcatcaaacctctcttctttcacaaaatgtaaacgcccaaagtgctcgttgagagagaaagtcatccaaattcgcaccagccaactcagaaagagagaaaccaatctgttgcacggtcaaactcaattttcagattttgagaattcatcaagccagttcctcaattgtatcactagtcttaccacagagaaagcttggttttttcttagtcgcggttgtagtcatttgaaagtatttaaggatcccttagacttcggttggctggctaccgaaagatttttcaatttgtgggagtgtcctattcattctagtgacaccaatgaaactatttctaaacacgaagctcaggaattcggcaaccatggaagaatacatctcctccaactgggctatcattgcttattatatggaagttatctaggaagcttatgttttggtgagcattctcatttggtctgtcatattcagaatatcttagaatgtgaagatggtttgtaacttgattaacacgaacacaagaaggctttgcagaagtgcaactatgtcccaagcttctcttgagcgtttggcttgtgcaatgaaaggaattatgttgggtgctggacaaggttttgagccatctattctatatgtctgaagagatcataccaaatgaattaaggtatttttcatgagacaaaagtattatattgatggtgataaagagtattgttgcaataggagttgtcatgatgagagagaggttgaggttttgaatgtgttctcacatcttattttttaatcaatggaatatatatagatacattttgaaatttaaacgtacgaaagactataacaaatagtcaataacgtttcatttgaacacaagacactttcatcatcaccatatataatgctattttatttttgaacattactattgagtaccagtcagcactttttatatgtgtcgcgttacgattggttagcgatattacttaaaagttattttcttaaattatataagacatgatatttaattacatcaataacagtataacaccaaaaaaatatgctaattactagtgttttttagcaatttttatttttttgtataaatatatatgagattgtgtgaacagagaatatgttaggtgggcttttgtaattggaaatatgtgtaaattgacaaatatttttttcctaatttcaccattgaatttccaaagtaggcacataatatttactatatatgtatggacatgaagtatgtaaaactcatcacctctaacattttatttttgagtaaacagaacttctctttaattattaatcagaacaatgatcttctatcaaaatcactcttaaaaattgattgagacatcgcttcactaagcttagacaaatgccttttgcattcagagcttgcaagattgaaactttttcatgattggatggttaaggctttcgatcatccttattagttgagctcaaaagttagaaatggatttagtatcagttaattgtaaggccatttttgatagttggttcctctagttgttgcattgcatgtttcatttaataataggcattagttaagtggtgatcaaagtgagaagaggctttaatgaacactcaaaacacaataaaaatccttatcaaaaaaaaaaaaaaaaacacaataaaaataaacacatttcaagagtgaatacattaaaaaacatactttctccatttacctgtgcctcatttatttatttatttatttatttttttgagagaaaaggagtttattcaactaaagaaaacacattattctacaaatttgcatccgcctcaaatttcaaaaaccaaaccaaaactcatattgacaatcacattatcgaaatagtgtctgtttttagcaatcctttacaactcattttcattgtccaaaccaaacagtatttcattgttggctgattcacttcagtcattcaccttctatacaagagagatttgatcaaaatggtgtatgtactaaaaccaagataccactttcacctaagattaaaaaattaattgagtccaattgaaacaaccaatcaaatcaaagttatttattaaccaaactaagctcattcccaagaattccatatacaaacaataattgttatgtgtccttaattttatatttttttaaagcaaaatataaattgaccattgtgagactgtcatatgaaaattcaatataaatatcttcactatttttgttcatgttagtaataatataaccaaaggaaatatatttcaagcattttaaagagcaatcaaatagaaaagaaaatattataatagtaatattaatagagtaaatttccattacatatttcaccaacaaagaaccaaaaggggaaatgtcaagacctaattacataaccaaaccctaatttttccatttaggcctttttgggagatttgggtgcagatttctccgattcagcagccttagacttcttgggtagcaaaactgggttaatattgggaagaacaccaccactggcaatcgtaacaccgtgaagcaatttacccaactcctcgtcgttcctcacagccaattgaacgtgtctagggttaatcctgttcttcttgttgtcacgtgcagcatttccagccaattccaaaacctcagcagccagatattcaagaacagcagctaggtagacgggagcaccggtacctgtacgttgggcgtatcttcccttcttgagaaatcgagcgatacgacccacggggaactgaagcccagccttaacggacttcgtcaccgacttcttcctctctccgcctttccttcctccggctcccttggctcctcccttggttgcttt

SEQ ID NO: 28267 - DNA, 2750 bp, Cannabis sativa
tttaatttctcatgttaccattctcttttggaaaaaaaattgtaggaacactgaatgaatcatataattaatttgaactttctaattaacatgaaacatgacctttaaacaatagtcatcaactatttaaggtggcatttggttagagctaatgaaatggaaaagaaataactttcattctatttctttgtttcgttgcatattaaaatattggaatgtcattccaatagaataacctttctactattttggtggaataactttcattttgaaatagaaaaaaagaccattttaatgcatgatgagaaaaaaatttcataatcttttatgtattttaatttttattccaatcctattcctatttctatattttcattcttctagaccaaatgccacaatgtatttgaaattcgaatgtattagtagtagattaactaaatgatctaagtttctattatcaaaagaattataattgcttcagttataagagtagataaagtttacatgttatcatttccttgatcaataccttacatgacaagcaagaatccatagtgttataacatctcaatttctccaagctagccaagcaccttgcgaagttcttcgatttacactgaacgcctggttggatccacctacattttggttacaaacagttttatgataagttcatattcagagaagaataagaaaattattacttgattcttaccttgcttagaagggtggcaagaccttgaggtagagcttcgagatctgaagtcgaattgccaatgttcgataattggagacctatcttgtgtactcccagttcctttagtttagcctcgtaattctttggatcatctttctaaaaaccattttgctcaattcttgagatgtttgattctaaaaaccaagtgatgatcaagtccctcgcagatttgtatggcagctggtgccccgcggcctctattatggtcttgatcaacgaatcctctgcaattcttcgacgtagtctcttgtaaaagaaagaccgagattgtttccactcgagaatttctttaacaacacctattgcagccattctcaacgatgtgtcatgcaatttagcaaatttagtagctatttgagttgtaaattggatcttttgaaggaggttacgaatttggagtccattattagaaaatgagtagtagaatcaataaagaggatgacttccaagagcagcttgtggcgatctaagcgatttctcttattagttctttcttctttcttttagttttcttatgtttatttctgttttagctttgattttagatttgaaatatggagattatgaactaaactccctatttagggatttgatgaatgttgattaaaattatgccatgagtttatgttaatttctatttctgttttcttgattgtgaatttattcatatttgagattgatcaccttagacatgagtcatgatctcaatacaaaacgtgaagagtgagtattgagaatgttaaaattagataaacttagttttgatgcaaaacgagagtattcgtatagcctttgtgacatttagattattgtttaatgcagattgtatgttactctatctcagagatgaatagataacatatgatttagggcctaaaacatctgaaaagagttagattaattttataatctgtcattcacttaaagaaagaggaatagtaattagcattcataattgggtaattgaaacaacaagattcatttctctaatttctcatcctttgattaaacacttctattgctttattttatttttttataattctttacttttatcttcatcaaaattattatctttcaaatagaaaaataagtctaatttagtagtattcagtttcaattccatgtgggttcgacttcacttgtgtgagtactatttgattacgtacacttgcgtagttgtatgtaattttcgtaacaattattaatagagattgtttgacactttatttgatttaatgtgattcaattcttcccaaattttctttatgtatctatttcattcgtgcttagtttcttttaattgtctaaccatcaattaattgtttatgatattaatatgaaatttgagaagtgagtattaattatggtatagtgaaataaacacagatttcaatataggacgagagtacctatatggtttgtgtagcatttaagatttttgtatttaatgcctcctatgtatttaaatttatcacgagagtagaaaatttacatataggttgagatttatatgtgttatcccgaatataaatttctttagtaaatctgctatcacatgaaaattagaatttgagaatataattatactaagccatataaaatagattcaattgaaagtaatcaccctagataagctttaatcattgttaaattgcactttaatttatttttattttctttttcaatagattttaaactctctttctcaatcattcttgacactaaacagaatttaggaatttaatgggatcgacctcacttttgtgagtatattacttaattcaactacatatacttgcctactaaaaaattcataacatttgattaatgaaatttcctctttgataaaaaaaaaatgaaattattgaaaaaagatacattatgggtgcgtttagtaataattttttaatcagtttttttttaaaaaaaaaaaattaaaaaagtaaaaatattttccaaaatgatgttctacaaaactgtttttactttt

SEQ ID NO: 28268 - DNA, 1686 bp, Cannabis sativa
tttatatgtgtttatttatattgttttagaaattcatctttaggatgttaaacaacatacatggtagtatatctagatcctggtaaaacatattccaacaataccttcttcactaagagactcgtgattatgaaggcctgggtcccagtactaatttcaggaaagaagacattcgaaaggtacctatctggattcaacttgaaaaccttgatttaaaatattggggccaaaacactttgtttaagattgttgggcaggttggagaccctataatggtggatgaagtcaccaaacaaaggcaaaaactcaatttcccgagaatcctcattgaggtttctatgaaataggaatttttagggaaaatcaattttgaggatgaacatgggtgtattgcatctgtagaagttaagtatgagtggaaactcaccatttgcaagaattgcaatgggctaggacatgtaactgatgaatacagaaagaagcagagccatcaaaagtagaagtgggttgttaaagataatgaagaagagataaacaaagcacctattgtgagtttttatggatttcaaccaggcaacaaaggttcgaaacctaaggagaaaacacagtaagagggcactagcacagaaaattcatttgaagcactgatggaacaccctgagaaaaatgtcattattagtcaggaaaaaatgcagattgcagatcatgctaagataggagggggggagagcctcctcttcaaaatcgatagacttttatcatggaatttctgaggatccaacaaccaatataaacaaagtttgatcaagcaattgattcattctcaaaatgtttgtcttgttatgctccttgagataaaagtcaaggcttcaagcttggatccttatactctaatgtttttaatgggtggtgtttcactagtaatattgcttggcataaaagagggagaatagtaatagcttggaaccctaatactttctgcattaacataatcaaatgtacaagtcaattaatacatctccaagcttcaactttagatggtgttgacctcgcttttagccaacgacggtgagtcttgataataagtgataaattatataattcatatataatatgaaaagataaataaagaacacaaggtttttaaaaaggtgcggtcccgagtggttcggtaataggctactccccttgatttgtattgacttaagaataaagaatacagtgtttcctctcttaaagctcttacaataaaatatctgagtatgctctcttagatctctctcaagtaattctttcgaccctttttccagtgagaatggatccctatttatagggctacatgtttgagggaaggtttccgttttacttacaatatctataattggtaagaatacatattacatatttagaatacacagattataagatttagatagccaaccatatctctgtgatacggtcctagatttatagggatttctcttgtgcttcacagtgcaaattctagaattgctaagtgttgatatgctgctcgaattgtccactgctcggctgggaggacctcgtccgtgcaggtatatgttgtgttatgctaggaacatctcttttgggcaggtatggagaattaactccacgtgtaaccagcatgagatgccacgtcaaacttcaaaaattgggataacattt

SEQ ID NO: 28269 - DNA, 4732 bp, Cannabis sativa
cttgttcttgttcttcttcagttgaaacacagaacaagagtgagttggggttgttgaataagcatcattataagaatagtgttagtagttacatttctgctgaagagttgtctggtcccaggtgatgcattccatatgtatgtacatatataatacataggtagaagatagatatgatatcattgactcacatgagatgagattgttgtttttctttgtttttatgcactttgttctgtacactattgtattcagttctttaattaatatagttataagataaataagggtattccatattgccatttctactttgtaaataataaaatttttgggactatgaatgaatgagttatcttgattaatatcataaatatccagagtgacagtgtgcaagaattagtatgagaaagatcaaaattatgttttcaaatgtttattgtaatctattgatatgtgaatagggagatggcattggcagcctctcagaaaatgaaatgaatcaaacttctattttttattccatatcaaatattagttgcacaattataggtttagtctttcatcttacactattttgctatatatctcttcattttctgttccaatactatccttatgttgttcaaccaatttttttagaaaaatatgctatttttttttacttgaattttgatatgtattaaatcatattttttaaattttttaggtcgttaaaaatttctcttaaactattgaaattattggatttaagaactttaatctaatttaattcaattttattaatatagcgattgtctatatactagattgtgcctttaaattttaatattttctaattaagtttcctagattttaacatgtactaaattgtgttctcgaaatttttattcaagttagactttttttaataaaattagacaaagtcattaaatctaaccatctcaatagttcgagaagaatttttaacaacttgaaaaattttaaaaacacaatttaatatatgtcaaagtttaagaataaaaatttaaattaaccttgtttaaatataatatagaatatattggacaaatggattaattattcataaagatacttcaaaaaaacattttatattaccctcattgataatatttttttttgatgaaccctcattgataatataatatgaaaaacacacacatataatcttcttccaaatgaaaatatgaggactaaaatttgaatttgatataatttttttttctttgaatgccatagaaaattaatccaatttaatatccaaaggaaaaaagttgatatttttttattgttttgaattatataaacttaattaatattaatatgagagaggggctttatagtgatgacatgagcaacacacaaatacacaatcttcagcttctgtatttgtgtggctatggaattgaatgagaaatgagctttgcattctcctcaccttcacctacttgtctcagctcttcaccgccgattatggccgccgacctctcttttcaggcgcttcttctatccaacactcttcaaccttaccacaaccacaaccatatcactaccacacacactccaacttcaactccctgcttctctccacttcaattttccaaactcttcttatcccattcccactctcactcctccgcactttctccacgtttcccactctcttgccgcgctaccggaaccggaacccagtctcctccggcctccgccgccgatatccaagtcgccgtcgaaatcggaaaggatcgtctttcaaaggttctttctttctttctttatatctatgtactaatttcagctgagagccaatttgttgagttggtgataatataatatggtgattgtgttttttcaggttccgatttctcgtatcagaaatttctgtatcattgcgcatattgatcatgggaagtctaccttggcagacaagctcctccagatgactggtactgtacagaagcgtgaaatgaaggagcagtttcttgataacatggatttggagagagagagaggcatcactatcaaacttcaggtttcttttcctcttttctaaatttaatcattttggaacttattactcatttcattactaagctaagctcatttctttatgttaggctgctcgtatgcgttacatgtttaaaaatgagccatattgtctcaacttaattgatactcctggtcatgtggatttctcctatgaggtacatacattagtatatatgctcttaattagttagtagtgcagtaccatcaaattcaatgttcttagttagtattgctgttttgtttattggaaaggtatctcgatctcttgctgcatgtgagggtgccctccttgttgttgatgcttctcaggtattttaactacatctttcttttgaattgattcttcattagctttgttgtatcgtcttatcttatgagtgttttactttttcttatttaagggagttgaggctcaaactctggctaatgtttatttggcattggaaaacaatcttgaaatcattcctgtaagtttgtttcatttttaataaaatagaagattgttcgaaaatagtaattaaatcccatttgtaataaaaaaaataaaatcatggagagtgtataaatctcttaattgcaggttctaaacaagatagatctcccaggtgctgaaccagagaatgtcatcagggaaattgaagaggttgctcagatatattatatgctttgcttgtgttatatgttgttttttgttggtcaaatattaactgactctttctgtttctttcttagattgttggtttagattgtagcaatgcaatttattgctccgcaaaggttggttctttgttgcttatccactaaaggaaactactacatgcagttatctatgtctttctgagagaatgcaatttattaaaggttggttctttaatgtaagtctgtgccttggtggtgtaaaaaatgtaggagggaataggtatcactgaaatattagatgcaattgtggagaggattcccccacctcaagatactgctgataggccactgagggctttaatatttgataggtagaaattttgtaacgtgctgttattattattttttatatggattaggaagacaagctttcagtgtgctcatttctatttctctgtgcccattccttaatttgttttatattatagtatagtgtgctgagatttgaatttattgcaattgtcgttaaatttggaattggcttttataatttgaagatgtattttctttggatcttatgcagttactacgatccttatagaggtgtgattgtatattttcgagttattgacgggacaataaagaagggcgatagaatttactttatggccagtaacaaggttaatatgttttctataaactttctctttccttcattgtctacattttattttgtttaattgtgttcagaaagaagcaggctttaggatatttttctaatgtgttctcttagaacgcaggactattatgctgatgaaattggagtgctatcacccaatcagttacaagttgaagaattgtatgctggtgaggtaatgttctgaaaatttgtatatttatttataaggtttttattttaattaaccatatgcacatccttgtataaacaagcgcacatggaatcatgcaaacactttgtcccctatatacactgcattgggttgaaaataggagcttggtttgaaactttggatataagtttttcaatatttttactttgtactagtcaagtgtttttcttcactttgctttggtgctttacattacacaggttggatatatttctgcttctataagatcagtagccgatgcacgggtaggggacactatcactcatcattttagaaaggcagaaagctcattacctggatacgaggaagctacaccaatggtgttttgtggcttgtttcctgttgatgcagaccagtactactattctcttggttgttaaatgttgaattgatatttatagatgggtttttgtgatctctaatacctttcgtttcaatccaacctctgtaccttactggcaggttccctgaattacgcgatgcacttgagaaactccaacttaacgatgctgctctgaaggtttgtattgtattttatgttttatggactatacatgtatacatttgacagcttgcactgaaatgattggtttccctttgccatgcatttttttcccttgcagtttgaacctgagagctcaagtgccatgggtttcggctttagatgtggattcttgggtcttcttcacatggaaattgttcaggttttctttgtatttatcatttgttctgttatgaaaaatgtcagtttggtgggtatattcttacaagtaagcattttactttacaggaaaggcttgagagagagtacaatctgaaccttataactactgctcctagtgttgtatacagagtgaactgtgtagatggttccgtagtaattttctcaaccctgaattctttcattttagtttcaagaactaaagaaacagaaataaaagaaaactctctcaatttatctgggaatttaggtcaatgtttatatcattgatctgctctatctgaatttctaatagatggaatgctcaaatccatctatacttcctgaacctggaaaaaggaagtcaattgaagagcctgttgtgaaggtcagatttcttcttgcttgattt

SEQ ID NO: 28270 - DNA, 2101 bp, Cannabis sativa
tgtgtgtgtgtgtgtgtgtgtctccttgtgcggcatccctaccagctccgcaaagagctgcatctcatccccgccagccaaaagtaaggccacggttagggttgttcataaagtatctgattcgatccaatccgcacgatccgatctaatctacacgatccaatccaatcctcaaaatgtagatattcacacttgtacggattggattggattgaaaaatttgaaattcacacttgtgtggattgaatgttgtttgacctcaaaaagtaaccaatccaatccgcacttaattatatattttaaaaaattataatatatataatattattttaatttctagtaataatatataatataatattactgtaatattaaaaaaaaaacaaatttctaatttttaattctaaacctaataattagcccttttattaaaaaattctaaacatataattaagtgaaacgattattaaggtttagaatatgaaacttgtttttttaactgtcatgatttacttttatgagagtgtaatgtgttgttagaaaataaataataattttttttagtgtttgttaaacttaaattctgattgtgctacctactgttgcgtgtgtagggttttttttttacatttaattttttaatgaaatattaaataatttttaacattaaaaaaaataaccgatccaatccgcactattacagattggattggattagatttaaactgttatgcagattggattggattcaaaatttgatatccgcacttagtgcggattgaatgttgtttgaccaaagtgtttggatcggatgaacaaccctagccacagtggcctttcttgtcaccaaaattcccaaaagcccaaaccccttatcctgattacctctctctctctctctctgtttcattcagcccactccgacaatacgtctctagccaccattggcaaaaacggaggccatggctgaactcccttgaaacaccatgatttgtgatccccgaggtctctagctgctccctctcatttttcttatgtcgtgagctactgtttagctgtcgttcgtggagtggtggtccgacaaggaaagaagcaacaatggcaaattagaattaaagaaaaaatgaaatggacaaaatggttaaaggggtcggttcttacagagaaaaaatgaaaagaaataaaatggaatggataaaatgatgaaggggatcaagttttaagaattcatttcgccccaacatcattgacgacaaagttgtcattgatggtctgttcactgatcaacgtggcaatccatcaataaagactttgtcgttagtaatgtttttgacggaaaaattcctacccactcatttttcaaaaaaaaaaaattattgataatattgtcgtcattgaaagtggcacatcgccactaatgtttaatttcaaaaaaaaaaaaatagtttttatcagcgacaacccttcaatgttttcactgatactctcacctttaatgaagactttggacaatcattaaaggttattattcttgtagtaattagttctaactaattaacaattaacttaggaaaatattgacttgattagtttaaattacttgaaagaaatctagaatattagccccgaaacattttaactctttatgtaaaaaatatttgatagcaaaactgctgaagaatttgctgcaatttacttcttattgttaagttaagtgttaagtttaaacacatcttaaaatcatattggtccaatataattttaatcaaataattattataaaattaattaaaatatatttaaaaatcattaaagtaattttttgttctattttcaaaactaaaattaagaaactaatgaaaatgtaacttttaaacttctattttaaatttttaatattaaatttaatttgttttgctatttattttcttgattttaggattttttttttttggttcaatttttagatctactagttaacttttaattatttaatatttaaaatatattttaattgattttatagcaattattgaattaaaactatttttgggccaatatgatgatgaaatatgtgattttagcttaacactaggttttt

SEQ ID NO: 28271 - DNA, 4209 bp, Cannabis sativa
tcctttctttcttgtaattgtagatagtaagcaacaatggcggtgcctttgcttacgaagaaaatcattaagaagagggttaaaagcttcattagaccccagagtgatcgtaagatctctgtcaaggtatatatatatttttaaagtttgaatttttatttttgagatttgaacgaagtgatgatagtatttttgtcgccccagtcttacttgcaatttttctgattgtaatatggtgattgacactcatatctgatttttctcaaactctgtttttgtaaatttcgtaacttttttttgaggctttaatgaagtgatgattgtaattttgtcgccccaggcttacttgcaatttttctgattgcaaggtggtgattgacattcatatctgatcttagaacactgatttttcattttattctttgcttttttctgtttaattttagacttgaactgaagtatgatatgaagatagtttcttcacagttttttaatgaatctgattttgcaattggagatgaggataacaacccaacatttctgtatttgaatgatgaatactttacatgcatcaccatctgatccatgttgcaaattcaacttttattttattaaattacaacaacctatgatgcaaaagttttaaatgtactgatttatatgtgattattatcaaacttatcaccatctttcggctgaggttgcaatgtctaaagtttctttctttttcctaattaattgttattttgcccatggtatctaatgcccagacttaattatgtgtctgtgcatctcgtttttagggcatatagtgaatctcttacaggtcttgcgacactgattgccttgttattttcataggctttctgttactttttacctgtttacatacttttccaaattgcaatacttagttttatatttggggagcagtgattaaaaagagagatgcttgagtgggattcatgattacccatgtttcgaattcaagggtggattgaggaacaagatgttgacacccttgacagccgccccttttagtttttttttgttaaacttaaaaggcaggcttgtttggcgtcagggaaaattcttcctttttctttcattaactctttttctctgaaatgggttttcaccactgtgacagtcctattaatatacacttgatatgagccctttttcggcttaactcttatatttttgcacttgttgattctatatggcgaggaaacaaatttcttgttttttgcccaattgatagtgctgatattaaatgtctggtttctacctctttgtaaatttttacaaagaggatttgaggtcaggcagcggccagacaaccgtagtgatgatttccacagattaagagcttaatttgatctctttgtctactaaaagcatctcacattgtttagttattccatttttacatatgttttctattattttccttttagtatccacaagttttaatctttttcatcaggaaagctggagaagaccaaagggtattgattctcgagtaagaagaaagttcaagggagttactctcatgcccaacatcggttacggtactgacaagaaaacccgccattatctcccaaatgggttcaagaaatttgttgtgaacaatgtcaatgagttagaacttctgatgatgcacaacagaacctattgtgctgaaattgcacacaatatctctacaagaaagagaaaggagattgttgaaagagcttctcagctcgatgttgttgtcactaacagtcttgctaggttgcgaagccaagaggatgagtagactttttccaatattttgacacaattcttatttatgtcccaatttttgtttcatttgaccaccatttttgatcagatcaaatatttagtttttgagttatttttctctaaattgtatttaccattcttcacaattatataaaatgaacaatcttctgctgtgtatttttgacataaagtgttcattattgtcttattagagacagtcatgaaactaaatatgtatagacaactctagctcagtgttctcccaatttcacttcaatttcactgtgtttctattcgattaattttacttttgcttttgaaaaaaatgctatttttaatttgagggtttttctatgtcgaggtatgtatatatttatatgttttaaagattgaattttttgaggctttaatgaagtgatgattgtaattttgtcgccccagtcttacttgcaatttttctgattgtaaggtggtgattgacattcatatctgatctgagcttactaactttttttattttcttaactggaattgaattgtgttttgatatgaagataatctttgatgttcaatcttacttacatattttatgatgtaacatggtgtatcaatgatcgactatctgatcttttttcaagcaatttcattttgtaaaattgatttttttttgtgattctgtttttgcaattggatacgaggataactacccaatattatctgtatttgaatgatgaattctttacatgcatcaccatctgatccttgttgcaaattcaacttttattgtcataaagtttgtgtttttatctattttggattgctatataatgaaattacagcaacctatgatgctaaagttttaaatgtaatgattttgcaagtgattattatcaaactcatcaccatctttcggttgaggttacagtatccatttttgttataataataagtctttttttcttcaattgatatcaaccatggtttttattcttgtatatttttgatttgtttcatttctttaactcaaatcacagctttaggctcctcctcttgtaattatagcgcgatgaaacagcgattggagaaattgaaagcgttcacagctcaactcatcgatgactggtgtcttgatgtttattcaagaggatcttaacttaagaccaaagggtattatttgattcatgaaaaccaatcatttgtttcccaaatggggtcaagaaatttgctgtgaacattgtcaaggagtaatcttttctcatcaaacacaacaggacctactgcatgtgctgagattactcataatatcaacactatttagatagaggaaggacattgttgagaagtgagcttcttagcttgattttgttgtgagaattatcctcagttttgtttttgaacttgtaactaagtctaaaagttgccaaaatgttgcattaacttatttttcttaaaaggtgttcataaagttgactgagatgtaaaaataatctaatattgaaaaacaactaatctattagtgtggatttgaattagtatgagaattgattaaaatccttaatgattgacaaagatttgatacatatttgctaatggtaacactattcttataataaaaccaaaaatatttgttagtatccaaaacatatatagtaattaatttctcaaatcatcactagttttatcaatttacttaaatcactacgactccataaatcaaaaacaccagcctccaatacttcccttaaaaacttcatctcttgatcatcatcatcatcatcatcatcactatcttctttaagaataaaatcaacatcattcttccacatatttatcttatattcaattccttcaaatttttccttgaagacattatcttcaagatgctttgacattgagaaaatcacatcatttataagcataatggaaaattcaggactgcaaatacagacttccaaacgcaaaacttccatgattatgtgatgaactatgtcatcttcaatttcttcatcaaaaataaatgtcacctcttcttcttcatcatcatctttgatcttcttgtatatattttgtaaaattgaaaagaaaaagtgtcaaaattattcatgacaaaatgaacatatataatataactaaataatgatattgcattctcatcatttttttttttatttttttctttattttgtaaaattgaataaaaaagtgtcaaaattcaaaattcataataatcaatctttttatcaataattttgtgaaattgaaaagggaaaaaattattatttgcttttgagattatatatgtaaaaaattgtgaacatataagagatatgtctcatgatcataattatctttgatcttctatttatatatatattgtaaaattgaaaattcaagaacaaaatgatcttatatatatatata

SEQ ID NO: 28272 - DNA, 1815 bp, Cannabis sativa
ttcaaaatcttaaaaagaccaaaatcttaaatggaactagcaatacgtggctcggcacgtacattcagctagtatatatatatatatatatatattagggtccgtttaattataagacaacttaattgtcttattaggtcttacacaaatttaaggcctatattttaagggtataatatatgtatttttttttaataatatgggtgattcaataaattttaatattattaatatttattactaaagatcaacttacatttcaattaatctaaaatttagaactatcaattaataattaataatatttttaatgagaaattttatttataaatcatctctaaataatataattttctttcctttatttataattatacttatttttttttattgtgattatttttatgattgttagtttatatttttatgaaagataaaaataaattagttgtgcaagtatgataattattaataaaatatgtgataaataatataaaaaagaaaaatcgtaataataagaatttaattaatatgttttttaactgaaaataaattttaaaaaaatcttgattaaattaataattttgtaaaaaatatttaatttaattttcaaagtttctcttaaaaccttgtggaagcttgagacagggttgatataatatgatgtaggtgtagtagggccatgaaagtcgtttttgcttcgagttgtctccaactcagaccttttataattaatggaagaaattatataatatataaatatatattatgtatataatagaaaatatagaatcacttacgtaaagcatatgacacctgttgaagtacacgcttttgtgcatatatacatgcatgtggtagcaccaaacgaataataattatttcaactatgtcaaatattgtttctagaaaatattcttttaatagcaaatttccaactacatttgatgacatttcttgaatagcggtaaaattacttaaaattttaagtttataagcggcataaacttgatgtttatttttagcggtataattgtaaaactataatttttctctaattttgtcagtacagactctgttttaaatttattaaaggaacatttggaagtaactatactaatatatatttctgtctagacctaataatctacaatctggaccttatatgtagcctatttaagaaaataatagagtttgtactaacgaaattagaaaaaaattacagttttataaacatttggtacttatgccgctaaaaataaacattagaattatgccaattacaaatttaaaactttggaaacttaattatatcactgtttaccctaaataaaataaataaaaatgacttgcaataatatattttaattatttacttgcttacaatgactattcatccccaaggagaatcctcattgtctcgtttaaattccaactatacgtaaagaatgaatttctttttggattcttttagtggaatattatacagtacgtattacgtgctggattttaaatattttagtttatctcttaattaatttaatttgctcatatatatatacgctttacgaatttttgtttgttcttaattatcctgatcattatacaattattggttaatattcaatccacaaagaaaatttgatctaatataaaatggtgtctcagtactataaataaatttgaatgagatcatcacgtatatatttatatctatttatatatataatatgtatgctttattccaattttaagttcagatatatattgtgttatttattattatttttttgaaatggttgtgttatttattat

SEQ ID NO: 28273 - DNA, 2517 bp, Cannabis sativa
atctaagtttccatgtatgtggtagttagattacaacttggatcgttgcctgatcatgctgacttatgaattagaaggcttttcctatagaatgggcgactggcataatataggaagtcagggtaatgtggtcaaggctagtggcgatgggagaaattaggatttcccttgttcttgtagtcgaattagaagctataggagggttgttggcggaagttatgttgattcgccacagaatctgtaagattgggagtagaggtttgtagaaatactagctaaagcttagagacaaggtgagaaaatttagaggttttggcagcagagttcttttgttgcacctcttcctctgatgcctgttttttcatgtgtaggtgtttccaataggaaggcttatactgttaaacagattaagttattatataaaaaatcttgagcaaaaaaatttcatggagatcataggggtggttttggagacccctatactttcttgaaatatcctatttataagagacgtcattagggtgagtgtaacagaaaagcatgctttcgatgtggcgtaatcagacattataagagaaattttctacaattaaagatagaaggtttatgttttcagtatggacttattggtcatttaaaggagacttattctcagctacagaagaaagaagtaaggcccacttcagtttgggtggtttttattactcaggtcgttatagtggctgattcaacttttgtgaaaggccagcttcttatttctaactcctctcaatatgtattagttgaatttagggctatacattcatatatggtagctagagtggttgttggattggatagaccttgtgattattataatttagggtttgagaccctatcacctagtgaagaattcattatctccaaaaggtaagttaggtctattctgattgagggttgagattggtaaaaggagtgttgatcttgttaagttagtttaatgaactttaatattattccaggaattaatagattgcacgcttaagtaagcgatcaatgttgcctagaagagaaaagtattaactttttggtgggtagatgaaagaactttgggctttaaggaatcagtttggaactcttaaatcttgattatttcaatattgaagactggaaacttattcagagtaatgcttagggttttctagcagttgtgattgactctagaaaacccaaaacagttaggcttattggacgtcagagtagtaaaagaacttttaaatgtgttcttcccagaaagttattggaattaccacttgaattagttgtcaattgggttctgggagtgaaaccagatttcaaagttccatattggatagttctagcaaaacttaatgagctgaaagttcaatttgagggtttgaataagaggataattaagaataagtatctcttgccaagaatcaaagatttgtttgatcggttcaagataaaacagtcttttttaagattgattttcactcaagttattattagttgaaaatacaagaagtatacattccgaagattatattttatattagatatggttactaagattttggttgtattcttcaaactaactaatgcttcgataaatattatgaatctcataggttgagtattcaagggtttccttggtaattgtgctataagaattcatcaacggtatctttatataccttcatttagattcaaagcatgaacaacatctatcgatgattcttcagagagtatgaaaatataagctttaggccaagtttaagaagtataaatttcggttattatcaatgacgttcccagggcattttggtaatcgaagtggagttatgatagattcggaaaatattatttcagttaaggattaactgaaaccgaagacaattagaaactttctaaatttagctatgtaaaatcgttgaactgaaggaagtctttttgagattctcacgcctttagtaggagctagccaaggaaagccaagaatttggataaatcgacaagtgtggaattagattataggaagtgaagcagtgattgattatagtctaatgttaatcttgtcttcatacatgtaagattgttagttgttatgatgcctctgacagggtctggagtgtgtgttggtgaagacattacttaggcccttcattaattgaaggactatgagcaaatttatccaaaaaaatgagttaggattcactattgttatggttgagcaaagggtttggtagttttatttctacaaaaagaagtgtaggatctacgcagattattagaaactcaagcatttctttgcttaaaaagatttcatcataagataaaggctatcgtagttagctaaaaactatggttgtcgaattctttactatcctgggaaggctgaagtagtaggtgatggcctgagctagaaagatcttgaacaaatttatagtattacaatgatctctcctgagatagaagttgataaggtaaagtgaggataagaaaagtattgaattt

SEQ ID NO: 28274 - DNA, 1777 bp, Cannabis sativa
aattacatggtcagacaaacatgacaaattgtgtaattacctccaattccacacaaatccaattacattgtggctttccaaacgcacccatagtgtaattactataaactgtgtaattactaccctagtaattaccctacctagtaattacacagttacttccaaaacacaccctaaaaattttatcactatctccgcttatttttcatcaaagataagccagaaaatactttaatgagagtggggacggaacgaggacggaaggaagaatcccctaatagtaaaaataaagtttataataaattttttaatatataaaaatattatacataaaaattaaaatattatatattaattattattcaataaattaattattatttaaaacacaacttaaaattcataacaaaagatactaatatactaaaaaaatataaacataaattataaattatcaaatattactagaaatataaaataaaatactaagcgggtcctgttggggcggggagtgtaattcccgttccaccccatttaatatattcgggaacaaaaattaatttctatccctactctgtttctatttagacggagaattcttactcattagaggtgggtctctgcaggcccatcccatgagaaaaatgtgcattctagccttctaggagtctttttgtgtaaaataaataataataagaaaactaggacttttcaattggagtggaggccctaataatataagcggcccaactaatgtccagagcccaccctgctcatttcaaactatgaaatatagctcgactaaattaaaaaaaatgagaaatgctaaaaaaaaaaaccaatgagacaattaactattttttttttttgagtgtaggcaattaagtattaagtctagggatgtacacagaacagaaaattggtaggtagtgttcttcccatactattcttgttaaggattaacggcttattccctattgaggatggggcgggaaatcccctaatgagaatgaagatggggtgaggacaatgcgaggaattccctattaaaaaaaattataacaaaatttaaatacataaaaattaaaatattatacattaattattattcaataaactaattattatcttaaacacaacttaaaagttataaaaataatactaatatactaaaaaaaaaatacaaacataaattacaaattataaaatatcattaaaataataaaataaaatactaaaagggttctcgttgggagggggagcgtgatcctcggctccaccccatttaatattctgggataaaaaataatcccgattcttgttctctatttagatggaaaatttccgtcccattaagggcgagtcctcgcagggcccatcttatagagaaaatgtgcatccctaattaagtctcacataatttaaaataataaattttaaaaaatataactaactaattacaaaatattatcttattatggtattaaatatcattagtacattataataatgctcttaggaaataatcatatcgctccatagctaaaaaaatatttgttgttgttgaaggttaaaaactattttttaaacacaaataaagtgcttgacattgtttgctttagaaaaaaaaaggtaattgacattgtttacaaaaaataattttataaaacgaaaaaggtatttaacatcataacaaaaacaatattttttgttttcaaaaaataaaaactgtacatgagtttgacaccattctaaaaaaaaagagaaatttacatgg

SEQ ID NO: 28275 - DNA, 3789 bp, Cannabis sativa
tgacaattcgtgttcgcgagtcgtgttcatgtcgtgtcgaaattcatgtattataggtatatgcttgatttgaacacgaacccgtctaataatcgtatcaaaaataaaatccaaacacgcctcgtttataaataaattgatatggcacgacttgtttataaatagattttgtttaaacatgtcaatccatttatatatgaatgacatgttgaacacatttatgatatgttaaaatactaaaataacgagtcaaccccatatgacccgaacctatttaaggcaaactcaattccagtatctttcgtgcaggtttcaagtcatgtgatcttattaaactaattttgcttgccctacttacatatatacttactcttcttttcaaaaaataaaatatattattattaaattaaaataatttatataaaacctttatatcttatcttactattattattattataaaagtgtggtagctactaatttttttcagcgaagaaaatcatattgggcgtgtatttcgcgctctccctcttccatgacgaagaagaagcgtgtgatatgaaagcccatctaattgatcaaagctgagccgtttgggtctaagtcttttccatcgtctctcccgaagagaagctggtcgagacagaggagctgttagatgaggaactccctttgatccaggaaaacttagaagatacaagttgttatgagaaattccacgatacccatgaagacttagttgcagagctggttgcaccgccaatctcaacgctgcaacaagttagatttaagaattggggtgatgattatgagaaagctagtttttaatattctgtggtggatgcatggactaaattcaaggctaatcaggttaggagcccctccactaaatttgaatttactgaaccgattaaatatgaggatcaactcattgcaaagattcatgaggatgaaaagaactcgattatatgtgtggtcttgggagctaatcctccatttcaagttttcaaaggatttattaaaaaaattagggcaatcttggagttgagagcattgtccgaatgcattttgggtttacgctggtgagttttcgagatgaagctaccagatatttagttttggaaactagagtgattcactttgataaaagtcattggtgcttttaccttggtcctttgatctcgattaagtcaaaatggtgcaatcggttcttgtatggatttgtttaaatgggttaggcctgaaatattggggtatggttaggctaattttagcctactttttgagtgttttaatctctgtttctttctgtgaataatatttttggaatgaaattatgcttatttttcttattttagatttaaatggtaaaattcataatataaattgaaataaagagaaacatattaaatgagataaatatgatcaattcatcatagaattcagcgttctaagttataatgagtgaaaaattctaagttttgaatgctcaacacgttttgtttgtatttgaaaatcaagtctgaaacttcaagccaatttttaactatgatgtgtgcacttttaggaaaaatattgtcaattaaagttatatatctctctttcatctttctaaaacatcttgcatcatcaaattttgagcaatatcgagagagttatggctaaaatactattagtcatcgtatatgaatttcaagataaaaaaaatactataagctattggaattagcgtcgaggtgccctactacagaggagattgagtttttctgttagttccaagagccttggtcatgcatattgaattgcgaaaattttagctttttaagggcattttaggaatttcaacaaaaatggacttagggcttcacttttaaaagagaaaattgcaaatttcatatgggggagagaaaaatatgaaaaaggagattggagatcaagctttggagcaatgtggcaaccccaaatctagtttcttctcttctctttttggttttattatgttttctatggatttgattatgaacatgttaaagttgatggagaatattagctaaactccaatttaggaattttaatggagattgtttgaaacttcttatagattaatgctaattttatttctttcttctattgaggtatgctttatttatatttgtgcttattacatgtgtttgactggctattttatgcacgatctatgatctcaatacaaaatttaaaaagtcagtattgtgaatgctctaattgaataaacacaggttttgacacaaaatgatagtattattgtagtttttgggctattgcttaatgcagattgcttgtttaattgtcttagagatgcagtaattacccttgcaatttagtacattaatgtctcaaaagaattttggtgaatttataatccgctatcatactagatagaagaagaacattgttttgcattattgaaataggaagtggatgcaattgaagttaattttcctatattttatttatttattgattaaatcttgtttattgttttgttatttaatttttgcttcgattatttagtttcaaaatctatttatttgattgccaaatagagccaagaattcaattaattgatacttagctacaatcctcatgaaaacgatctcacttacttgagtattacttattataatgatacatatacttgtgtatttgatttatcataacaagtttttggcgctgttattcggaaactattttagttaatatcgagatagttaaattctattctaatttggtttcttctagtttattttactaatgttttattgaatgtatttgccttgcaaggtaaataaaaaatgctacatcaaaattttcttgtgagttttgcccaataacatagtgagccattctattctgcttgtggaggtttaatgagttggtagagagatgttatcataatttttcaagtgtgtgtcttattccgttcgtttggagcacctgggcactcggtgcctgtgccacttggtgatgatactagcgctcaggttgatatattgtcaacatgtggcacttccaaccacaatattaaagaagtatcctgagtattttattcttctccatccaaaaaaaggaatcaagtgctttcggaatagaaacagatcaacctggaggctaaaactaggacccaacacccaggttgacctcgtgctaagtcccagcatccaagttgacatattgtcaacctgggaaatttccaacaacagttcaaataaagtcttccaggcatattctccgttttcttcaacaattgagatttgagtgcttttggaaaacaaacggagccatatgggagccagaattgggacccaaagcccgaattgacatattgtcaacatgggccatttccaaacagtttttccaagaattcttactggcatattctttattttcaccaataattaagttacaagtattttcagaaatcaaacagaatcatttggtgataaaaagttgggcctagcgccaggttgacattttgttaacctgggctatttccaatcaatttcccaagcatatttttcattttcaaaaataataaagatacaagtgatcttggggagcaaactagatcatttgagggtcaaaacaggaacccagcatccatgttgacttgggcaatggggcctgggcctaggttgacctgaaacctagttcacatgtttatgctcctcaaacacaaattttgctagggcattcttcttattttggtaaaaagcagggtaggacacctcgttcacaatcttgaatgcc

SEQ ID NO: 28276 - DNA, 2917 bp, Cannabis sativa
cttatcactttattacttgtgtgactgcgtatacttgcgtatataattttcacaacacccatttttgtccaatcctctaagtttggcaaaatgatagataccaagataggtaatagtggtaggcagtagcccttccttcgggaatgattctgtatcatcttttcctccataaatacaaagagaggtaagatgaggtaatgtttgccaattccatttcatcctcaaaaatatatcatatgatatttcaagactagacaaattaacaggcagaccaccttcaccttcaaggaaactctttatcaacggacaacctttgatttccaaatacttcaaagctgagagggaactcatcttctgtggcaaccacttcaatttatggcaataactaatctccaactcactcagcttgggagcaataagtccaccatttggaaaagatacaaaactatcataaaaagagataattaaatatgttagttcctcaatagatttcccatctgacactgagagagcttcaaagtaggggctggattcaatctcaagagttttgagattgggaaataaatccatatggagggatctaacgatgatccacaattcctcaagttaagagactgaagaggagggtaatggtaatgtggagaaagagtggaacaaggattcctcggctttattacctcatacaatgactcagaattctccaacttccacattttcatttttgtgatacatggtaatcttgggagacttaataatggacactgcttatctcctctaattccaatacttattaatgaaggaaggaagtgaggcaaaactccctcaaacttaggacagttaataattttaagttttttgagattccattgctcccatgataacatctccctaaaccttaatgtttccaatgatggaaatggctttcttccagaacaattcccgtaaaattcagcacccaccgtcactaccgaattgcaacttgagatggaaagatgttttagcaaaggaagttgcccaaagggtggcaaataggagcaatgcttacacccattaagagttacttcaacaatgctgctaaacgaatcattcccaacccaatttggaaatattttgcctggatagtaattaatctcaagctccttcaatgttgtgttaggtgaaagcatttcaagcacaccctctccatgttttggatcaacaacagcatcattaacactccattctaacctcaatttctcaagttgcttcttctctagtacaataacttgatccggtgctttcataatatttgccacattttctaacttcttaatggaaagctcttcgtgtagactttgaagttttgccaattcttctattttagcgccactatccttccccaagaaaaaaaattgtcaaaatttggagatttgttaatttacttatttgacttggcatctcaactaggctattaaaaccactgatattaagatgtctcaaattaatgagatgatgcatatctttgggcaaagctttaagacggtgacgattttctaattttagtgtttttaaattgtataatacaattaaacattcaggcaacgtcacaatttcagtctcagaaagatctaaataacaaagatgttttaggtcaccaattgagttagaaaactcagtgatttgaagaccacgaaaagataaaactctcaaacatttcaacatcgataatagattctgcactacttcattagaattactagttttagaatattttgaacctgataatgttaaaaaagttcgcaaacgcgtagcttcaaaatcatagttagataccttgttattagtagaatgttcaattacaaatccgatgtgacgtgtcttcttctcaaacttaacaatgtcctcattgtgcactaataaagagttatactttccagaaacaattttagccaaatccacaagaagatcatgcatcacaaaacaagatatacctctccaatccatagattttatgaaaaatgacattgacactaaatcatcaaaatactcatcgccaacttcttccattcttctactcccttcggagtgcatgacaagattttctgccatccataataagaccaactcttgtctttgaaattgatagccttttgggaatattgaacaaaaagcgaaacaccctttcaagtgtacaggaagattgtagtagctcatttctaaagcagctggaacagtcttgctcctttcatgtgtcaactcccaaatattattccttgctatttgttcccatctccatacatctaatgttgatctcaagatgcctcctagaactttagtagctaaaggcatgccattacattttttagtgatttctctgccgatagtttctaattttggattctcaataaacattctagagtcgccactagaagcatgcttcataaatatagcccaacactcgtcgtttgataatggtttaagatggtgtatatcaacagttcgaatgttatctacaattttttgatttcttgttgttaatactattttgctgcctcttgccccaccattgaaaggcttcatcaattctgtccactgaacataatcatcttcccaaacatcatctaaaacaattaaaaacttctttcccactaacttatttgacaaattaacttgaagtaaattcaaattcatgtcattgcaagcatcacacggggctaattcttgaaggagagttttggtcacagttgtggaatcaaatttatctgaaacatacacccaagctctagattcaaacttcttcttcactctttcatcattgaaaagattttgagcaagggttgttttcccaatcccacccattcccactatgggaatgacacatatcttctcactactatcttcatctgacatcaacaacttcatcaaagcctcttcgtca

SEQ ID NO: 28277 - DNA, 2060 bp, Cannabis sativa
  modified_base (27)..(30): a, c, t, g, unknown or other
  modified_base (104)..(117): a, c, t, g, unknown or other
actaatcagattgtaaagagttttatnnnnggcataaaacccaacatgaatatgtacctttcctgcatctttaactttttgtctctctctggtagacctagagnnnnnnnnnnnnnntttacacttctccaaaataactaggaacaggctcatcctacttgtcataattatcaaattcagcattgcgcttggaagaaatgttggtggccaacttccttatttcatcatactcaatgctacacctttttaagtaaaattgtctgatggcttccatgtgttctcacacttcctccaacatcaatgtgggcctaggtggaagattgaaatgaggatgaggtaacgaagacaacactctcttttccttagacatctaagtgaaggtagctagaatgcctttaggtgttgggggtgctagaggaagatcttgataatccttgcttgatcgagtacttctttctcaacataccccacaggcacttgtcacaacgacacaacatcttgaataggttctgttaggtcagtgatggaagcaaataagtcttctagggctggagccttcggagcagcctcctggttcaaggtcggaggtgctagcttttgagatccactcatagagacataccccttcttgcttttgcctttaccatccttgggcacttcacgaactttgtcagctttatagctgatggcgtccaagaagttgttgaggagacccatttagaaactggtgggttgttctacaagaagaaagaaaacatatcacatatcaaattgtagcagatacgatcacaaatacaaattacgagataatgtgccaaaaagatccaaaccgtttatcttagcataattgattttttcccttgtaaaaaggaaatatcctctcgacctaaattagtctcatggtggaagaaccctggaaatagattttgctaagtacgtcaactctaacgtggtgatgcactggtggaacgaagtgatttgggctccttactatgcatagggtacttattattcttgtctaagtttaaaaaatatgggtcaaatcccccttgatatatactaaaatttgctaaggagggagccctaattatgcgaaagagtgtctcaccactttcagaagtactcgctcctagagcatcctcattttagactacgtccctgaaatgaattgtgagctcttctacttcacgtaagtcttctagaaattttcttttcaagtcagctagccactgtttattgaccttcacagctttctcttctagggactcaaagttgtggttttctccccgattttacttaaatctttgttatttgtgatgacagaaaaaattcccaaaaaactttttttctgaacttgaccgaaaatagcacaagttgacaatatgttaaccttgctggggccgagccctaagtgtcaacctgggcactgggtccccccttttgccccttaaaaaattccgtttggtccccaaaaatagttgaatcttaatattttctgaaaaagaagaagatgctcaaaagaattcatgaaaaactccattttaaatggcctaggttgacaaaatgttaacctcggcgcaaggccagccccaagtgtcaacctgagcactaagccctattatttgtacttaaaaattgttctttttcctctaaaatgacctatttccttgtttttgatgaagacaaaaaagatgcaaaagttggatcactaatcggacccttggaaggcacctcgattgatagattgtcaacctcggtgctgggtgcttggggccccgggtgtcaaaaatcaacttgctctgattcttattttgatggtgattcttaggttgatgtcccaatgcaagttttgaccattttgcagtgcgacagtcctaaaatttgaaaccctagttaaggatgtcaagttgggcgccaggggaaaccctaggtgacgaagttggctcccattttgcatgtgttggaatatgttttaccaggatctggatttactaccacgtatgttatttaacatcctaaatatgaatatctaaaataatgtaaataaacacataaagttt

SEQ ID NO: 28278 - DNA, 1430 bp, Cannabis sativa
ttttgtcgtactgatgcccgttctcttgctgctatcaagcacactttggatatatatagtagagaatctggtcaacttattaactatgacaagtcagttatgtcattctctccaaattcttctactactgatcagaatgctttcaatcttcttctgggaatggatattcaatcatgtcatgagcaataattggggttaccctccttcactggtcataacaagagtgaagcttttaatgatatcaaaaatcgcctttggaaacttctcactgcctggcaagaaaaactcttctccattggagggaaagaaattctcctcaaagttgtggttcaatcaattcccacttatgcaatgagttgtttcaagcttcctacttcattttgtaacagtgttgaaagtatgatggctcgtttctggtggagtttcaaagttaatggtcattcaattcattggaaaagatagaattatatgtgccgaagtaaacaaatgggtggccttggatttagatcatttattgactttaatcatgctctccttgcaaaataggcttggagattgtttgataaacctgactcccttttatttcgcatactccatcgccgttacttcaatcgaacaggacttcttcaggctcagttgggtaccaatccatcttatacttggcgaagcattcattggggtaaagaacttctccttgagggtctttcatggaaaattggctcgagctcctcagttcatatcactgattcttggttgccacgatataccaacttcaaaccactccatgtcaacaatgttgatcataatttgcgagtttctgatcttatttcatcagaccgcacttggaatatcacagcccttaaatgacacttcctcaacattgacattgaccgtattttgcagctacccttatgccaatatccacctgaagacaagcttatttggcatcacacttcgtcaggtatatacggtgaagagtgggtatcacttagccacttcactcagggaaactagaggaccttcacactcccagtcgccaaccccttggtggaatcgtttttggaagcttaagttgacttgcaaagtcaaaatttttgcttagcgtgcaatccataatgctctaccccttgctgccaatttccatcacagacacatcattgatgacccttcctgctatcgatgtcctcaccacaccaaaaccttcaaccacacattcttcctgtgcaaagcagtgaagaacatctggtatcagcttccctttcatatggattttacaggattaccacaatcaagcagcagtgatttcctccatcttcttttctctcgccttgaagatgataaacttgagaccgtacttaattgttgggaattattttatcaggatcttagatctactcaagatcggaagagcgtcgtgtagggaaagagtg

SEQ ID NO: 28279 - DNA, 4811 bp, Cannabis sativa
aaacatcagttctacagttgctaactcatctgctgcatttgatcccgattgtcttgttgctgatcgtgaaactgtgcatcatgatcctgctgttgttactggtgcagctactacacattcacttcctgcaacttctgttactggttcagctcctgttgcagcaagtaatactcactcaatgcaaactcgtgccaagactgggatcaaaaagccaaaagcttatcttgttactcagcttcctacctctctcaaacaagctttgcagcaactaaagtggaataaagccatggccgatgaagttcttgctctcaaaaagaataaaacttacactcttgtcaagcttccacctggtaggattgcaataggctgcaaatgggtctatcggattaaagaaaatcctgatggtagtgtcaacaagcttaaagctcgattagttgccaaggggtttcaccaacaaccgggtttcgatttcacagaaacttttagtcccgttgtgaaaccagtaaccattcgtgttgttcttactcttgctctctcaaaaggttgggacttaagacaacttgatgttaataatgccttcctaaatggtgatctacaagaggaggtgtatatggtccaaccccctggttttgaagaccctactcatcctgatcttgtttgcaagctacataaagctctatatggcctcaaacaagctcctcgagcttggtttgagaaactacacagctgcttgctcaatttaggctttgtctcctccaaatctgatcatagtctctttattagacacacaccattatccatgacaatcatccttgtctatgtggatgatattatcattactggaagtgattccaatcttatatctcattacacagcagccttgaatgcacaatttagtctcaaagaccttggcaagcttcatttctttcttggtattgaggttaccaatactgaaacaggtcttcatttatctcaagctaaatatattagagacttactccacaaagccgatatggatgaggcaaagccatccaacactcccatgatcagtagtctaaagctctctgcctatggaagtccaccagttgacaatcctcaacaatatcgttctattgttggggccttgcaataccttgtcataactcggccagagatttcttacagtgtcaacaaagtttgccaattcatggcaaaccccttgcaatctcattggaatgctgtcaaacgcattcttcgatatctaagtggcacaagggactacggtcttcatctaactcgatcaccacattatgaacttactgcattttgtgatgcagattgggccacggatcctgacgaccggaggtccacatctggttttgccatctattttggctctaaccttgttgcctggcagtgtaagaaacaacacacggtctctcgaagtagcacagaagccgagtttcgaagccttgctcaaacagtcaccgaaatcacttggcttcactcattgttcactgaattgcatattctgctgcccaaagctcccacgatctggtgtgacaaccttagcacgattcttctaactgcaaacccggtcttacatgctcgtacaaagcatatagaattggatctatactttgtcagagagaaaattgttcagcaaatggttcaagttaaacatgttccagcctttgatcagattgctgatggcctaaccaaaccaatctcaagccaactattctctgtttttaggaacaaactcaccattggtgatcccaatgctaagtttgagggggtgtgttagggatagttggttatagcttactgttgagttagttatttctgttttggttgttatgccacctgtcattagtttgttcagctggcagctttgttttctctcatatataaactcttgtaatctcacacttaatggatgatgagttctctttgttcatctcactctttctttgcctttctttgtctttctctgttttcttctcctttgttcttgtttgttattcatggctaagaggtttaacacctctaacatggtatcagagcaatggccgccattgcaggcaaacatggccaccgtcgatcctgtaaattcgaactctcatccctcacatcaaagagcaccagctgctgctacaagaaatcgaaccagggaaggagatgatgcaactgtctacttcaatcactcaatttcgattaaattgaatgatcacaactacttactttggaagcagcaaatccttgctgcaattcgtggaaatcggctgatgaggttcattgaagacactactccaccgccacagtacctgaacgatgctgatcaagctgccagaaaattcaatcctgagtttgtcgattgggatgttcaagaccaactgcttgtctcttggctcctctcttctatgacagagagtctccttacaagaatggtgggctgtaattctgctagacagatctggaaagcccttgagcaacactacacactgaaggtttcctccaagattcttgaatttcgaacaaaattgcagaaactaaagaaaggtactctgagtttgaatgattaccttctcaaagtcaagcaacatgtcgacttgttggcctctgttggggaaattctttcggatcgagatcatatcgctgccattttcaaaggcttacccagcgaatatgatactttcatcatctccaccaacacaagaattgaaggatacacagttggagaaatcgaagctttacttcttgcatctgaatctcgaatagagaaggaggatcaagaagtagagttcagtgctaatatggtctctacagatcaagatccagctatggaagcatttcttgctcaatcaaatcgaaatttcagaccatttccctctacccgaggtcagtacactcccaacaatttcaatttctctaacttctcttctcctaatttcaacaccagaggaaactatcgtggatctccttcacgaggatctagcagcaatcaaccttctttcatgacaagaggaagaggcaatcggttttctcctggccagaacaagatccagtgccaattgtgccacaaaattggtcataccgtaattgattgcttttatcggttcgacaaaagctttacaggagttttccctgctgcagaccagtctcaacttcaagctaatatagctcaaacaacccaaggaactgatgacaattggtatcccgactcaggagctaccaatcattgcacaccaaatggccaaaatattatgacaccagctgagtttgagggttcagaacagttgtatgttggaaatggagctggtcttcccatctctcaaattggtaatgcctatctcttatccaattcttgcaataaacctcttgttcttaccaatttactccatgttcctgaactcacaaagaacttgcttagtgtttctaagtttgctgctgacaacaatgtctattttgtgttttatcctaatgtgtgttatgtcaaggatcaggtgagcaataccacactgctgactgggagacatcacaatggcctgtatacttttgatcctagccaaattcagctgtctgctaccccacctctcagtcatgaccaacctgtccagccctctgtacatgttgctaccactgcctcttcccagcccaaccaaaatatcagcaattcctctctgtgttttcagtgtaacactagctgtagttcatttgatttgtggcacaatcgccttggacatccctctgagagggttgtcaaaactgtattgacttcatgtaatatacctcatatcaataaaatgtccaacagtgtgtgtaaagcctgttgtttaggcaaaattcacaaacttccctttccaaaagtttctgaatcatgttacaatgcccccttacaacttgtgcattccgatttatggggaccctcattcaccacatctcacaatggatataaatattatatacactttatagatgcctattctaaattcacttggctataccttctcaaaaataaacatgatgcaatcaaagtgtttcatatttttaaagctgaagttgaattacaattaggcaccaaaattaaagtgtttcaatccgattgggggggtgaatatagatccttcactgaatctttacaacaggctggtatattacatagaaaaccttgtcccactactcatgaacaaaatggaactgctgaaagaaaacataggcatattgttgaacatggtcttgctcttttggctcatgctaatctacctttgaaatattgggatgaagcttttaggacagctgtataccttcataatagactccctactcctatcctctctcacaaatctcccatacaagtcctgttcaacatcacacctgattacaatgtccttaaagtctttggttgcacttgttatcctaacattcggccatacaataaacataaactagatttcagatcctctccatgtatattcattggctatagcttaaatcacaagggctacaaatgtattgatcaaaatggcaggttatacatctctcgagatgttatttttgatgaaaattcctttccttcaactcatcaaaactctcaacttgactcacctattaatgtcatgtctggtgcacattctaaaattcccactgctactacttcttacactgtcagttctttattttctgatgatatttctatggcaccaactgactcttctgctccattgttttcttgttctcacatccttgaggatgatacaacacacatttcacaggaatctggttctccaacagcttgttctattccctctgctcagcctgttcaacagcag

SEQ ID NO: 28280 - DNA, 3639 bp, Cannabis sativa
tattaccattgctattggtaaaataattaaatatagggctacacatgttgtgttagtattgggcacactaatatttaatgagaatgctctactaattatgttaccaactattgaaaaatgttggtatttttgcaaactaataagtgtatatttcaaagaacctgtttttaaatgggtaagtaatgtagttgtaaaaaactctttagatgactcattgaaacattaatcatagtaatttgacctacttttttgtcttgtctatgtttgttaagtttctaatgaactagatttattgtaaatctatgtttcactttcatgttgagaaagttgttaataattactaatcatttttttcattctaatttatagtgtatttaatcaaatttttattatgtttcttatatacacctaagtttctagggtgaaacaaattagcgaccaattagttcttgtcttttattttgtcaaaaaaaaaaaaaaaaagaattcttccaagtttataattattgtttataaaacaaaagtataattatttaccaacaagttacttatagttcaagtttatttatcgacatttccagttgtgagataaattacaagtagctaggtagagctagttacaaatatttgtaaccataataattgggtaatttaaagtagctagttcactacaagtttaagtagctagtcacaatatttgtaaccataattaaaataccgataagaacttttatttgaaaaataataattcggaacattaacaaaaatatcgaaaaaaaaaatactcacgaagtataaaattatccgtagaataatgtggtcaggatctggtccttagaatcctcaaacgtttatgaactggcccaaaattagcccaaggaaaagcccaaccagctgtgtaaacttctgacgcacaaaaatgtgggaaattaaaaaaatatggaattatttcacaaatacacaaaaacaactaaaaaaattacaaaaatacagtttcacggaattttaaatattttttacgatttttttaattttatttacagaaaatatagtctttttatattgtactcttgttaattttttgttatttatatgttattttttgttgttgttttgatgttatttatatgttattttcatgttacttttatgtagttttctttttcttgttgttttcgtgttattttaatggaaaccgtataaatgtaattttttttttaaacgtaagaatataattttttacaaaaaatggtgctttatgtaattatccctcaaaaaattggtttttttttaatttttttttaataaaatgcgtgcaagaatatttatatatatttttatatactaggttgatgttacgtgcaatgtatgtataattagttttcattttattaggtttaattaggtgatattaagtgcaatacatatatgtttaatttttttaattaaataatgtattttttatattacataactcatatatggaaaactctattgtggcaagtttatttatattacataattgtgagggttataaatgattttaaggttgtgtatatatatgtctaacaacacatatgattgttgcattacagtttcattcagatttttcatagttgacttactatgattgaattttcaaattgtcaggaatcataattcattaaacttttagttgcaatagagttgccttgtcgttagcatttgggtttgtcaatatttatatattgattattgtgatcaaatgtgcaggtgaaacttataaaggacaatatgtttgaagtggtacattaaataaggttatggatgatgaatttaaaagataaaatatacaattgcaatagattccaacaagacgaactactatgtgctcatgctcttgttgtgataaaagagatgaacttaaacgtttacagttactgttcacagtattacacaactaaaatattgcttgaaaaatatatattttttctttgaaatatatgtgatttatttatttatttttttttaaaaaagtaatagtttggctaagcatatttgtcaataatatcactacaaaaaatattagtcacaataaaatttgtgactaattataaattatcattcttacattatgactaaaaaatctgtgaataaaagtattagtcacaaaaatcataatttattgtgacaaattatattttagtcacaatacttgtgtgactaaaactaaattagtgacaatttgtatttaaatactatgtttagtcacaaataacttttttattttgactaaaagtcaaataaagtcataaaataaatttattatgactaaaaagttgtcactaaaaatagttttttttttgtatgtaaatttttgggagagttttttttagattttttgcttatatgttttttgaaataataatttataaaggtattttatattttagttttttgtaataatagttagaaaagaaataaatagagattctagacttactcgttagcttcataattttttttaagaaaattaataagtaggagatgaaaatatttatatcaaattggaaaatataataagacaaatgcatgatacacaataaaataaataaaattattgaacgagattaattacaaaataaaaccaaagaaaaaaattaataaataataaataaataaaaaaaataattcatgaatcatacacgtacaactaaactaatatagaattaagatcattataatcaattacaaaaagaacaaaaattcattattattctgatataatatcactcaaattgcacaatctggaaagatatataaattatgtataaaaaattagtaaaagtactcaccatgcttaattaagtaaatatttgatgagaattaaaaaatagatttcctccattatacacacattcaatcaaataatttacatatataagacatgtattttggagttgttgctgaaaatatagaaaaaaaaacaatactttgtgttgtgtgtatcgttttaatttgtgattcttcttttagtaagcatggatttataatatgtataattatatatctatattaatatttacctatgaaatatatggaatcaatacataacaaacagttaattaactttagattaaagaagaaaataaaattatatatatatagttgacttacattaataatattaaaacttcaaacatgtttacgatgacagtatagtctgccttaggaaaaattaggcttccaaaattcagaaagaataatgtaaaaaatataaaaaatatgagaaatgagataaaaatcaaaggtaagagataaagaaaaaggaagggtgttgtaaatgtaaagtaaaaacgtatttagggttagatttagaagattcaagtgtttttagttatattgatcgaataaatatatattctaaatattatattgataataattaaattttaactaaagtatacggtttttctttttttttttattcgaaagaaaaaatggaaaaattaacttagacagtgtggttgaaaataaatttgaaatagaaaagtaggtatttaaaagtattaactaggtaggagttacgtgccgaggcacgtaaatgttagttttaggtaaagtttacttttttttttccttcttatttagattgtatgt

SEQ ID NO: 28281 - DNA, 3211 bp, Cannabis sativa
  modified_base (2238)..(2242): a, c, t, g, unknown or other
tacaatgccaatgtatccaattttaatgttggttcctaagaaattataatttttatgatatattcattgaattttgtttataaataaatatattttttgtgtgcttaaacaagagtataaataattaattatggtgttgtttggtaaaacttttgttttctaattttttaatcataaaatgaaagtaaaatttttatttttaaaagttttgtttttgaaaaacaaaaatgttttttgtaactatttttgtttttcaattttagaaacagaaaataaaagagtgttatgtaaagttcattttcattttttgattttattaagttgggtctaggttcggggttagatttaggttcgagtcagagactgagttcagcaccagggccgtgggagggatttaggttcgcgactgatcagagttcaaaatattgattaaagaaaaaaaattgtttaaaaaaatattaaaagtgattttttttttaaaaaaaaaaatttgatttcagttaaaaaattgaaaagtgataacagttttatagaatatgtttcaaaaatgcgccggcaaaagcatgttttcttgtagtgagagtatttctttcattaggcaattattatagctattagtagccatctcttccagtaaattaatggcttcaattgtaggtttagacaataacgctcctccagcagcagcatcaataatagtcctagttggcccattcaacacattgtagaaaattaaaacttgcatcctgctctcatagccatgttgtgggcagcgacgtaataagtctttgaatcgctcccatgcttcataaagttgctttgagtcaagctgtctaaattgcccaatcacacttctcaactgtgcagactttgatggaggaaaaaattccaccatgaactttttggccatttatcccatgtaataatagaacctggctgcagagattgcaaccaacttccttctctatcccttaaagagaaaggaaagagtcgtagtcttatggcatcatcaataacaccattcatctgaacagtagcacatacttctagaaatatggctcgatggatattgggatcttcagaagccaagctacaaaactaattctgttgtaccatattgattaaagtaggcttcaattcaaaattattagcagcaatgattggattagcaataccagtcagatttttattcaccacaggtaagcaatgtggttatgcatcagttgcagcaagtgctggttggttgttattaaggttattgttgttattggcttccatggtgaaatctagttttttcttcgcttttagctgctttagagttcttttaatctcaggattcagcagtatgagtggtgtagcatttcgatttcttcgcataaactgaaccacaaagcaacaaacaaaataagaaacaaaataaaatttaatttaaagcaaaaactttcagtaataatattagtaataatttaagaatttttaatccccgacaacggcgctaaaaatttgatacacaatttttactgcaagcgtacaatgttgttatagcaaagttttaatacttaaaaagttgtcgaacccacagggattgattattaaattttaataattattatactttttaatttcatacttaattagataacacaaagtaaattataattaagaaacaaataataagataaatacaaaaataagtaatagacaaagaacgattttttaatagaaaagtaaaaaataaagagcatgatttcaaactatgaatctaaatttactgattatcccaatttatcctataatttgtagtttcaagaatcctaatgtaaccgattaacttctctcgtgcgatgatagatttaactcaaattaactaacacgatatctatattcaatgttaatcaaataatcactcatagagcaatatgattctctttaaatgaaactcatagaattagtggaatctctcaatctcacacttttcctatgttatgcaattctaagtccgattttagattacctctctcaagtatgaaacctaaaatctctatactaattaatggtcatcaagcataaagaagatgataattagcacaaaattgcataaacaaataacaagaacaaatatgggaataatctaaaaacttaaagtcataatctaaaatgttccatcaacactctagaatgaatatttagttcataattacaaacataataaccacaataatcatgttcataattaannnnntaaacaaagaataaagaagaagaagaagaaaagaactctaatgatgatagttgatgatgattacttgaagtgtcttctctcttgctcttcaatgttttttctaatctcaaagttacttgtttctatctctctagtcgtccctcaatacgatttacatgcttccttatataggccaataaaaatagatcaatcctcttagaattaggatttttttaaaaaatattaagtgttgcgctatagcgcctataccctgcgctatagcgcgcctaagagaaaaatcccaaaatacccacgtgctgaaattatgctttttttttggtaaaaaatcttttttttttccagccaggagctatagcgtagaccccctaagctataacgcacatcaccaattttttctacttcgaccttagtcagtaaattatgcataacttttgcgtccggactccaaatgaaatgatttaacatgttttggaaagctgggaacgagctctatcattttcggtatcataagctctttgataaaatgatgaatacattgtcaaaaataggctcaaagatctcagtccatcataaaatatcttttcaacacaaacctacgcacttggagaaaacacatcaaatctatacaaaaataaatactaatctatctaataattgactaaatgagtgtacaaatgtgcactcattgcatccccaaacttaaacaattgcttgttctcaagtaatgaaaaaaaaaaaaaaactaaaactaaaaactaacaagtcaattattggatgtaaattaagaaacttagaccaacggtaatttatgtgtaaaagacttctcttaccataaaacattcaagataacattaggcttgtataaccaatttatctccactaatgtaaaccaaagtcatgtagatcaaaaggactttataggcatgtaacgttaggcttaggttgtttggtgtgtgtgtgtgtgtgtgt

SEQ ID NO: 28282 - DNA, 2263 bp, Cannabis sativa
cttccttgcggggactgctttaacgaagtaaaaataaactatttcaagaggagtggaacactcccatcataaaatgtggtacaaaacctttagacttccaagaattttgtaagaaattggaacaaactgaaaaggggaaattccaaggtagttataggactctttgtggtactctctcaaggggagaactcctccagccttgatgtgctcgaggatccaaatgcctatcccagacgagccactagtatttgtaccaccgcactcctcccgaataactctttctggggggaagcagctaaattccgctggagcaacagatgtgatacgacatcctcgcctttaatctatgccgcaggactttagaacaccaccaacgtattctccaatggttcttactttggattcaatgagttcaacttcaaaggtgacattggggtgctgtggggtcttcgatttatgaggcttagtagacataattttaaaatcaaggtcacctgataaaaaagcaatagtgagttgaggtaaaaatattggtctcgctaatggaataaaagataaagatcgatgttcacgctaggctgcatctcgcaagtaatgatgtttaccctcggttaactcttgtagaaaatgcctatagcgactagcaactttatcctaattggtttttattaaatggtccctaatttatgcatcatttatctcaagtttggattgaggtttctggatttttggttttaatggaagggataattccttaggacattctatttctaagaattctggattataaacttcaaaacaagattggaacatttttacaaaaagaacaatcccaattccttgaagaaattgatttaaatcagaagcttattaatacgataaccctaagtttttctctgattaaaaccctagaaattacccaaaaaaaattaaatcgaaattactaaaaccaaatgaagtgaacaataatgtgattaattacaaaaccagaataccaactcaagaataagaaatacttgaaagaaaggaatgaaccacttactgttcagaaatgggttttcacataaaggagaactctgaattgaagttgagatgaatggctaagtgtactctaggaactctcgaggttgaagattagatccgaagaaacttgcaagaaatagttcaacgataaagagggcatacaagggttcgaatgatcgaaaatgatttttacagaaaaaggttgaaagtttcaaaaggtggaaatggtgaaatggtgattttctctaaagttttatactctaaggttgatcgcctgattaaaagattaaagatctaacggttaagaacaagagcgaattagaaaagatggataattaatgctaatgatgtgcctcgaaatcatgaaccgccaaaattcaaggcatgcaattttctaaattgacattaagacaaaaatacccttgtaatcatttaaaaagctctttttattaaaaaaaaaaaaacttttaaaggggtaattgttatgcccaaaattcggctacacttcagagggtgacacttgtcggtttgtggcaaatgaaccacatggtataataatattatataatttaatgcaaagaggaataactaattaaatatataattaatagagtatattcagaactcgctgactgtatagttttgagcgagacaatgatacaaaactattaatatctatatcaatgagacaccatcctacctcagaatacacagatccaaggacaagatttatttattttaagggagtaagtgaagttgctcaaaacaacctcagacaatatatagtgaggcatccacctctctattcataagaaacttgatggggcgaatcatttatcaacacttagcgtattttccaaattacaatagctaaggataacaacttggaaatatgcaagatatgattgtctagtctgcaaggccttatggtcaaagagcagttcttaagtttgctcagtacactggtgctcttgccattgctagaaggcatatgatagtccaaattggtattaactatctacaagttaagtgagatgctattgttcaaatcagcattgaccatctttgaggataatgatgagaagcggttaagcagttatcaagtattatctagtaaataattcaattgaaacgttggaattaaccacgtttcattaaaacggttatgcattttgaatttaaatgtaaataactaccaacctatattcttataaataggggacagatcccaaaaaaaaaa

SEQ ID NO: 28283 - DNA, 3180 bp, Cannabis sativa
aaacataaaaacaaattgtacttgctgcagatgtagaatgagggtgactattgagaaagatattgaatgattttgattttggttgtttttgtgtttataataattgtggataggatggcaaggagttgtggaggagaataatcaaccaaaaacaaagggtcccgttgctccaactgtggagggaggcatgactcgttaaatatgaaggagatttcaatgattgcatcaaatatgttattatcatagttatatttatttttagttgttaaattattattaaatagttgtgataaattatgaaattaattaaaaataataaaagaagaagtaattataataagagtgtcacttgtatttgtgtttctattaataagagtgtatttatgtttttgtttaaatattccacttcaattgtatgcaagaaattttagttgctttactaaaattataaatgagtaatgaaagtaaattttataatgtcacttttcaaaataaataaataaataaaataagatgattatgttttgttattattactattttttaatggctttccaaacaaagtattaagaacttagataaattaaggtctaaaattttattctaggggtattgaaaactttcaaaagtgtgattggtacaatatccttgttggtcctctttctctcttctaaggttggagaggatccaatctgattcaattgaaacgaattaatttgaattaatccaattcaatctaattataaaaaattagatattcaattacaaaaaattggatatccaattagaattgaattggattgaatgacaaaagttggatgtctaattatatttgattgattattgattattgattattgagtgactattgagaaagatattgaatgattttctaaatccaattactaattagattggatcagatgaggaaaaaaagagttggattagatcagatgtccagccttacatcttcataagttggcttgcaagagaacctaggagtttttttttaagagaattcacctctaatattgttgttggtttttttttttcatttttgttcttagaaatttcgcataatttttggtgagcagaacaatcttttcttcatctgggttctcaagggattcctgcaaagagattttcgatcactttatgaggtaaaactataccacttgcagctttctttttctggtaatttaagataaaaaatgaataattcaccgagtagaaactatatttcaaatattctgtttcatatatgtaaaataatattcaacattataactacgtatgcagagttagaaacacataaaaatgatctgtataactataggtgcatttgtaacactttcttaatagttttttattttttttatttagaaaagtgaaaatatttttagaaaacacgttttataaaattgatttcagtttttaatttaacaattttgaaaaacagaaaaaaatcacattcaaaatttttttgaacatatttttttaattataatttatttgtattttcgttcatcaatattttggaccctaattccggacccggttcccaaccttgaacccaaacccagacgtgagcgttgccccggatctcgacccaaaccctgactctggactcgagtctcggacccagacttggacccggatacgaaaccaaatcccgacctcgatgtcggacattgacccagagttagacccgacttaaataaaaacaaaaaacaaaaataaaaaataaaatttacaaaacacatttttgttttttgtttttaaaattaaaaaagataaaaatagttttaagtatttttattttttaaaataaaaaattttacttctagttttataattaaaaaattaaaaattaaaagtattactaaacgtcacatatatgaatacacttatttttaagactgtggtgtaaaattcctacttcaatcatggcacatagacatagtgttttgcttcataatattaactttttttttttaaaaaaaaaaagacaaaaaaagggtaggtgcatatgtagaatgaaggtgattattgaggaagatattgattgattttggttttggttgtttctgtgtttaataataattgtggcatggagttgtggaacacaataatcgcgggaccacaaaggtcccgttgctccaaccgttgaaagagacgtttggtaataattttatttttttttttaattataaaaataaaagtaaaatttgtatttaaaattttattttttaaaaataaaaatgtgttctataatcacttttattttttaattttaaaaacaaaaaataaaaatgtattctataatttatattttttttatttttaatttttgattttatttaagtcagacagggtcaaccctgagttaaaatgggtcatagaaaaaaaaaattagactcttactataaagataaattgtatttttaaaaattattaaaaataagtatatttttaaaaggtattttttttatttggacccaaaaattgagtgggctctaggcgcgggcctagcccgcccatacctagggccgaccctgaagtcgggttcaagtctaggtttgggcccaagaccgtggtctgagtacgggactggggactggaccgaaatccatgtcccaagatccaagtttgagttgaagtcaaaaatattgattaagaaaaaaaatagtttataaaaattttgaaagtgatttttttaaaaaaaaaaaaaaaaattgaaattttaattcccaattaaaaaatcaaaaagtgaaaaatatttttacttttttaattttaaaaattaattaaaaaatattactaaatgcactcttaataaaattgtatttatacttttagcacttcgtatttgaaataatattggaataatttttgcaactgagcttaaaatattctacttcaattgtatggaagaaattttagttgtttaactaaattaaaaataagtaatgaaaatcattgaaagaaaagtaatgaaattaaattttagaaaaattctataatgcaccctcttaaaatggatgtatcgatacatatgtatctgttctaatatctgaaataattttttagtcaaattttttcttatggtcatgtaaattatagttatttaagatatcctgtaaaattttaaaaaatttgaaaaagtttaacacgccgaaa

SEQ ID NO: 28284 - DNA, 1479 bp, Cannabis sativa
ctaacactcatttaatgtaccctgggacccatctaatgtaccacggaatacattccgtgaaagtacattacgggacaaaatcgtatcccaatatatatatattcacaagggtattattttttttttttgcaattattatttattatagaagttatttaacttttttaaatatgtatgtaaaaattatttttcaaccagagtcaaagattgacctttaactaagattgacctttaactacctgaattatgcatattacctttctgtcacggcctggagatggtaaactatattttcttcccaaaaaaaaaaaaaaataaacccctatattagtaaaaatagtgttaattcttaccttcaccaataaattaaatattaaatttggatgatcagtctacgcacagcacaagttgttgtaaattaaaaataagataatcataattattataatatattatatattattacaacatcataaaatgacaaggtacattactgagagactccattcaagtggctcatgttgaccttgttttgtaactcccatgctctactttagcctttatggtaaaacaaaacattgtcagataaagtttggctttggggtttgagaaacctaattatattattgtcttgttcaataagtacacaaacaaattccatataatatatttatagcctaattaacttgtttaactttttacagaataacatgatgggcaatcttagtctcagatactgccactgctcactgtgttccacgtcttaagctgctcaatttactgttttttatttttattattttagtttatttttaatattataagtccttaaattatataaattttagtaatttagttgctaaatattatttttttgcaatttagtttccaaattttattttttgataaattaattttcaaactatataaattttattaatctcgaactttatttcttaataaattagtccccaaactcttgtttttttagcaatattaagtctccactcttaaatatatatatatttttatttattttatatactttaattttttgtgttaaattcaaataattttatctttttaattttaatattttgataaaaaattattattttaatatttttattttaatttattattattataatttgataatgataatgataataatactatcaaaaatttaataaaagatattaataatactcaaaggtacaagttagaatttgaaagtgtgataaacaatcaagctaatacaataaatattgtaatttttattactgataggtataataatttatagtgattaatttaattaaatgactcaaattaattcttgaaaacttaaacataattaataattttttatttataattagttctaaatattactaattagctttaactaacaaaactctacacctaactgttgggttttgtgccctaagtaaaaccctttacaatctgattagttat

SEQ ID NO: 28285 - DNA, 3755 bp, Cannabis sativa
tgttgaatgattcgaattatccatattggaaggtcagaatgagagcattcattaagtcacaagatgagaaggcttggagagctatacttacaggttggttgcgacctactgaaaatgaagataaaggtaatactaagataaaacattaacttaattggactactaaagatgaaaaattatctggttataacaacaaggctttacatgctatttttaatggtgttggtgaaggctttattaaattaatttcatctcgtaaatctgcaacgtgtggaaaatccttcaaactcagtttgagggtattgctgatgtaaaaagatcacgttttaccatgttacaaactagatttgatgaattagaatgtcagaaactgaaactttgtctgaattttatgaaagattatctgatatttctaatgagtttttttccttgggagaaaaattagatgaatctgttttggttcaaaaaattatttgtgtgcttcctgacaggtttgacacaaaattgctagcaatggaagaggtaaaagattttggcaaaatgaaggttgaagaactcatgggttctttaggaacttttgagttaaatcaacaaatcaagagaaaaggtaagcaaagtatcttgagtgagaaaaataaaggtattatttttaaagtttctaaaaatgatgtttctgatgatgaaaatgatgatgaaatagccttgttgacaaaaaaatttcaaaaatacatgaaatctgttagaaacaaaaagaaatttttcaaaaactccaagtggtaacaattcaggtaacaatctttctaaaccttttgtcatcaacaataaaaagggtattcaatgcagagagtgtgaagggtatggtcatattcaatcagaatgtgctaataccttgaagaaaataataaaaaaaaaggttttaatgttacttggagtgatgactctaaaagtagtgaggatgaaaaagaaaaaattactttaacaagtgttttgtcaagtgatttgtagaaaaaaaaaaagaaaatttctatgtttgaataacactttgactgatgtcaatgggaaagaattgagatggatcagacttagatgagtcagaacttgatgagaactctttggttgaatcctacaaggtaatgtttggtaagtggttggaaatttatgctgaaaattattccttggttaaagtcaataaagatttgtgtcacaacatccaagatcttgaagaaaaaaataaatattgtgaatctaaattgattttaaaagagtctgaaattacctccttaacaaaggaacttaaaattcttaaaagaaatgtcaaaatgttaaatctaggttccaacatttttgaaaagattcaaagttctagtcaaacgagtcatgctgatttaggttatgtttcgactcaatctaaatctaataccaaatttgttaaatctaatatttcggtttctggaagttctatctctaccttgcagggttctgttatttaatgggtccaattcaggttgaaagtttgaatggtaagacgtatatttttgtgtgtgttaataatttttcccgtttttcatgggtagactttttaagagaaaaatttgatacttttgtttgaggttttcaaatctttgagtttgaaattaagagttgaaaaagattgtgatattggtaagattattcgcattaggagtgaccatggaaaagaacttaaaaagactatttatgatgagtttgcaaatctaatggtttttctcatgaattttctgctcctaaaactcctaaacaaaatggagtggttgaaagaaagaaccaaattctaatagaattggctaaagtaatgttgaatagcaagaagctcacaaggcatctttgggtcaaagcaatcaacactgcttgctatactatcagcagagtgttcttacgtctaggtattcacaaaacaccgtatgagatctggaaaggtaataaaccaaatgtaagtcatttccatgtgtttggttgtgtttgttatattttgagagatcgtgattacactggaaaatttgatgcaaaaagtgatgaaggtatttttatgggatattctattaatagtagggcttatcatgtgtataatatgagaatcaaaactgttatggaatctgctaatgttattgttgatgatctaaaggatttgtctgagttttcaatagaaaatcagattgaagaattactggaaaagccttctgccgtagaaaaagaatttgacggagccacaaaagttgtcgctaagactacattgcaggactctatttctacagatgcgaattttccagaatcttcagcaacaaaagaaattgaacgtccctcaaatacaatcactgatccaattcagcgcgaaccatcctcaagggttaaaaagaattatccttctgatctcatccttgtaaacttggatgaaagcatggtaacaagaaaaaaatttgctaatataattcaattcttgtgttttgtttcttctttagaatcaaaaatagtgaaagaagccatgatggatgaagattggttcctagcaatgcaagatgagctacatcagttcattcgaaacaaggtatagacaatgattccaagaccaccattcgtgaatatcattggaacaaagtggattttcaaaaataagagtgatgagtttgggacaatcattcgaaacaaggcaaggttggttgcccaaggatacactcaggttgagggtattgacgttgatgaaacctttgctccagtagcaagactagaatctatcaggttacttctttccataggatgcattcttagatttaaattatatcaaatggatgttaaatctgcattcttgaatggtttgttgaaagaagaagtgtatgttgaacaacccaaagggtttgaggatcctcattttcctgatcacgtttatagattagaaaaaggctttgtatggtttgaaacaagcacctcgtgcttggtatgagtgtctaactgagtttttgctttctcatgattctagaaggggaaatatattgataaaacactttcatcaaaaacattaatactgatgttattgctgctcaaataaatgttgctgatattgtgttcggttctacttctaactctgaagtgcagatttttgtttctcaaatgcaataagagtttgaaataagcatggtaggtgaactcacctattttctaggtctccaagtgaaacaatcggatgagggtccttttgtctctcaaagcaggtatgcaaagaatttggtaaaaaagtttggtcttgaaaatgccaaacatacaatactcctatgaacacaacattgaaactatccaaagatgaacaaggagtaaaggtagatcaaattttgtatcgaagtatgatcgttagtttgctctatctcactgctagtagtcctgatatttgttatagtgtgggtgtttgtgcacgatatcaaggaaatcccatagaatctcatctttttgctgtaaaaagaatcatttgctatgtaaatagcactgttgattttgggatttagttttctaaagacactaattctaatttggtttgttttagtgatgttgttggatagataatgcaaatgataggaaaagcactagtggtggatgtttctatcttggaaacaatcttgtttcatggcacaccaagaagcaaaactcaatctctctatccactgcagatgctgagtatattgcagcaggtatctgttgtaaccaattgttatggatgaaacaaatgatgg

SEQ ID NO: 28286 - DNA, 2544 bp, Cannabis sativa
aataaaatttaatggtgatacttgacttggcattcaccatcgaacaggttgaatctgcatttgagtttgcaaggatttgccggaagttggatttccataattttgtgttttcgatgaaagcaagcaacccagttgtcatggttcaggcgtatcgtctacttgttgctgaaatgtatgtccagggctgggactatccacttcacttgggagttactgaagcgggagaaggtgaggatggacgaatgaaatctgcaattggcatcgggacccttcttcaggtacctttctatttctgattcatgatcaacggagttagtacacagatatttctgcacttcaatatgtcatgaactttaaagccatcagaattctttgatttcggtctgttgttttcctaaaagccatcactatgtttcgaacgctttttacaatttataattaagcaagatgcatgtcatgcatatcaccatagctggtgtaattgaattttgaattgaatttgcaggatggtttgggtgatactatcagggtttcactcactgaaccgcccgaggaggagattgatccctgcagaaggttggccaatttgggtacaaaagcagctgatcttcagcaaggagtggtaagatcttcaaatcccttcattcaattatagacttaacttcaaaataatatttattacactaactcaacttactcgataatatcatttcgcttcaggctccatttgaagagaaacacaggcattattttgattttcaacgacgaactggtcaactgcctctacagaaggaggtcagcctttaatatctaagagatcggcatcatttaatggcatattgctcaaagtttaaaacttttttaacagaaattgatgcttcggttttacagggcgatgaggttgactatagaggtgctctgcaccgtgatggttcggttctcatgtcagtgtctctcaataacttaaaggtagcacacaaaagcacaacatccttccatttcgattttctttcttttgtcctcttttccggcacgggagagacgattctagaaacccgaaaatataactgtttgtcccttttccagatgcccgagctactatacaggtctctagcagcaaagcttgtcgtcgggatgccatttaaggtctatatattttccattttataaccgtgtgaaatcgttacttcgcaaagctgaatatccatttgataagttttcgtttaattgattttaggatctggcaacagtagactccatcttattgagacaacttccacctattgacgatgacaacgctgtaagaaatctaccgaactgtatttttttcgtattagacaaagtcatatgatctgtgttctaattttcttcgcgtcttaatatgtttttgttttaatcgatcagcgattagctctcaaaagattgatagacataagtatgggggtcataactcctttgtcggagcagctaacaaagccattgccaaatgctatggttttggtaaatcttaaggagttatcatctggtgcacacaagcttttgccagaaggtaaaacttttggattatttagctagagaagaaagatgtatatactaattctgactaatacatatataccgattttgttccaggcacgcgtttggttgtatccttgcgcggtgatgaaccttacgaagaactggagattctcaaaggcgttgatgatgttattatgattcttcatgatcttccgttcgatgaacataaaattagcagagtccactcagcaagaaggtaagtaattataagttagtgtggcttgtgattttgaaaccgctgcttttcaaggagattagactctgtaatcatacaattatttacttattagtacttttagttatggaaaaaaaaacttacattgcgttcggtcggaaggaatgaatacatcagaatagaattagtaataagaacgagaatgagaataaaagtaggaatttgaatctagtccgggtttgggctatggtagtccgcggttagggtctacctaatccaggtgtctcaaaaaaaaatatattttttaaaaagtataccatgatttttattggttttcgaaaatactacattttattaatacaaggcatagtaatttttcttttgaaaattttatacaacaaaaacaaacaaaaaattataaacatgcggttgtatagattgattttatttacagaaaatacggtcttttgatgtattttcatgttatactcttgttaatctgttattgattttttgttatttgtatgttatttttttgttgttgttttgatgttattttcctgttacttttatatagttttcttatttttttagtgttgtttttataaaaatgtaaaaaaaaaaatctttgaacgtaaaaatgtaaaaaaatttacaaaaaaaaatatatattatgtaattatccatttttttttctcaaggcacatccaatctcaggggaccgtagaataaaatttactatgcataacaaaagtcaataattcttatttcatcttgcattagaatgacct

SEQ ID NO: 28287 - DNA, 1211 bp, Cannabis sativa
aatgtgtgttgggctaaaactaaacgcagacaaatttaccgaaagtattatttttggtaaagattttgtattttaattttaaatatttttttatatttttgtgatattttgtaaaaataacgtaaaaattgcaaaaaaaaaaaattataagaaaataacatttaaataacataaaaataatatatatacgagaaataaaaagttaataacaaaattacacaaaataatgtaagagtagagtataaaaataatataaaaaagttataacaattttattttatgtatataaaatcttaaactgtaaaattatataaagttcagtacaattatatttttacatatttttttgtgtatttctaaaatagagaaaaggaaggaagtgaaaattctttctttttgggaaaatagattgaaaaaaactattttttttaatcttcctaggtttttagttatttaaactatttgttaattttttaaaaattcttaagaaaacgagttatgtaataatatttaaatcttatttttttttggtaaaatattcaaaatttgtaaaactttaatagaaaaaaaaaaaggtgaaaaaagttcatattttatcaaaatcatggcagaatagtattgcttaaaaaaaaacaattattagtttttttcgtaagaagaagaagaagaagaatctgaaccagaaagaagaagaagaagaaacgatcatcaatggcgacagctctggtataccaaatgttctcatcatcagctttactttcactaggcgtatatcacatggcttcctccactcgtctccacctcaaatccccccaatcctactccgccaaacccttccacccattcccaccttcttcctcctcctcctctcatccccgcctcaaacacctccagctctacctaatcctcgcctgtctactcctctccttcgctcacaacacaatctcctccttcgattccgatccactcctcaaaggccgaacccccgtccaccgcttcacctccctccaatccgctgcaatctccgccctgttcttcatcctaaccctaactctcctcctctccgattccttcccttcctttctccctcttccttccgatcttttcttcgcaatcgccgctgcactcttcttccttctctcctcactctccgcttcctccgcttcgctccaaacctccgatctccaagccaaatgcgattccgtctcggc

SEQ ID NO: 28288 - DNA, 1630 bp, Cannabis sativa
cattataggcatctgcccgaaattgaaattgtctcttatagcaactcctttattattatactcaaagcaaacttcagccatgaactttcctgtataagagattttagcctgccgacactgtttaaagaaaagtcattaaatccattgacacttatgataagtccaagatgataacatatgcacatttatatactctacacacaatggcagaaaaaatcttacttcaaaagggagaagaggctccttcatcgttttcaacatttgttcctttaccggtgcaaataaatgagatttccccagccatagtaagtgagaagtcaagaataaacaataatcgcataatcgcataacaaaacaaaagaattaacaagaaagtccttttcttttttgtttcccccggaaaccaagatatagtgaaaaaaatggaaactatattttatactatactggagtgtagcattgtcagatagatttaacataaaataagaaataaaaatatagagaatgagagtgatcaaaaggatattcctgaggctggtcttagtggaaggatcatagactgtgataggcttaatgcaaagtagtaatgtatccaatcctgcttcaacaaaatgatcaaaggactgtatgtgatgtctaaacagttcctgtaactcgtcgaaattgcctggcgtgcccatatccacactaactcctttttcagtaaagaaagaaaaaaacagtcagctaaaaatctttaacaaatcccaatttttcaacacaaaaattcaatctttcaaactacaaagtaaaaagattccaatacagaaaaagacgggcaattccatccatcctaaaaataaaagcaaaacttatataaacaagcttagctctactgtaattcaaggcatttgtacaaattgtcttaccttacattcaactttaaaactaattcaaactcaaaatgacttgaatcccacaaaaattgactaatgaactacctatgaaaaatgagagtctccaattaatccataaaaatataaatacataataacaccgtgaagaatgcaaggaaggggtggtaaagtataaacctttattatcggtttcagcaaaagcctatctaattcaactctaaaactaatttaaacccaaaattacttgaatcccacaaaaattgacgaatgaactacctaaggaaaacgaaagtcttcaatttatccaaaaataaaaatatatagaaaaacaccatgaataatacaaggaatggattgtaaagtataaacctttattatcagttagttacttgtggacgaagaatgagggcaacagccggcgaggaagggaaattgaggagcggcggtttccggcgagagagagagtagagaggtaagggatgaaaggggtttatttagggtttaaggaacaatttattgttttgcagtttggaccgttgaaactattttctttttgtttttgttatttttctaatattacatttacacccatggttttgttctatttttacatttacacccctattattttttgtttctctttggcaaagtgatagatagaattgtccttaaataacttattagtagattaaaagattaaatgacatttattatccatattttcatatggtgac

SEQ ID NO: 28289 - DNA, 2536 bp, Cannabis sativa
taaacaaaaatcatgtaaaaaacacaactttacgtacatcaaaaccctattatagataggtaaatgtgcttatacacccatgatttcccaattccatatgtaatcagccatcaaactcaaaaatccattcaaaacatataatcataatgagttaatcggcgaaattcgggaaaagaaaaaaagaggttacttaccgatggaggaggagaggaagtagggttgagggaaagaggaagcgttgggaataggaggaagcagaggatcatcggtgggagagaaatggttgaaggcaaccctagcagcgtcgttttgggcttctttggaggatttggaagaaccagaggtgtggaatgattggccattaacaacgacggtagcggagaagcttgggttgtgatcaaggccttgcttggtggatgtgtatgttggaagagtccaatggttcttctggcataattcttgtagtttcgacttgtacattgtctctctctctctcttctctctgtgatttttttctgttgaggaagacgtggttaaatttaatatgatcttgtttgagtgagattctgcttttgttattttcatgtatcaaatattgttatttttccaaaagtttttgttgaagaagctaccaaaactggtttattaacatagcaattttgagcacatatctattattcaagagtaattgttgctgtcatgataacatgttgaggtgataattgttttatctaacaaattaatgaattaggagcccaacaaaacatagcaaccctaactattctccaactaaccactaaaaaagactccttcattctagctttcaaataagcaaaaatacattgtcacaaagaatgtaatatggtcatgaacacatcgtaccaactagcacatgctttatatgaagctgaaattttgttagcaaacactctgagattgctctccacaccacatccagaattatttagcatagtttgatccgtcttagcatcttgaattaacctataagcatttttcatggtatagcactcggacctttccttccccaaaatcacaaatcctttaagtaattctcactttcaccgttaaaattagtacaaaattatcatacttataaaccaagcaaacagggttcaacacttcaaatttcacaatgcccaaaaaggcattaaaaatatgactacatacagcaaaaaacaatcaaatcagttatattagtttcaaaatgacataaccacaaacaaacgctcttcttctgagctatttttcacaaaaagacctaaaatgcaaatgtagaacagagggaatcacctgagaaaaatcaaacaaccatataaagttgagaactcaatttggattacagcataacagaatcaaatcagaatattagcatatttggaaaccactaacttataaactattttacagaacaaaacacaggttgatttaattgcttttaacactgtacacaaaccatagaagcaaacataaacacagagaaatcaaagaaagaaaaagctctgtaaaaataaatgaaagggcgtacctgtgaggggaataattggtggtaatgaagccaaacggaattcctcggtcagagtacccgcctgaagaagaagaagaagaagaagaaaagaaaaaggaaagtgagtagaatttattgtgctgactttggttgggttgggcttctaatattgggcttgggcttgggcttctcgtaaatttccatccggtttctttctcatcgtcaaaacatcactaacttatataagaggaaattacattctatactatttttatattatcctcttttatttttaccctctttttcaaagtctatcatttttacctctttttttaaacattataccaattttgcccctgtcactttaagatactctccatgtgactctcttatgttagggtatttttggtataatacatataaaaagaggcatgtttcaaataaatataaaattagaggtaaatttaattaattgattaataaaaggtatatttttcaacttacccccttatataactatgttatagcaaatgctagcaaatgcctcaaatttataatttaacataactatgttagtaaatatttttattttaaaatttatagagaaatggttttttttttatactatttattatttatattatcttttaccatctaaaaaaaattaatttttatatttttttaagaattaaaaaagaattactaaaaaattatggtatatttatatttattttttttataaaaaattatgtctatattagttttgttaaaatcttttttatttgaaagttatgtcgattttttcaatttttatgagttgttgtgagttataacttattagtatatagattttgttgtatagtatatttttattttgttgtaggttatattattgttttttgatgatatttattttttattttgctatgtataataatagtatataattttttaacataatacaaatattttaatatatgtatataatttaatgggtaaataccattttag

SEQ ID NO: 28290 - DNA, 4467 bp, Cannabis sativa
tggaggcttgaagcggggacgttacatgtaacaacaccgttattgaaaataaaaataaaagatatcaaataaaaataatacaccaaaaagattaacactagtgaaggtctaatccaaattcaatgagcaacttaaatccccaagacacacctttaaagaaataagacaagaagaaaataaagaatacataggtagaaggataataacaaccccagcgaaatcaaaaatagtgtgagaatcaacaagacctgaccagaaccatgccataagattgagaaatagcgagcaagtcttggttaggcaaaaaaatcaaggctaagaacttatagagagacccctagatacaccaaattatatctatttacattttttatattaatatttcttactaagaacacgtttggaaagtcacattttaattggatttatgtgttattagtggtaattacacaatttgacatgtctgtctgactatataattacactgtaattgtgtaattgaaggtaattgaaagtaattgaagagtttcaattataatcttcaattctcatggtactctatgaaaattacactgtgtaattactaaaaaatttccattttaaacattaactactaaaaaatattattctctcgtataattactaactattttgctaaacaaaatattatgaattcatatataattaccacttcatatctaaatacacttgtattttaaaatataatataattaccaccttaattacactacctaaaaattacacaataacttcaaacacagcctagcctgaatatgtatgtcaaacattatcatatttatatgataacctaattaaaacaatgttaaataatatataaataacacttccatttattattattttataaaaatgtcgatggaaatttatattttttttatgaatatagttagaaatatgaaaattaataataaaagcctagctccaaaataaaatgagtgaaagaaaatgacattgaaaccatcaagggccacttgaatagtatatggaagaaaatgttttggtgtcattaccactactcttggatgatataacaacaaaatcttgtgagttaagttaaaacatgtttagataacacttaacccaatctgattggtgatttataaaaggtttcaagtagggaaggtagaaagaattttcatttcaaaaaatgcctctttttttctttttctgaataagcctattcggctgcagtcaatggaaaacatggggttgagtttaagttaaataattgtatcaattatctaaaaatgtccctactcaacagcttgaagttatccataaacaaaaccatgttattaaacaggttgaactacagccaatatataatcataaaggcttacaagttacaccagatgattatgcaattatccactaaatgaattggtagagtacgatttcatgctaaatttcggtttttctttttctttttcttcagtcgatcggaacctcaacatccatctttatgccagtgtttcccagaacctgcaaacaatgaggccatcaattacagtattttcatacgtattggagtggagtgacttgatgaatgtgtttttccactcaatttatttgaaagttaatgcaaagagcacctattcaaatgtgttgaaatgtctcgaagaaattgtcaaagagatcatgtaggaaaaaagtcagaagatgactaagttcaagtaatggatgacatgacaatacttgctactacttgattaagatgagaaaaaagcaacattggaattaatggttatacatagatatactaccaaacttttcatctgcgagctctttttctactgccaaatgacttaaagagctttattatttatgcaggaaggaagggatgcacaatcaaatttaaaagtatcctctgcctctcataaaaaagattatgcaaaagtagtttataaatatgaccatgtaccgtacaatgcactggaaatttgatatacctttgtgaagtcggatatgcctaatgttgaatcttttgcataccctgattcctcgaggacacgagtcaacacttgctgtaaacacacataataaatgttaggcatcagtgcatcacctctcaagtctcaacactggcaccttttggttcttggttaagtttccaaacacatattaagtcttagatgaaaatccaaacacaataattttttagcgaaatgaaaatacaattaccattcctacatgatatttcttttcacagcacacctagaattagtaatttctaatcctccagccaatgtaaaaggaaatttttcgaatttgcaaaatcaatagaaactggatttaaaacgaatttactttaataaatttaatcaataggtggttttgctcatttttcctcttctagctttaagaaccaacttcacactgttctcaaaggaacttcaattctatgcaacagcgaaatggttagagtgtagttagaaatcttaataacgttagtgatagttattgttttttattgaatgagcagtgatagttaatgttgaattctgagatccacaaatttaacaaataacttaacacactaaatatcagttgatcacccaagaaaagaagagtaactcaaacaaggttactaaataatagtttctggtttgctcatacaaggtctagtgttactgttctggtccctcctgaatacctacaaaatgccctacgtacttattcctcaaatattgtcagtgtacggtcgagttaggcaaggaaccagtttttacataataatataaattgaattcttaaatgatattgatggaaacttatgcgttttacttttgagatccttaagcttaacaaataactaacacgctcattattaactgatcaaagtagtgaattgttaaaggtaagcaatttaagagatgcaagtttagaccaatcactaaagcttgatctgagacatccagattgtccaaagtaattatcatatttagaaagccacaaattgtaaaaccaacacccctgaattttagtatcaacaaggtaagcattcatcattttatatagtactagagagtagcaaatttgaagaaagccaagaaaatcccagtatctcaattcaaaagaggattcgttctgtttttgttaaacaattcacttatagctctactcattcacaccatttcctaaataaaagagacccaaaataacaatgatagactttacctccctttgttgctcagatataaactgtccagtcaaatccctcaatatgtccaatatgtcactgaatgtgacttttccattgcaatcagaatcgtatactctgaagataactacaaaacaaagagaacccacaaaatcaaaattcagtaaagagacaaccgaacactgagtttgaaaatctctctagcacagatacatatatagtaagatagaatgattacactcaatcttttgttgctgggtcgctctagggctgaatgctgacaaaaatgccacaaattccttgaagttcaatccatttaatatccccatcaatctctgaaattgaagacttaattaatttaatatgctgaaagtatccaattatattatagatacagatgcatccaattccatataattccatagataatgacctgcgaaaggggattgacagcgacttcaggtatagacaacaactcatctgcggagacgaaacctccgccattgcgatcaagctgacagaatctctggtacagggagacgatctcctgctgcgaaactaatcatacggaaaaatcaaaatcaaaatcgagaacaagaacaagaaaagatgggcgatcaaaataggttacgaaccgaagcaaaacgatttgtactcacatgtgttgctgcagtggtgttggacttcttcaatgtcgtattgggtgagcatagaggaaccgttgcccatggcgtggagaaagaaagagagaaggcagagaccgatttagggtttaggtctgagcgtggagcattagggatagtgatgacctcagtctctctctctctccaactccgcccagcttgtctcagatgaagaaacccacagtcgttagagtggagcgagcctggttggttggttggttggttggtctccttcggcgtgtgcgtcatacccacgcgctgcaaacggcgattctactactgtcgtttcctgagcacggcatcgtagcccattattgcatacgacatgtcgtttataagacatttcaaaaagagaaaaaaaagtcagcatttatatatttgagttttcaaaaacaaaaataataatttattaaataatttgtgtcataaatatttaatttaattttttcagttacaaatattataatttaatatagactaaataagaaattttctcccgaactttgacatgtaccaaattatgtcctgatttttttttgccgttaaaaactccccttgaactattgaaattgttagatttaa

SEQ ID NO: 28291 - DNA, 1121 bp, Cannabis sativa
tctagcaagttggtgacgaaaagagtaagcaaggaagactagatcttaactagctgccatggcccacctttctgcagctagctggtgataggtgtcaccagtttgctccagcaagtcattcacaaacggagctagccctgaatttaattgcctctgagactgtcacgtgagcaatgatgggaggatggataacaacatccagagttatcttagaaaattcatgtttttatttggaaccaattacattagttctttgatgaatcatatttgattcggcttcaaattgcttctgaaaaagctaagctgactcctcgaactggacgtcattttcttctagtatttccagtggttggataggaaaagttatagtggatggaggaagttgaggaattatcaactttgtggaaggattttgaaggtgtggctcaaaactaggtgtagagtcccgaggtttgggatcaaaagcttctttatttatatgagatcacttcctttgttctcacttcttcttcttcctctctgcatctttcttcctagcttccttctacttaacctctctttgctcgacctcttctctgtcatcttttagtgttgaactagttgttagacaacctctgcctttagcttttttccttctttaacaatgttggacctaagtctcttcctagggaagaccattcctttgccatcttattctccatctttttcaatagtaatcacttgttgaattgtaagtggaacctgctgcataggttccacttgaagagcaggatccacaacaacatcctggacttgagctggcattgtaacctcctagatttgagatctaagaatagcttccaaaacatgagcctctagaacaaatactggtgtctcaactgagggtgctgattcttttcttctggtttgggaatgtaatgactgcatgactaaaatatggatgagtaaggcaattaagattaattatttttatttcatagttatatacaaaaattttattgtgggtcccatttttaaaaactaggcattagtgttataatttctcgattttaaagattttattaaactccaagggttcgtttggtacgttgtattacaccgtattgtattgtataatatta

SEQ ID NO: 28292 - DNA, 3131 bp, Cannabis sativa
gaattggtcttaaaaattattgtaatggttgacacccaatttataagaaagtatcaataaaattctataagagaaataccattcgagttataaaatatcattactcgagtatcaatcaatttaccaaaaataatgaaataaatagcagtcaattcatgaaattgtatacaacactcaatttacttggacataaaagatgaatagcactcaaattatagttacgttatagagaaagtagcagtcatttaatgaaataagtcttcattcgtaaaatataaattggtacagtcaacatgtaaggtccataatagttattatttgtcttaacagagtagcaaatatccatatattggcacagtcaactgttaattgactcatattactcaatttatagttcactcattaaaagtgtttcaatcgaatcattgattgattccactttcataaagtagcaatcaagatagtgttcaacactcaatatatggtaataatagtagcggtcaattaatagagtagccttcaagtaatagtagcagtcaatatatgatgagtatcaatttcagtaaaatgaaatataaaatgtaagcaatcaatatcattttatctcaaaaaaaaataataattataattagctattcgggccatggcccactatcagatccaatatcttcaaatatataaggctatatatgtaaatataaaacctaaatagaaaaaagaaaagaagaaaacaaaaaaggtgaacatatatgttatatttatatatgttcagttcagacaaaaaatctcaatggcaaagaaactttgcctagataatctcctggccattgacctctacttagttgttgggcattaaaggttttctctttcttcagcaatttttgtaagtccattcttccctctttttttttttgttggaaagatcttcattttggctctgtgaaatctgctcaaagatatttttgggtttcttattttttgaaagagagtgacacacatttctctctcttttaaagatttgaactttccaattgttgaacttttttttttctttttctttagttttagttctcatgagaacaatggatctaaattttgtttagaaaaatagagagaaactcttatacatgtaatgaagaatttagttatattttccttacaaatgtatgtaagatgtatgtttttgtgaacctaccgggttccttaatgtgaaccctgaatgtattttgacggatgttgatttgaaaaaatggagaattgtttatgacataccttcaaatgtggaaatgagactgcctaagtcttatgagagagccgattgggatatgggagattgggtttttctttacaaagtagcttttgattgtggatttcagtttcctttcaatcctttggtgactgagatactcagtctttatgaaatatctcatgggcaacttatgcccaatgaggttgctcctgagccttgagcattttactgaaaagtttggtattatagtagaccccataatttttaggaaacattactatgctaaagagcatgaaaaagagaagggtagaatgctatttgtttgtcgcactaggaaaaaaccatttgtaacttgtttgactaaggctgacaattcagattagaagaaagcatattgcttctttagaggtgatggtttatttgagtcaggggttgagaagagtttcccattctcttgacgaatattgagtgatttttgaattatgttctattattgtgttggctatgtatgttttattaatgtctttgtggtccttggtgcagatactgacttcggtgttcaacctaatacgaacaagtttgttgattgaattatccaggatactgaatctataaaggaggagcaccgtaactttaggaaatttctccccaaaattgcctgcaaaaatcacaagacgttatagaagaaggtatctctgaacttcaatcccttgaacacattcacatccttcttctagctcgagaacttgagaaggttggaattaagtttactattttgactcacatgaccgaagagcaacgcatgtttgcagacaagatgtcccaaaagacgacgataaaaatttccaaagctagtgatgcaatggctatagccaaattgacaacagctaagaagtcaaagactgaagggtccaaacaagtttttgagagtaacttcactgatgttccattaactccatcttcccttggtatatgcactacaatcaagaggaatgccgactttcttgacccagaggttgttgatgaaacggttcttcgaatccctcacactgtttcagtctattctagcccttcatcgattgaaggcatgtggatggaattctccatccaactgattgagcacgactgattaagcttggtccgactggggttgccaacaacagagtagctgatgcttacaaggtaaggtcattattgattgtaatataaactatgattgattatttttctttagttattaaaacttggttataatgtttgtagattcttcaagtcatgttgttcatttgggaaaactatcctgtgttggagaagaagaacaaaaaattgattgctgataatgctttcctgaaattggagaatggaaagtatgtagaaaaagagcgcaaacttgaagaaaccattaaatctttgaagggtgagcttgaggaggtgaagaaagagttgactgatgagaagaaaaggacagaggaccttgcctgcgaggcagaacaagttgcattgactgctgtcattaagactcgtggggaactaatgatcgagtaccaggacggaaagaatgaagattgcgatgtggctggtgaattgaaacttactgtgcccacatgggtttggatgttgatggtgagaggattgagcaacttgaatatgcttttattgaggaagaaactgctgagatacttgaccttggtactacaaatgaatgtgaagaaccccaggcaaatggttagtttcgttttacattatgcttagtggttcatgtgtcttaatcttttaacttttttttttttgttttgaatatcgaaaattactcgaacatgtctccttttgtgatttatagttgtttgtggtgcctagtaaggttgatgacttttggaggaag

SEQ ID NO: 28293 - DNA, 2056 bp, Cannabis sativa
caaaataattcgacactgaattttaacatgatagtatgatcgacctctaaggattgcccatcatccctttaatagtccaaatgctctctctactatgttccgagcagaagaatgtttcgtattgaaaaattcagcaggagtagtaagtaggacatcccaatcgtttaaatgatatcgctatcctctaaacggtactaagttgccttcaccattaggtatttagcatcacataagtaataatatcctgtaaattgattgacgaaattgtaaacctattatgaaattaacttgtatatgtatgatattacacatggaagaaaaaaatataccttgtggaactttcaatccatttgaactcaaagtgaaatataaagggctacttagtgtgtgatagagtatttaaaatgttaagaaaaagaataataataataataaaaattgtagtagcttaaattatagctagttacctatacatagaggaaaagaaaattagaataatacaaatttgatataacataatagcacttgtgagtggtaagtagtctattgagattgagagagaaaaaaatacaatataagaaaaaaaaatgtttagtgatatgactaagttagagaaagatatatgttggtgagtgataaaagaagcaaaagaaaaaaagaaattataatacatcaaagtagttgttaatatgtaatacagtaaaaaagaaaaaacaaaacacatgaaagtatatatgtaaaaaaaatcgtgttacagtacaaatgttataatctaccttttctaagtattctatgtaaaattcccactataattgctttaaaatctaataagatatgtgggcatcatacattactatgatatatatgatgctaaagtaatcaatatgcatccctaaatttcattttataaaattttgtttattgcactcttctaacactaatggtatcctactctcgctccttaatctaaaaatacaactaggagaagcattgtgtcatgattcatcagttcaatgctgccaaatcatttctagatagtcaatgaactatctccttaccatatcagtcatgtggaaaagttttttaactttttttgccatttgaaaagatgaaccaaaagttcaaaccccataatagccttagctagacattgtttgttgcactcagttgttttcaatttaatgtcgtaggtgcctaggtgatctttatttactatgccttagcttttccacttttgcaaagaagagttgtttgcaattaataatgcaaagtgggaatagaaatttcaagtgttgtgtgtggtcatctccattctctattctctaggttactcaagaagagtagcataaagttatctgccttttgagaatattgacacattcctacccagcaaccaaaacccctagaagatggtctctgtcacatggggatgatgaggcattaaaccatgatcacctacccaattagatatcgaaagtgccaaaatatgatttttctagtgttatacatacatcaataacagagtggagaaaaacttggaagatgcaaactatatgcatacatcaataacagagtggaaaaaaacttggaagatgcaaactttgagtttgcttcaaagaaggtaatccaagacataaatgaaagctttttcataaatcattaactacaattcccacaaaaccgaaagctaaatatcataggacctcaaaaatccttgacccatttacccaagataacaaactccgaaacaaaaaatatatcatagaaaatccaataaaaataaactccacccaacacaaatgatacccaaaaacctaaaataaatgctcaaaagacatggcacactgtcactgagtttgagaataatatactgacctaaaaagaggtagatcaacttgaagatgcttgacagcctgtcggcgtttccttccttcttctttctctgtaaataaattatacgaaagcaagtcatttgagccatctttggttaacttcgtcaggtaactcactgatgagtttctcacttatcataatgtatggagagagagagagagag

SEQ ID NO: 28294 - DNA, 1668 bp, Cannabis sativa
caacaaactctttaatttaattaaagcttaatatgaaagtctattaaggttttaaaaattatttagtgggtttaattaattgtattaaataaaattattttggaattaaggttaaaaaattcgcaagtttggagaaattgtaggattagaaactattttagtaaaaacgatcatatctagagtttggtaactctaattgagatgattccaatagtgttggaaagataattgaacgatctagaaatcacacataaatgactgtatcaaaattcagatattattggagttaaaactgaatcctaaagttacaagatagatgacttacaaaaattttaaaataaaatatttgttaatttattattattatttttttgatgaatcaaggaagttttgtattaatcacaatcaaatttttacaaccaagtagcacccctaagggcctagaaaaaaaccaacagaatgatctatacatttatgtacactattaactctatactcatacatacaattcgcttttacaagttttgaaaccatctagtatcttctgaatttactttctttggccaacaaatactaatcctttgaataacatcccgctttagtccttcaattaacttccctgcgtctgcttttgttttttcccaaaggctgagatttcgagctctctagagtgagtacaccaaacatgtgagagcagctgagaatatatttttcttgaacttgctaatttttgatcttcctatccacctggtgagactgtgcagtatgttagctgctatatgccattgtaaccagagttttaaattctagagacaagcagtaataatggggcattcaaagaatagatgagttgtagtttctttctgcaaaaagtataacccacaatgctcatctactgttattcccattgtcctcaatctctctttagtttttagcctttgttggattgccaaccatgtaataaaactgttctttggggtatttagctaccccaaacatgctgacaccattgcactctagtttgacttggacaaagcagattgtagcctttggaaatttgataatcctgcatgaaaacctactgccctgctgctatgtccttgaattgatctttaagagttacaaggcttctccaggtgcagctactttgtactggagccttgtagctccactagtcacagccctgagatagacacaatgaatccacctcagccataagctatcttgcttgtgtgaaattgcccatatatacttccccatagctactttattccacttttggatcctcctaaaaccaatacctcctgcagtttttctttgacagagagtatcccatgctaccagtctaggtccattagatatagcttaacctttcaaaagaaaagctctaaaaatcgactctaattgtctcacaactttcttaggtaaaagcatcacttgacaccaataggcatggctggccatgagtacaaaattaactagaactactcttgctgcaaaagagaggtttcttgaactccatgttcttatccttgctgtcattttttcagcaagggcagcacattcatttctagaaattcttttagcacaaataggaactcctaaatatgtgaaaagcatttctttcaaagtaaaacaagaggatgtaagaactctacttacttcctc

SEQ ID NO: 28295 - DNA, 1786 bp, Cannabis sativa
  modified_base (44)..(53): a, c, t, g, unknown or other
  modified_base (1582)..(1585): a, c, t, g, unknown or other
  modified_base (1740)..(1741): a, c, t, g, unknown or other
tgttatttctgatctttattagcaaatctgattatattgaaatnnnnnnnnnntagggcacaaaacccaacagtgagttctcgcccaccaggtccaaggtatccccacctcaaaaacctgaggtggttctgcctaaaagtgtctccaaagggaaaatggtggtgtcttcatcttaaaattccagaggtctcaaagaaaatccccctttcgtttcttcatcagattttgaacctgaagaagagaccaaggaggatcacgaatcagaaggtttgtctgattcaagtgaagagtttgtgcccaaagaacaaccctctgctaatgattctaggtctgaaagggaagagcctgaagctaaacttgtttaattagtgcagaactagtcgctgtccctagtgtagttccaaagaaggacaaaggaaaacgacccattgtttctccaaatcttatttttcctcataaaagaaagaggccttctggtattactcttgaaaacttcaagccccattctcattatttttgttacattgataatgccagagacatgaaattttatgagaatcagattttactattgagaaaaatttcaatgtcaatgctcataagccttttggggtttataacatgttgaaagaaagacaatggatggatactttgatcagttttgatggttatgtggatcgaattgtgaaggaattttatgctagcatccctaataagtgcctcgatgacgactcttttatgtttggcaaagtatttgtcaggggacactgatattcctttactgtgaaagatatggctgaggctctcaatttgcctttgggaattaagataacagatgtggagtttgatcgtgaaaaggtgttcgggtatctcactggtgataatgatgtggaactctctaacactatgcatatgtctcaactaacatatcaacatgttgttctcatgatttgccctatccaattggtttccttgctccaatccggtaaatgtttcaaatgaacttgcattattttttgcataaagtttcaattcgtgttgaaattgatttggctgatatgatttgggagcaaattgtttctcttagaaagggcaagaaacctagactcaatcttatctttcctcatttaatctataagattttatctgaccaagaggaattgattcttgagaatgaatccattgaaatgccagttgttggaacaactttcaaagttttagagagaccttctaaaggaaaatccgttaagaaaaggctcggtctgcttcccctagtgttactgataaacctgctgctagaactgcttccacttctgcttctacagaaatggctgaattcaacttgtgtttggaaggagtggagacaagtcaagcctcacttctcaggaggatggacagcatcatgaaattcttccgatccaattatgatgaataagtggtccattttttatctcttgctttcttatttatgtgtgcttgaactattatgactttgttcatgttgtttttcgttctctttggctgcttggtagacaaaaagggggagtagtatttattttggattatgtgttacaactctggnnnnttgttttagggggagttgtcttgtttttcgtttgtacacttttccgtttaaaaagttactttgtttttgatttttaagcttttccatataaaaaaagttatttgttttgtgttagagtgctttcatccagggaggatgatgtttggaagatgttnnggaagattaaagcccctcctaaggttttacattttgcttggaaag

SEQ ID NO: 28296 - DNA, 1295 bp, Cannabis sativa
agatagatggtcatgaagatgatgagatggatcaaatgcaaatggtggttgttttaaagggaggtgaggatgggcatggtgatgatgataggggttttaaagagaagattttgggttttgatgagctataatacaggtagctataggttggtgccacttacctaacaaaaaaggaaaaagaaactacttgaataattaaagaagggagcaaatatggacccaaacatggaccaaaagagaataatcagttagattttttaggcaattcaatttcaatgtaggaaaaaggtgtgtctagcttggtgggagtaggagtagagaaggtgaatatcaaaaggctgtgtcctctcttctgctgctctgtggtggctttttattaatttcccttctttatttggtggttggaatcgctagctaatatataatggtgggtcaaattatcttagctaatcaaatcatatcattctctccattttatatattatcttattaccaaaataaaaattacaataataatcattcatatttataatatatatacgtacaaataaaaaaaaatagtagctagcaagctcattgaagaggatcataaatttgttatatgtatagatatttatacagataacaaaaaaccaaaaatcttaaacctaactatatatataatcacttgcaaaaaaactatatatataatcataatatatgtaagatatatatatatatatataaataacgaaaaaccaaaaatccaaaacctaataacttgataaatttaagcatatgccccctcagcaatttgttccattgactggcggaggggtccatatataatgagtgaattagctatatagctaactatatataaaagtatatcaaacagtggtaattataagtggacaacaattactgttactgtttgcaatggttatgcatgtaattaagcactcagatatatgatcaatcaaatcacaagggacctactaattaacacgcacacacacatatatatatatataataaacagaaaaagaaattaataaagtacatgagagaatagagattgagaaagatgaaggtgtgaaaaaaaaagatataagagagaaaggtagtaaaaagtggcagatatatatgtatatatgcaaaccgtttaagagtcattgtcttacaaaagatgaactatatattaactagacacaaacatgggatcaacaaaaacaatagtgacaaatatgtatatatctttgtgatgatcatgaagaataatatgcgaaactatatagctatatatatatatgtgt

SEQ ID NO: 28297 - DNA, 1665 bp, Cannabis sativa
ccaccccaaaacccaaaaccacaccgacaacaagatctcaatcccaacaaaactaccacaccgactctcgactttgtcaaccagctagcaaaaatctagcacccaccctttcaatctctcctcctctttgagatctcaccctctcgatttaaaaaagtaattattaaagtataaatgaaaaaaaaaaaaaactctaaacaaatttctcaatcgtagaaaaaaaagttttatttaaatttttattgatttttagtatattttagatttaaaaatgggattaaaataatttttattttaaaatatatataataatattattaaattaataaaaaatattttgttatgtaattgagatattttgttaagtaattaggatattctgttaaagttaagaaaaaaattaaaaaaactctgtttaaccaaaaatttcatgacataaacacattttatatagaatagatttatatagtatcttaaaaaatctaagcacattcactcactcaccaccatttcaagctctttctgccattgttatttcagattagaacttttatatatataatatttgggatgggctgtggggtttggtgggtggtgagggtttggtttccttggcagcaaagaagaagaagaatcgggaggaaaaaaaagaaaatataaaggaaagaaagaaaaaaaaaaagaaaaaaagaaagaaagggggaattttgtatctttttcgattttaaatgtttctaaatattttaattaatttttttaattatcaatattaggtggtctaataaaattttaccacgtgtacacttctacgtacacagtgacacgtctatttggtacttaacaactaaaaattaaccgaaggaaagctgaccaaaatgattgtaaatgttaaagattgagtttagccataatttttccaatatgagaattaaatcgtggtacttaaaagtttaaggagtttagccgctaccctattttctctggtgccacttagatccatcaaatgccaactaggataagtggcaatatattattaggcaatgtgttaaatagttaattattattaaaaaatcaaattaaattaatcaatataattctgaatgattatagtatttctttaaaaattataatatgtaaccaaacaaattaaaaatataaacaaaaacacattctcttatatatctgggttaaaattcatacacatcttgaaataaaaacctaaatcagaagcaaatttataccaaatatataaactaaagaaattaacaacccaaataatgaaagagtgaaaaaaacccaaattcataataacaacgaaaaagtttataaccaaatatataaaaattaaacattataattattttctaatatttaattagctataaataaaaattactaaaataattttattattatattataactaataagatagtaataattacacttatcacacatttactatacaatattcagaatcggaataaattaatagagaaatgtaaccaaataaatgaggaataataggaatcaatatttgtaatatgttgtttactaaaatttttttaaaatcaaataatagtgatttatcatgtttacttatgagggaacggaatcggaatctttaaattaactaaattacccttttgagttaaactatattat

SEQ ID NO: 28298 - DNA, 3366 bp, Cannabis sativa
cataaatggaaaaattattttgtcaactaacttgccaaaaaaaggactttacatatattatattacttaaattacatttattaattaaactattttgtatttaaagtttggatattttagtgtttaacttaaaacttagactttatagttaataattgttattgtatttggatattgatgttgaagtttaagatctacaccatattattattttttttattattttaagtttactcaattatgtttattttatattaaagttcttaaaattaatttaaactataatatttttcaatttaaaatataaataatatatttttattttttttaaatctaattatttaaatactagaaactaacaataataattataaaaaaaagtgaagaatggtttggacgagttacccgaccaaaccgacgaaattattgggcgggttgaactttttctaatttttaattggacgggttacgattaaatatttgcaactcgattgataaaaatatgttataacccgaccaaaccaatagacatacaccccttctttcttttttatttatttttatttaaaataatacaaacaataaagtaaaaataatttaaatttaattttgaaagcagataaaccagctctatctcttaactaaaaaacactgtactaaaagcactgtagttggcactggaagctgaagtcactgtatattaactcttctctttttctctctttatctttctcgtttcaaaccctaaatattattagaaattttaattatttctgaaaaataaaatattatatttgtatttatctctctctctctctctctctcactctagagttcttggtcataactttttttgttcattttgttttgtgagtttttctttggtttgtgcgactgtaaatgggtgaagacccagttgaggattctgagtaatggaagctgacccagttcacgccataacctacattggtccctaaatggggaaagctgaagaggaacagaatccggtgtcgaatacgggcgcccaagctgacggtaatcccaattctcagacccgatttgggtgtcggtgcgctcggattcggaggctcattggcttgaaatgcatcttcattctcttgctctccattgctgtttttctctccgccattttctggctgcctccctttcttcagttcgcggatcaggccgatctggatctcgattctaagtttaaaggttagcttgaccctcaatttttatttatttattttccttaagttggttattattattttgtaacttctccgatttgatttgctgggtttcgatattgcctggatctagatgcttctctgcaggcttgtttcgggaattttgatatgatgtgattgatctatttttttttttttttaattttttgttttcgaggtgttaaaaaaattcatggttgtgttgctgtgaagattggtttggtagttgaacaggttaggaaaaagtagggtgatgtgtactagttcgtgtgtataatttttagatttacgtttttgtttggaatctgagaaggctttttggtgtttacaaactgttggatttggtgggaatttgatggttggttaatgagtaaattggggttaaaaggaaaattatggaatttggaaatttttggtcttttgatataataagaaatggctaacttaacttagttgaatttgccaattagtaatggaaacttgtgtttttttttttttttgtttggtttcgatggaaacttgttgttgctatggtaatatttggaaattgacttgataatagcagagactaaggaggcaataatgaggcagattttctcattctattttaagtaaatctaccgtcaattttaggcgtaagaacctgaggttatttaataatcgttttaaattgttcaaaattagtgtgttttcagaccaggattcttttctttttcatttacctttttttgttgatatatacgtgcttttatttgtttggagattggtcatcaaatttatagcgggataaaattaatacgcacatctacaagctaaacagaaaattagagaagcaaaatagaataataaagaaactgcctgtctagaggaaaaaacaaagaaagctcagctcactgcactctggaagcaatgagaatatgtttgcttcattgtatatcgtgttctagatgatactcatcctgaaattgtttttgatttttcatatgaaaaaattaattttgattttcgaacctgaattaagttagttcttttagtagattcatggtagcaaatggggatgggtatattacatttattttcatggtaatcaagttactgctatatcttttggatttttttttattattgagtaattgatcacgaatcctctatcaggctaaaagatatgaaagatattaaggttatcattgtgaatttggccaaaaaaataaaataaaaataaagacgtgagttatgcgtgctataggaatattgtgggtaaattttagctagagaaatgacagttttttttttttttttgaaaaagttagagaaatgacagttatttaaaaaggaaagggatttgatatttgtatgagaaagggtgaaattctagcttctctctttgctttagtggcttaaaggtttaaacgttctctctcttttgttgttgttgctgttggtgagattgataatagttgatacaaggattttgtgcaacttgttttctaaatcaagaagatgaacggtgggtgcaatagagatagttgtgagaaaggtttcctagtgcattttggatgctgcctttctgtcaaacaaaggttggtattgaatatcaaaatcatgggccaacaattttgtcggtcaccattgatgttaatatgctcaaagtcattgctcaagcttttttggaactggcagccaataggttgaaatgccactttcgcatcgcaaaagcagaagccatcaacttcggctcgtataacgacttagtgtgagtagggtagcccaaaatcttaaaagtgagttacttgtaagttttaacaataggcttcgccgagggtgtgggtgatgacattatcatcaagagctaaccttacttgaagctggtgttgtttacaagtggcccttgttcatgacctaggccaatgaggttgaagagacgtacagagtggctgtggctacaacaatcaaactaactaatgggaaaaaacagagtgaaagagcaatgcgaagtaacggaactgagaaatgatttagggcaagaatgacttcccttgctcgatgtgttgggctttttccatgtgctgggccaagcccaccaggtgcaaaatgtgaatagggcccttgatatcatctttcaaacctttttcaa

SEQ ID NO: 28299 - DNA, 1943 bp, Cannabis sativa
  modified_base (1911)..(1917): a, c, t, g, unknown or other
tcaacatacttgttagtaaatcgtgatcctgataaaatattcccatcagtttgatccaatcaccattcacaattcccttatctaacgtggatttaacatggctctcacctgactggtggttatcccaagttaatttatctccttcaataggcaaattaatgagacctttagaattcaccaaattcgagatgaacgggatgaactgatctctcccttttgaacattttctttcagattcttttagaacaaaattagtgtcaccaacaatcaaccaaggccctccgaatctctcacattccctcataatctcagtctaaaaggacttttttgcatggaagtatggggggacatacacacatgaaagaagccgaggatttgaaggtggatctgagtaaactaagccagaaatatggtgacgataacacggtatacattcaaagtcaagcccagatttacaagctaaataatacccctagcagtaccaatagcaggcatataaatgtgaaaatagaaatgaagtttgttcaatatacgtaccagtggactagcatcaacttttagctgggacaggaagatgaaatctggagcgtacgactgagtcagggacttcagttcacgaaccatagaggtctgtcccaaccctctacagttccaagccactactctcatggctcctgtggaggagaaccatcctcctccataaaggtacaagagtgaaccgacaccagagaacaaaagtcttcaattatctccaaacctccactgcttttataaagagagaatctatccggaggtaacccgagccccaaaacaggcaaaaaggattcataggttgaccgactagccaccacatcttcttggttgggtccaatcaaatcctaagaaaagtcacacaccacaccaagaagatggcaaaccactttcaaaggactagaacaaactgacaccgatctttccacaagcttccttttaatgaaaggagaattgctttcaatttgctcaaggaccagcatggcaccaatatccccaccaatcttacgatattcaataatgtcaagcgcatcaaacttttcaagtacttgaataaatatctatagagcttggaaacaaatggccaaagctctaccctcattttccaggtaattaacaacattacccaaactagatctatcaaatgagctaccaccatggaccatcaggcccaatatttacccacacggccaaaggcctccaaccactacaaccaactaaataaagttttagaaccaatcccatgggcccaccatgattggaaataaattcacccaatggcctaaacatatcaacaacactcatcaaatgattcggcccacaaatgtcaaaataactcaataccctaggcccaacaacaaacacataacaaccctcaaacaaaggcccacccagccttgaataaaccaccacctcgggccccacatcacaaaagtcacacatctctccaaaaaacaaacggtcataatataaaaatggtacgtgaacgaaaaccctttccatgcacaccagaaacataacccaaacaaataacagagatggcaaacccaacttcaggcgcgacatctgaaaaactggggaaccaaaaagtcatacagtttttccttcccacttctcgagagcctctagtcaccaacaacacttttttcaaaataaacggagcacttcccggagctaagcccgcctgaccgtgaaccgaagctctcacaagaacaatctctaccttcgcctgagcctctaacggagaagacgatcgttgaacccatcgagtaaatccccagtcagcaaggaaacctctgccagggaagcagtccgagtatgtcgacgacgaccccaaataagtgccaaaaaccaaagatggaatgttgggttttatgcccnnnnnnnaactccatttcaatgtaatctatttt

SEQ ID NO: 28300 - DNA, 2966 bp, Cannabis sativa
ggcacaaatgactttggactatggcagattaaaatgaaagctctactggttcatcaaggcatacatcaagctatagacaaagaagaattaaaagaactaggtgaagataaaaacaacataaagaagattgagattaaagcacatagtgccatacttcagagcttgggagatgatgttcttagagaagtttcagatgaagggacaacaatagggttatgggagaaacttgcatcaatctatttgaagaagtccttcgccaacaaactctatttgaagaagaagttgtataccttgaagatggatgatacaaagaatctcataaaccatcttgatgaattcaagagaatcatccttgatctcggcaacataggtgttaagattaaggatgaggatcaagggattttgttgttgagctctttgccataatgttatgaacattttgtggataccatactatatgggaaagactgataatgtcagaggttaaagttgctctgaattcaaaagaaattcaaaaaaaaaaaattagaggaaagattggacagcagtgtgggaatatttgcaagaagcaaatcaaaatcaagagataccaagaatggaaatcacaagtcaaataacaaaggtaaccatttcaagggcaatagcaatggtcaaagaccaagatcgagttccagcacaaattcaaaggcaggaaaacaatgctactattgtaaggagggtcatttcagagatgagtacagagctctcaaagcaaagcttagcaaagaaaagaagaaggattctggagatgcaagttgtgttcttgatggatatgagtctgctgatgccctggttgcatcaagtcaagccactggtgatgagtggattttggattcaggttgttcttttcatatgactcctaacaaacacttcttttgcagctttcaagaacaagacaatggctcagtcttgttaggtgataacaaagcctgcaagattgcagatattggtttagtactaatcaaaatgcacaatggtttagaaagaaccattagagatgtgaagtatgtccctgacctcaaaagaaatttgttatctattggtgcactaactcttaaaggctgcagcatcaagattgacagttcacttagagtcctaaaagactctacaaaagtgatgaaagggaatctccgaattgggatttactacctagctggtagaacagtaattggtagggttgcaacagcagttaaaaatgaaagaatggatcagacaaaattgtagcatatgaggtttggacatgtcagtgagagaggtctacatgagcttgagaaacaaggcatactgaaaggtaaacttggtaagaaactagatttttgtgaaaactgtgtttatggtaaaagctgcatgttgaaattcacaaaagccaggcacacaacaaaagaaaaattggactacctacattctgatatcaggggtgcatccagaacaaaaacaattggtggagcaagctatattctaagtatagttaatgactatacaagaaaggcttgggttttcttactctgtaacaaaaatgactcatttaacacctttgtcaattggaaaactttgatagaaaaccagacaaacaataaaattaaaatgttgagaattaacaatggcttggagttttgttttgatgtgtttaacagctgtcaagaaactggaataagaaggcacaaaactgttatcaagacacctcagcagaatggaatagctgagagaatgaatagaaccttaattgaaagagtgagatgtatgttgacaactgctggtttgggaaaacagttttgggtagaagccttgaaaactgcttgctatctcatcaacaggtgtccctgcaacactgaatttcaaaacacctcaagaacagtggacaggccatgcaccaggagttgaccacttatgagtttttgggtgcactgcatatgcacacattagataggataaactagagccaagggctctgaaatgatgtttcattggatatccagatggggtaaaagggtacaagctatggtgtttggaagatggtttcaaaaagtgcatcataagtagggatgtgattttcaatgagaatgaaatgcctatgaaagaatcatacacaaaaagaacacttagacaaaaatcacagaaagtgtgcaggttcaacttgaaaagactcaagatgatgacaggcatgatgaaaaagatcaaggtggatctcaggggtatcaacttgttagaaacaaagaaaggagggtgatcaaacctctagaaaaatttggttttgtagactgtactgcatttgctcttgcttctgcaaaggaagtagaatcctcagttccaagcacctactatgaagctatcaactgcaagaataaggaccaatggcttgctgttattgatgaagaaatgacatcactcaagaaaaataaaacctggaagactgttacaaggccaacaggacaaaaactaattggctacaaatggatttttaaggaaaaagaactgttgggtgaagagatcaggtacaaagcaaggttagtagcaaaaggttacagccaaagagaaggcatagatttcaataacatattctctccagtagtaaaacagacctccattagaatcatgatggcaaaagtagcaaaatttaataaatggatcaaatggatgtaaaaacagctttcttgcatggaaagctttaagaagaaatctacatggcttaaccagatggctacaagggtaacaagccaaaccaagcttgccttttgaagaagtctctatatgggcttaagcaagcacctagacaatggaatttaagattccatgaattcatgacagaaactggttactcaaggagaaactatgatccttgtgtatactataacagcacaccaatctggttattactatatgttgatgacattctcaccattggtaaggaaagacgagatcaacaagct

SEQ ID NO: 28301 - DNA, 2653 bp, Cannabis sativa
tgtagtctaaaagatacttttgagattgttttgtggactcttaaaaatattttgatgtgtttggaaacttttgttttaaaagtaggtatctgctagcttctcaataaggtttttaaataactaaaggacttgttcctgctatgatgtaaaagtttaatcttttttagttattgcttttacattctactttaaaagagttttccaatcacaaaagtatgtttcaatgttttttcgtttttttttttaaaaaataaaaaattaagaataaaatgagaaatcttgtaaaatttcattgaaactttccttatttattttttaagaaagaatttccaaacacagttatttttgaaaattcatacgaatctgtaaagtaacatttagtgtttgaaaatactttcaaagtcatgccaaacagaccaaaaaaagttgttttggatttaaatgtaatttaaaaaattcttatatttttctaaatatataaaagcaatttttttaagtgataagattctgaagtagctctaataagcattaaaattgccaacttaagtgatctctagattatcgtgataagaaaatccgtgcaaaatggtaaagtacagatatggtagacagatagtagtgatagaaataaggtttgtattttggtaaatgttgtgttcggtgtaattaaatttatcaaaaaaaaaaaagaaaaaaagaaataggtttgtattgaattaaccatgaattcgagaacttgtttctctcccattgggttttcaacccactccatttcttcaaaaaccactatagcctaaccccaataaacccaaaaaccaagttctcaaattcatggttaattcattaactaacatgaaaaccactatagcctaactccaataactaatctgctgctttagtctccttagcttcttactttgtagtatttccattctcttttactctccttgattgcacataggtgaagggacgctttcccaagtcgcttgaaatgtagtgaggtttgtccatcaaataaagcttatggtgaaaccttttgggtgcccaggcggacatctaacactcgatatggttccaaggtccactgcaattttgcagtcagccctttcgagaggtagtagcttgttgatgtgcacctaaatatgccctcaagagtgatacacgaaacatcgaatggatctgagccaattcaagccaacacttggaaaggccaaaagagtgaagaagtgagcttctcattgcgacgcttggcagtagaacgttatcgataaggtcaaagtttgacgtacaccaaatcacccacttgaaactgcacgtcgtgcttgtcgatccggttgcacttttattttttgttgtgcacggtgaatatttacctcgagttccttaatgatgtcatcttgtgcttggagggttggttccatcgctaaatgtgtgatagggtattgttgtagaaagagagctaataatagcctaatagaaggaacaaaccagtatatagtgatattagatgataaaatggtaagaacaatggaactatttggtattcaagagacccatcactttcctaagagcctacaaaatgattctccacacccttcactccttacaactgtcccatatataatatatccataaccccattacaatgacccatatacccttcttattcactaaactccacctcacactgctaatcttaatgtaggagtgttcataaaaaccgaaaccgatcatcaaaccgaccaaaccgtaattgaatttttggttccacgtcatcactgaatctggcgaggatgagcatggtttgccatcccccaacggtccagatagtccaatatagtcgatttaacgcaagtaaaatgtgttgattcaccatttgagaactagagaatggcacatatcagtaatagtgactaagtccaaaaacaaattctcttacccaagaaggctcatatttttttagtaatttccttgtgttgaatcattgtagtcaaagcacaaaaggcaccattaattaaaattaagtgctttttctgccccatttgtctagtagtgcccacgaatagacaaccccatatatctcccaccaattttccaagcccaatgaaaaatatgaattcagcaacaaggtcggttctatatcattcaaaatgtatggtgacccaaatagtgttgtgcaagtttcgccatggaagaaactcttgagagcaaacttttctccctctgtcaaaaatccaacgagcagttggtgtctttcccttgtcatacccaaaatcttaaggtgaaggttgtccttcagctactctcacctcctttttcgttgccaaccctgagttgaaatagacaagtcacacctccttaaagacaccaagaggatgaagtcatattcccatttttcaactcgggacctacgaatttagtaatggttaatgggctattattcttatccgaatcccatataacccaattgtgacctaaagtaaatgttggacccacaattatatcagatatattagatgccaactctgtctttaacttgctggaatacattgaatcgactctctaaaccttccacaactacttccaatttctttgccattaggatcgtaagtctctaataccaattgatagggtattgttgtagaaggaaatc

SEQ ID NO: 28302 - DNA, 4305 bp, Cannabis sativa
tttcatacttttcataattttatacactatctgtattatttgttatctggtttgtacttgagaaactaagtccatcacacctatttgttcttgaatgcgcgtaattacaatttacaatgaataaaaataccaagtaaatgtaggtaagggcggacccacattaaggcgaggtgggcagttgtctccccgaaaaaaaaatcaagaaaaaaatatatatgtattttaattagtcaaaacatatgtttttaattaaaagtgataatcctaaagataatggttaagttatctgacatttaggatggagtcgtgagtttaaatcccaacaagagcatatttattttttagtattttaatttttttaaaacttctatcaataaaatttatatttagtacttcaatgaagtcaaccttttatgctgttatttttttttatttaaaccatatttaatattataaaaatataaatctatatcaatttttaacatgttatatattatgtagaaaaaaaaaatagtacgcactcccccttctcacttaaaaaaaatacgccctctcaatttaaattctgggtccgctattgtatgtaagtcattatcaatttatgtaatcaaaccactatgtataatcaaattatagtagctatagtttaaacaaacaaacattttgtagtacaatagttttaaagaaccatgaatatgcagagtgagatcatgtagattttgttcaaatatttaatgcaattcctttcaagttaaataattaattcaaattaatatactcacgcaaaggagatgtaaatgctgtattaaatatgtatattttcacactctaataacatgcaataattaatgtatggtaagtaagaattatatatgagccaataatttagggtaatacaattttgaattttgtgttttgcaaatattattgactcaattttttgttttgtaaaataataaattagattttgtattttttaaaatggatatttccaaaatagtacaaaatagtaccatgagctcaatatcgataacttttttttttcaatataaccaacttgaagataatttctaacgcgaatagttaaaatgataaataattattaactagttcagggtactattttaaaagatatagagtttaatttatattatttaataaaatagaaagtgtaattgaaaatttttgtaaaatacactatttaaaataccttatgttatttacctactaataatgtgtaagtaaataatgttttttaatagtcaagagtcaagattacatctcaaaagtaatagatgataagtagaataatacatcatattattaattatattaaatttccatatattaatatgaaattcttcaagaaaaaaaataataattaaaaaaaccaagtacaaattgaaaataataccgaatacttgatcttatagatttttgaagttttgcttcttcgtcaataaaattgttccctatctaaacggtgaaccgatacacttgctatttattttgacttattagaaagaaattaattctttaattttttttataatcgtataccgctttttctgttgcacgacttgcaccagcagcagcgagtccgactccataaccacaccagcaagcacaccgggccccctctacccacctcccattcactcaactgagcgcctccttcaacgtcatagcttcaaccataaacgggttgggttgaccataagttttaaccaccaagggatttatgaataaatcattatgatcccgagcaatccaactcaaaccaagactcttgtcatcctcaaaaacagcagcatcacaattataataattatttaagatatatattttacaaaattttaaaaaattagaataatttacaatatagcaagtactgcaacggtgctgctgaaggaaatgactccattgcaagctgaattgaagacaattgcagtgggtttacaaatcgggttacagtgcaatctaccggcctttacagtcgaatctgactagttacaagttgtggctttagtgcagaaagaagagggaggatgtagagatgttgatgggattgttgctcatattaaaagtcttctacaaaatgtaagggttagagggatttcatttgtttatagggaagtaaatcaggttgctcatgtattagccaatgaagctttgttcaacaaagttagtgctatgtgagttggggttgttcccccttgtgcgagtcaagctgtgaagaatgattcgcctaatctattgtaatgatcgttgtttgaatgaattatatttcaaaaaaaaaaaatctattttattgtataaaataaaaaactcatatgtgtaatagactattaattcgaacattatattttaacgtgttaaattttttcaaattttataaaatattttaaataactataatatatataatcatacaaaatttaaatttaaaaattttttaaatgccgaaatagatcaaactggatttgttatctcatgtttgcttttcgtgatcgtagaatttttcaaatattaattattattgtgtgtacacacgtgtatttaaatgaattgggttcacacaactcttaaataatatcacaaccatgtcataactcataaattgtgtatcttatatgtcataaggataaatatattgatcatattaccatatcttactatcttctctctctcacgggaaatctaattttgagttgtgtctacaatgttttgaaaaagagatatattggtgtacattttatttatttcgacatttaaaaaaaaaattaatttaatttcttttatatttatgtatgttataattatttaagacattttataaaattttaagaaattcaaaataatttataatatagatagtagtattcaaaaaatctattttacatgcatataaaatataatagttatgcatatacaacatactgtttgaaccctattttcggcatattaattttttttcaaattttttaaattttatgatgtcttaaataactacaatatatataatcatgaaaaaatatttaactaaataattatttcggatatcgaaataaataggagtgcactaacgtatcatttctaaggagtgcaaggtagatttctcttatatttataattctattttttataaataatatagaaaaaatttcctatggaacccctaaaaggggcctaccgatgcagaattgaccctatgttaatttggatctgagacaaaaataaaaatttggatccaatgaaaaagtgaagttgttaagatttgaactttaaatatcttagttgttaaactaatcaaattactactgagttgcgacatatatttagtattatgagtattattatttattttattactaactatattttaattttttttcgaaatgggcgccctgagcgacgggggcctaaagcagccgctttcttcatctcacctcaggaccgaccctccaccgatgcactctctatttgtttcgacatttaggaaaaaaaattagttaaatttttttaatggtcgtctacattgttatttaagacatcttgtaaattttaaaaaatttagaaaattttattacgttaaaaatagagtttaaataatctattttacacgtgtacaataaatagtttaaattctatttttagcatattaatttttttttaaatctcttaaaattttatacaatgtcttaaataactacacgaatataaaaaaaaattaaatttaaaaaattatccatcataaaatatccaacaatatatttataatttatgtatacagcattatatatgcatgtgcaatatgactataccaatgtattttcttttggattttatgatcaaaattttgtattttttatcttttataatttctgttttttcgtcgtgtactaataatatatataattgatggtcaattcttcacaagtttcattattgaagttttttgtattgttttgcttttattttctagctacatatatacaaagaaacaagtaatcatttctttacaatgataatgatgttttttatcttaaagtgtctgtttcaaatttctattttggaaaatataattttttgattgttaaatattctaaataaatagtctagtctctaagcttaagatttttataagttcgtcgatcttcattttaacagatctgttacttgcttccaaaaataccaaatacgtgttaatattaaattgcgacataagtttttaaaaaaatttaatttggtacatataagtctccaagctcaaaaacccgccgtcctccatctcgtgagtgcgtg

SEQ ID NO: 28303 - DNA, 3017 bp, Cannabis sativa
ttgttcatccccattgtgcgaaagtagcagaggaggtattcttagcgaggagtaataaaatgttataacacttgcatgcattccttgatgtttaaggagacaacctataccagccgccattgggaacttgatggacaagtggtatattgacgagatagttcgaaggtcgtatagagctggcctttcgagcatcacgatgtatggagagttcacatccaccactatgaacgtggccatgatggttgtctatcttggggtagtgctgactgcgagtggtagtttgatctcgccacatggagctatgtaggctctgctaaaaccatacattagttgctcgcatggctccagttcttcgagtgacaaacccatccaaattaggttttgcttgaataagatattcaaggacgttccatcatcgatcatcacccttactaccatcatgttggctatctacacctcgatagccaaggggtcattttgagggtagctgacatggtacgagtcggagtctccaaatgtgatgggatcacactcgtagcgttgagactttagaggatgttatgaaacttctagtactttggctcttggctgatgtcgcaaagaccttgcatatcttctaagggctttcttgaattaccatctaggcgatgacctccaattataatctcaagcctgcctgcaattggcgtatgctagagatttgtattgcccccaactagagttttaggtcgtatataccactaaagagaaacatgcttctgtttgatgacaaattatgtctcgtctcgcagattattacactcatttttatcatgatcataattgttgtgacatcaataagatttattcatatctctttgaagagaagatgtttgcagtaagacactgttgactgtgttttcatatagatctcctctcttagagtcaagataatgtagtaggtggtgaaacgaggttcatacactcgtatgagcctgcccccatttttggctttatttacaccatggaagttaccttgtttcccattggctttcttcccttcgttcgaacctcatttcttcccattaccctgcagtccaatgttaagggttggggagtctggcgacttcttcttcttgacttttaagccctttactcaggtgacagcttcttccagcttgataaagccatatgatctatcaagaaagtcattcatggtatagactgacttgagacaaaggttagaccatagagggctcatctccttgagtctggctgcaagtgccattatccttgcgtcctgactaagtatttttgtcttagcggctgactctaagaaccattgaatatggtctttaaagggctcatcttcctgctatttgatgtctaccaaatcattgggctcgatttgacactattgggaaggagtgaattggttgccaaaagcatgcattagatctttccatgagtcgattgatccatggggaatcttgaggtaccaccactgagttaagcctgttagtgtgacgggaaaaattctacacctgacattgtctcttactccttacagatcggtttgcacttcgaagtaatggatgtgagacaatagatcttccttccctatccaggagagattcttgaactttagagggattggtagagctttgatttgatcagagggtggtaagaattactctctgtcgagtcaaattctaacaacttcgtggttgtgattccttttattgtggctgctaggttgtttaacttctgtcctgttgacaccatggatggtggtttgcatcccagttggaacttttgttactcgattaaggtctctcctagaagctcccacttctaccaattgtattttggttagagtgtcatgcaggcctctctctcttctaagtcgatcttgtactctagtcgacttaggccttgttattgtctcctaaccacggggttgtgaagacaacacttgtgatgtttttggaatgaactccagattgtcttgggataatatgctgcgcgaacgatcatccaaagcgttgtagtgactacttccctcaaagtagtcttcagttggatcataagtgcggagagaattaagctggttactcaagttcaactcctctccatgtacttgaggaaagtactcatattgttgaccgctagggccatgggcaaagtaacgacataactcacctctttcatctcaaaaatatttttgagtatgaagtggctcattggtccttactcatcggatctcatagcctccagtttcaaagtagagtcttcgattttctccttcagtatgaatagcaggttccttttctttttgcagagtctcgaggcttgctgtcactagagaaatgaggagaacctggtggagtagttttgttggttctctccatcgtccattgtcgctccatattaggtggagggcccattggttggctcccctgagcttgagccctttcggactcttgcccaaggtttgtttcctttggggagtttcaacatctgttgcttgcttagtgcttgaatggttaccaagtgtggtagcactattccgtgcattaaaggtttcctcttgagcactagtgcccatgtggccggttggttgtcagggaatctctctcaccaactccgaaagaccctcgccgggagtagtttcgcgactagaatgataggcttctctgatccgttgatacaagatagctctttgttgttccagttcaacttgttggctctcgatgttctgctagttctccacgaactagtttttgaactgctcgtgttacttatcaagagagtctcatagttgttgttgtaggtcagccatagtttggctaagctattcaacccaaggatcagtctgctcgaggtcttctagttccacacgtggtttgccaggtggaatctgctcggtggtattagtactatgagcagtttgtggcctttggggacgagtagtggagctggttctgaggcctctacttggcacctgaggtgccggtgtagtcccatcaccaacttca

SEQ ID NO: 28304 - DNA, 8040 bp, Cannabis sativa
acaatatgggatagtaaggacgatttgaagctacatttgcataagcaggaattagtgcttgaactggtaattgattcattacagcaagtttgtgtggatttgatgatattcattattttgatttaatgaatgtttaatatttatattgttatagttagaagtgcttgatgatttgtttttggtggaagtttggaactgctttggcgttggatggaaattttcaaattcgatgataattcctggtccaagtttacctcagcagactgcagttagtgattgcggtgtatttgtgataaagtacatgaaaatcctttctgaagggaggaacatgtgtgcagaggttggtgttgtatttgaagaaattattacatttatgctgtttaatataattgacttattcattgatttttttggtagtttgacccactttccgagcgactagcagtctcactggagttggtggctggagataataatcttgttaaatttactgtttctaaagatgctactgaacaccatcaacatcaactaagacaaggagacattagtagtaaaaggcagcggtgtcgttctccagagaaattgttgcctttatccaaattttctagtaagaaaaaacgaaggagatattggcaaaggtttgcttcatacaagaaaacaagaaaatgagtgaaagggtactgactatgtaactaataagtttatataatggtaaatgtactttcaatttatatgagtcccaagtaaacgttggagaagtctatttgtttttcttaatatttaactgtgggcctttttgttttaatgttggaaatgttgataggtagtccattgtatggtatgaggcttctatttagtttataaatgtggatcacttgctcatcctatgggtactatgtgcaatatgatgtactaagacattagttacaactccctacagtttattttaggttatatcttatgtttatatttgcttttgagataacattttcatggaaatatggctaaagtagtagccacattcccttgaaattgttgtagtggaaccgattgttagtttaagtagcatgatagtgttttttcttttcatctattatgtggtatgaaattagttttgtgttaactgttatggaatcatgtaatgaacttgtaagaaattagttatgtgttaactgttgttattagaatcatgttgtgatgggtgtttatgaatctagctatgataccaaacttaattgcatataaacttttgtatggtcttaagtaataattataaaaggctaaacctaatggtaatggatgaaataacaaggaaaaggaaaacactgaaattaagttcagaatcaattacttacatgattgttttaaacatgtaagcaaactagaaagaaaagataaataaccatgccatcatttatcctgtacgtgatctttattgtaggagtcataataacatgttatctaaagtgaaatgcataatataacaacataagagcttaaaaaaagacaagattagctaaaataacttgatcacacagtgtgaagaaaaaataacagaacaaaaagtatggaaagacaacaaagttattagttctaaattctattgatgtaaacaaccatggattcatatttgatttaatctaccatcaaacttacttactctaaaaaaagtactttattaaattaactcagaataacttgtgaagcaaataagaagttggcttattattacctcaatgtctgtgatacgtatgatgggaaattaatattgcttaatgcacattttgtatcaatcttggtctgaattattttccataatcctcttcattagcagcatctaatctagaacatcacaatgcatactattaatgaaagtagtaactgccacatataaaacctgcaactaaatgaaattatgaatcaaatctccactcttgacaaatattttggtttgagtagaatatatttttgaagttgcttatgtttgaggaacaaactctttcattcggctatataacacatcaagatgtgttgccattaatatggttgttacaaccatcactaattagcatttatttttcataggttggttggtgaacctgcattgcctagtgtaattatattattctgagtctttaattaattttaagaataatatgatagttggtttaaatataaatttgatacatgtcaataaataatattatgtacttactaataggtactaaagttggatagacatgtgaaaaaaaaaacactaccaaaattaaaaaaaaaaaacaatgcctcagacataataaaagcaagttattcagcaatttagtgaaaaatttaaactgaacaaattctgtcacttttaaacaaagactttatgcatgtgttcaaatttagaaccttaatttccattcaatactttcactatgagaagtatttaaatgagaatggagttttttttttcttttatttgggaagataaatgagaatggtgttgagaggcaggtagaaccttgtggtctctattcctttgtcagaaaaaagatctataaaggactataagggtctgccaacacagatattcagctgacagtatatatttttcttgctgtatgaggttatccaaccctcaatttaaggaagcaataaatacaacattaactagaccaaaacgaaaccattttggttgaaaagttgaagaatttagttagtcaaatcaagatggaatagtggtgactaatggaaaggtaacaatcatttcacaaatagagttagccatgaactaaatactaaactgacaaaatatcaaatggaaatcatgtgcaataactgataatcataatggagaactctttcaacatgtgtgtagtaagtgaataacacatggcattatcctatttgtcattgcaaaaaataaaataaaaaaaattggttggagatggaatttatggcctgaaaacatatataaataggtgttggtggctcactctactaccacctcaaaaaaccaatttgcattcctaaacaaaataaccattaatttccatacaaaaatgtctaacttgtcacgaaacctttttcccccatcaattgttaagcaagagccctctgattcagaggatgttctgcctaatgagtatccaactttgtaccccccatatagaactttgccgagttttgaatcccctccccaataacaccaacttcaaacatctgcaagaaagaatcagattcaccatcacccccacaaataacaccaacttcaaccatatgcaagaatgaacaagaatcacctgcatctgactcctttgtgaaaaaggaatcgagttctccaacctcaccgcgagtaaggaaatatggaaaaatgaaatctccaaggaaaggcaagtgtaaatcttgccttgctaaggaggctgacaatgtgaaactgaagttcctccgtcgcaatgtgtccacgaaatctgagaaccttcgctgtgctgcacttgattgtagaacagttgtattcaagattcgccagctcctagatcagctaagtattattcttaatggaatacagactgttgctggagacatctttgtgcatgctgcccatgccaaagaacccagcgaagtgataactattgactgaggcatgggatatagacacaaccctttagatgcctaagataaataaaaagggctgtactacttaaaaactattggttttctatcaagttattatatgaagggtgtaatattaaggtagaagtggacagttttgtgtattgacattggcaatgcaagttgggtttagataatataatcagtatttgaagcggtgggggttggactatgaacaccacttcatgagaatgtacttaaactgaatagaattgtgctgctatgagtccactttcggatagcttaatataaaaaattttcttcatcattaattttgtctttctcaattagaatgacaatttacttgacttaataatttaataacaatgtcatacaaaatacttaactaatagttgaatgcaataacctcttactaagattatttagatcaaataatttattgacttctactgtaaaagttaaactttaaacttttggataaatacacttaacaccacagttgagatatatgggtataaacaaatctacacaagtaaatgggccaaatctacctatatatgcacagtataactaaagcccatggaaggacaacccactcattactctataagaaggaggggtgggtggagacataatatattctcacaattactctgaaagaaactacagttccaaaacaatgccttccactagtattctcaatacaattttatttcactcagatgacagttcgttaagcttgttgcattcaatatagagccacaacaaacataaaagaaccagattcatttcattttggggcaactaaccaattacagaatagagtcattcaccagttagagactacataccttcctcctctcaggtaagaagattatgtgttcaatttaaccttccaatattaactacagtagtactcatgaatttagccttatttactttttttttctgtgatatatagcacatttgagagataaaattttgtttctaacacttagaaacaaatgttgaaaaaataatacaattttcatttttgtataagtcaagaacccatgcagaaaaccctcaatttttttcattttattttatttattagaggagtctatagaaagcaggtaaatctttcaatgtatttttatgggacacttaataagtctttaatattttatttaatttcaaaagagagttgttaatattttgttttcagatttacccatagtagagtatttaaaatgtattcttcaaattcacattcttaaagtgaaggtgtgaaatctattcaaaaaaaaaaagtgaaggtgtgaaatacatatagttctctttaaataaaaatggggatatggatagtcagatgtagtattgtagccggattcaattaattttctcatgggttacattaaaagaaggctacataggaagttttctcaactttatgagaaaacttggacactttctatcattcttttccatataatcataatatagatttctcatagttgtcagacagtaaaatatatcaaagtgcaaaagaccaatgaatagttaaacaatccacagttgcaaaggacttgtggaagttaaccaatccacagttgcacatattaaaaaacagttttatgtgcgataagtgaactagatgaatatgcactactaaattttatttagtcattctgaactaggtgaatatcacagtgcaccattggctacaacaagacaaggtaagtaaaatgagattcacagggtgacttgacttttatttatttatttttttttatgcgtgtattgtagttaagataaaccattacctacaatatattctattcatgtcttcaactcttcgaagcaccctcagaaagttttaatatcttagtgaattataatatagatatatttaaaacagaatctggaaaacgttcaatcttgcatgtaaaaatagaatggatttcatagttttgcaaagaagataaactatgttaaattttcatttccactacaggtccttacaacagaatttcatggaggacactgcaccaccccaaatagatgatgaatcatttagttgttggttaagcctaatcaatcaactcgaaatcagcaaagaacccagggacctgacaaaagaagatctactcaacaaatcgctaccaactaacagcctatgggaagctttttactatagctactcaaggtggattggattcagtgttagaaaacatgacgttagaaaggacactgaaaacaatgaatggcagcgtgtttgggtttgctcaagacagggaacacgaaaaaataagtggataaacttggaaaatcgaaaaagaatagctaaaccaataacaagagtgggttgcccagcacgtatacgagtcaatttggacaggtcaaacaatacatgggttgtgagagactttgagccacaccacaatcacaacttagtgttgcccatagaaaaccaattcctaagatccaacaggaaggtaaccacagaaattggtgagcaagttatgtctacgagaagatccgggatacgaacttgtcacatactaaatcatttggcacaagaaagaggtggtcaggattatgtccctttccaaagtagagacctttataattggattggtgataaggcaaaatcgactgaaacagaaaccgactctgagggagcattaggatatttggaatgtcttgcaagaaaggatgaccaattctatggaatctacagcatagacgaccagacaaggctagcaaatcttttttggtgtgatggaatttcaaggcgagattaccaaactttcggagatgttttggcttttgacacgacttacaagacaaatgcttacaagaagccattattgatccttgttggtgtgaaccaccactttcgaacaacggtctttggacttgctttactatgtgacgagagtgcctcaacatttatatgggttctacagtgcttccttgatgcgatgtataacaaaccaccttcagtagttatcacggatggtgacaaggcaatgcgagaagccattaatgttgtaatgccaaatgcggtacaccggttgtgtgcttggcacatatcaaccaatgcctcaaaagcagtcccaaatccctctttcaaaacagccatgaatcacctcttgtatcattactattttcaggaagaagagtgggaacaagagtggaaatcagttatggagaaattcggtctgcaaacaaatggttggtgtcaggctcagtatgaaacaaagagaaattgggcagaaacttttcttcgcggtcattttatggctggatcaaggacaactcaaagatcagagtcaactaattcatatttgaaccaattcttgtcaactaaactcaagctaagagactttattggtcaaattgataatgcattacaaaagatacgacacaatgagcttgaagatgacttcaaaagcaaccactcatcaccccatattccacgggacgtgttgagtgtgtaccatgaacaatttgcaacgtactacacaaggaatatgtacgataaggtggcggagcaaataaaagacagtctattttacaaagcaaaggaaattgatagaaccactgactctcgagaattttatttggaaagatttcctactggtttggtacgtcactcggtgaccttgaatgaaataaacaaccacatgaagtgcacttgtttgcttttcgagacagatgggatagcgtgtaggcacttgttcgctgtcatgaaaaatgaaaatattcaactaattcctccatcactaataaaggaccgttggagaaaggatgcaaagacaagaataaatctaaatgtcactccccatttaagggtgcccacagatgtattgcaaaccacaagatggggaactttgacgtccgcattcaattgtatggcccaatatgcaacaaaacacgaggacacttacgaggatgcgaaaaaagaaataatagcattgacatccaaattcaaaaatttgtgtcaacaacgtcaaattattattaatgatgatgaaataactaccacaagaggggaatacatacaacggagaattgtacaagacccagttatagttaagacaaaaggtcgtgaggcaaaaaaaggcaaagcaaaagaaaatgacaacactattgaagaagatttttcgaggaagcaaaaaaggtgtcgcctttgcaatcaattgggccaacaacaggtcaacttgttcatacaaagaagaccctttgaaaaacacagaagatacatcccttcatgtttagcgagccccaaccaatcgatactaacaacttttacaacaataaggttgatcgaaacaattaggaggctcaattcacacacaacaacgactcaagcacattcccaacctacaaccattttatatgtgctgttataatcagagtttcattatgtatgaa

SEQ ID NO: 28305 - DNA, 3816 bp, Cannabis sativa
  modified_base (2894)..(2905): a, c, t, g, unknown or other
  modified_base (3602)..(3608): a, c, t, g, unknown or other
ttcttctaagttcatgtttatacacacctacccaaagtgttaaaaatggagctaagaaaatgtgtgaaaaccctttcagatgctaactaactgaaagaactcgcgccaaatcggtatgcagtccatggccaccctaaaccaaaaaaagaagaagaagaagaagaatcagtgttaataacaatacatacttactcaaccaactttatatctttttggttttgagttaaatgaaaggtggaattgttctttaggtgtttcttaaaacattcttcacaccattatctgaaaaccaagttagctaacttgttgaatcgtttacaagataatggaacaaacttagaagaaagtaaattatgtaagattatccgcaaaggttttttccacctttcattctttatgttcaccattattataacagtgaacataattcgaataaaaaccacttgggtagaattcgcttccaaaaactagcttgaggggaggaggctattattaatcaaccaatcccataattgatcaatgttggctcttaacagtacattttcctttggagccgacatcaatgatggcccatgatttttttcactcccaaaagccgacatccatgacaactcactctacgatagcttactctacagtagcttattctgggcctaatccacaggtcgcccttacgcgattcggtctcacttgagagtgcatggctctgataccattcgatacaaccacttgggtagaactcactcccgaaagctagtttaagaaaggagagtgcccaaatggttatataccactaaccaatctcatccttagttaatgtccatttgagagtaataattttgataccataagatacaaccactaccacttaggtagaatttactcccaaaagctagcttgaggaagatgggttactaagtagttattcactactaactaatcctatacttgatcaatatgggatactaatagctcccctaaaaaacacaacacacaaatccatttaacacatggttggtgattcttaaacaaacttataaaccttgacagtcaaacataaaacaaaagatggaacacgcaccttgcaaaccactatgtgtgccacgggaatcccttgattcccaaatcttgctaaaagagaaagatcgccgataaggtccaagaccttatggcgacaaggttcatcgtggaaacgaagtggagggttcaaccaacctttactagcactgtaaaatgtaagaaagaaaaaataagtttaacagaaaatcagttgttgaccaaactaagaattaggcctgcatggatgtctaagaactttcattccaccaaattaaaaatttaacatcagtcagtcccagctcaatacaaaatagataatatctgttttagttcaaaccaagctaaagcctaagagtttcatcatcaaaatcatatttagtaaggaaacaagactctttggttatgcttttgaaaaatgttttaaatcaagaaatagatatcttcttattgctttctaagagctaattaagaaaacatttatccaagaagtagaactgaagtaagatagctagtttctagtccagcattgacattaaaatcttaaaaagagaaaaaaacaatgaagcttctgacctacaaacaattgcattttctagtccaccacctttgatgagtcctaattcgtacattttctccacctgtagcaaattcccatcataatttagcattagcagacaccaccaatcttgaaaggaaatcccaatttattgtaaaatttgtataggcaggcatagatatgtggtcttgctaataagcaacattaataagagtgagactagttttaatgaacaatggacaaaacatgcaaagtgcatagatcatgatttgatttgattttattatgttagacaaagcatacttgagttggttcctaaacaagtaccaaactcataaaacaaacaaatagataatcataagaagagtaatctaatgatgggagatatgttagaagtgacctcttcataaatacaaaaagttcttgatgaagctatttggttggagtaataagagttatcgaaaggaaccgacgacaagcactgggatccaatagcaggggcctgcaaggtgttgttgaagcttcattaaatgaagctaagtaattctttcaattcaactcaattttatcaagtattactaaattttcaaccaattctcaaaataatgcaattccaaatgaagtgatttcagtccaactcaactgaaaaggtttgggaaataagattctgttcaatatgtcaattcaaataacattagtttaaggagatttagaagctaataatcaaagttttaaatccaataatcacatgtaatacctggggaaagtcaatcccacaagtgatggaaacttttggagatggaaatgcagccacaaaagaacctttcttccgaattcgaatcggtttatttacatgtgctgccatcttttcataactattcccacactcatctgttgccatcttcaaaccaacctcttctattgcttccacccactcacttgctgatccatcaaaaattggaacctgcaatacaatgactcactcacttgtggctaattttactgaccataaattgtcttgcttacccaaaaaccttattcaagctccttgttcatgaagctagacatctctgggttttacattcaataaaacaaagcaaaaatctgtgctttatccaatgatttaatgaaggggtggcaagaaaaattatgcaaatataaatttgaaaagttcatgtgacaatgacactaaaaacatttttttaacacgagaacttcccaggtcacttatcctagtattactctcgcccaaacacgtttaactgcagagttctgatgnnnnnnnnnnnnttagtgctggtatgatcgcacccacaatgacactaaaaacattaatttaccttataacacgctaatacaatatgaacacgatacgagattttgtaagtttgacactgaatcagaattttatgcaaactgtgttggtgttcatgttttataaatttttcgtgtcaagattcatgtttgtgttgaaaaattttcaactcgacacgccaacacgaattgcgaaaaaataatttggttaggaaaagccaaaaatgtttgattactgagctgtctctcttttttttttttttttgttagacaaatttttgaaggttcgaacctcaacgtggtgatcatctcctacaggttccgaattcgctatctcaattcgacaattatcgactcccatggcttccaaagccgaaagcaagtgttcgatggttgaaattctataaccatctttgcatagcgtggtgcacagaggcgattccatggcgtaatcgatcgtagcaggaattacatttgatcggaaatcgaaatatctcccttctccggcgaaccccggccatattttcactgtggaaactttaccggagtgtagagctttccccgttctttctatataacctgccagagtttgctgaaacctaccggtctacactcaaatcaatcacaaaattaaaccacttacatgtatacacacgcatatatatatatatannnnnnnagagagagagagagagagtaccgatttccatgaaatgaatttggaggacttgagaacattgaaagcactggaaagagtcatatcaatgagaaatggcggcggctagttttcactcagtcggtggtttcttacataaacaggttaagacccaaaacgacgtcgttttagcattgttttacactatccaacagtccaagaccgaaccttt

SEQ ID NO: 28306 - DNA, 1952 bp, Cannabis sativa
agtagtaaacaattaatttattattggacagaaattttgaattgataatacttcaacaaataataataatataacttgtgatatttttacggggtattattccatatattgttttttaattttttttttaaaaaaaatttacggtttgggtttttaaagtggttgtagcgctagtttttttgttgcgatttaagttgcaacgttaatttcaataagaatttctatatagaattccgttaaaatgtaaaatgtaaaaaaaaaaatgtttagaagtgtaaaaataaaaaagaccctatttttatttaattaaagagtttttttttgcaactaaatcttcccaatcatcgtttcaattgcatttaaccattcaagctcaaatttttagcagtaaaattctccaaattattgaattagtagcaaatttaaggtgtcattcggttaactatcactatgaactatttatgtgttaaatctaatacacatgtcacgtttatattggtacaaataatattattatttaaaaattattttcaaatttattttaaaattaactaaaatatttcaaaaaataaaaaatattataaatcttgaaataatttttatgattttaaaataataatattagatgaaccgatataaatttgatacatttacaaaagtgtatacagtttggaggattttacaattaaaatttaagtttaaatgattaagtacaaatgaagtgatagttaagagaatttcaccgtaaaaaaactcttaattaaatgaggggatagaggttattaatattcactatttcaaaatttagtattactttagtatttattatttttaatttttttacaaaaatatattcaaagttactaaaacaatattgattatcactaggttaaacattgactattcgtttttgtttttttttttatatataaaattctttgaattagaccaattaagagtagatacgtatacgataatccacagttaactacattagcaaaaaagataatgatgacccgtaccattttaacattagatatttatattctcaaaatttaaatattaaaatagaaggacaaattataatatattgagagaagagtagaagacaatggcaatggaaatgggaatgggagatgaagggttttgcaagtggggatggccaattaagtgagaaagccatcaaaatgggacccaagttttggtgaagataggctggctgatgttgctatttctatttctatatttgtatgtatatgttatgtgtatatgtataaataatgtatgggccaaattcctacatatgtctaatctaaatacaatacatcacctcagcccttagcttagggtcccaactctcaaccatatggttaattaaattgattaaccattccaataccactcctttaattaaatttatttggttaatgaaataaaaacaaattattttaaccattattatattattagatttattttacattattaatatggtattttgttatttggttgacacaaattgccgtaccattttcttatttttatcaagtgaacacgatctaaaaccaattatcatccaaatgattttactttacctcaattcaatgtacatgtcagcaagttggtagtgattagtttctaaatgtcatcatgacacgtcattatatcttagctataatatacagagatataaaatgcttggcgaaagaaaaagagagaaagaaattcgttcacattgttgaaatatagttcacatttttttttcttttttgagaaaaaaataataatttcattaaaaggttaaaatttaaagagattcaataatcattataagcatgataaattaaataagcagtaaacccaaccaacaaatacgggaagatggcgtttggttggaagtaatgaaatggaatagaatggaaaggaaacaattttcattccattcttttgtt

SEQ ID NO: 28307 - DNA, 8083 bp, Cannabis sativa
  modified_base (7853)..(7853): a, c, t, g, unknown or other
ttttattttttgttgctttctctgcacttctagggttttgtttccagaccttcaaaattaaatttattcaataatttaaggaagcaaagaaagataaaagaccaacgcacacacagacgacccccccaacaacaaattaaaaaaaaaaaaacccctaacattctgaaggtgtgtgtaaaataataatgcgaatatgaattcactagttctattgggtgatcgagatcggagtggaatatgaacttgttcgtttgccaatggtgaggatggtgatggcgatttttcttgaagctcagagatttgtatggaagaggatgcctttgctgttctaatgctaatgctaacgcgcctcatcaatttatattctattctggtaacttagagaggagaaaatcgcttacttaaacatgcttttctccaagctcgatgactctcctatgttccgcaagcaggttccgttcgtcattcttgtctttctaacccattttctttttgcatgttcttcttcttccttttttttttttgaagcgtcgtagtttccaatgctgtgtttgtttcctgagaaaaaagttattggaagccgagtcagtatcttttatttgaagttatattgaattctcttggcgactcatttgatcatattatgctacgaagtttagtggacggaccttttagaagcattaccttaagtttcctgctctagctagattttgtagtttaggaaagttaatgctaatattttggcgttttagatgtggtgatcgaacgtgtttaacttacactagacctaattccatcaaatctttggatttgctgattataataaatgtttatgatcatttatgaatagtgatatttagcatttacattgctggggcttgattaattttcgctctttatctttagaactttggtagatacgacgaaatttaaatctgtagccacgtttttttattttctttcaagaagcgaagtttttattagatgaagagaaggtttacaaaggatgaaacactctgacgtcactttgtcttcttacataaattgttgtttactcaaatgtttgatcatttggtcaggggagggaaaaaacaatggaattttaatgagaagattgcggacttctattaagtttgattcattgtctgttccagataaactttattggttcaatgaaaatattactacatacctttttgctctagcattaggctctatgcatttctactcaagtaagttgtttactgatgctttctttggtgaaacagatacagtgcttggaagaaagtgctgaatcattgagagacagaagtttgaagttttacaaaggaagccgaaaatacacgtatgtaaatacatttatgtatacttatatttaattggtatatgaaatatatcattataagttaattgacctctgttttgttcccacttcacatgttgatatagcatgatatttaatggtttcttagccccatttattttcttctgtttagtgaattaatcttttgtcttctttaaaaatctaattatgttcatctttctgcttgcagcgaaggacttggggaaggatatgatggagacattgcatttgcaagtgcactagaagcttttggtgggggacacaatgatcctatcagtgtagcttttggaggtacttggaagttgttttattggttgtgatgcattaatttatgtacctatttctgcaaagcaattttctttttccttctgaaaaaaaaatgatcacatgggctgtggttaaatattctgcgggcggtccaagtctgccctaatagtctgatagtagggatgaaagcatttaccctaaaatgttattttgaattggagatgtatatttctagccaagagattgagaaaatgtgagaggaagtggaaatggtttggttgtgaatttatgtgttaacttctgtttctttgtaggccctgttatgacaaaatttactattgcattgagagaaatcggaacatacaaggaagttcttcggtcccaggtaattgtattgacaaactctcctcatcttcttaatcatatattgttggacataaaattgtcttttttttcttggaggatgcaagtgttacattttctgacatgcttcgtatattacctctcaggttgagcatatgcttaatgacagattactgcattttgtgaatattgatttgttggaggtcaaggtacaatgctggattagtactgttctaattattttatatttgtggatgctttatacttcttattagttggtgatgtgcataggacatgtatcgaattttgccaggcacaattgtgtacaggcttaaatgcattaattaaaacacgctgttggtgtggtatttaaccaaaagatagttattgtattaaaatcgcttttgatttgtcatattcgacacacctatcaaggatctatcaaatgtttcttagttgttacatttggtttttcacctgagataatcatatggggatggagaatgttattttcaatttgttaactgcaaagttctcctgttcctgtttgtgcttttttaatttttcttacaaagtttgttttatacaggaagctaggaagcgttttgacaaggctagccttatatatgaccaggtattctcttggttctttctatgattgtgtttccaccgtgttcatgttaattggctttcatttatatactcttctgaccggaattctcatctgtcgtattttttgaaaaatatggcagtagtactagtgatattgtatttaatttagatttgcaatgatattaccttttagagggtatagcttaaatggaatttgatgtaaatcttacatgtgatgatgatgaatggatgatttgtttagtgacaacatttgcagctttactttagggtatctttcaatgtgtggttttagctatatgatttatggatgcacttcttcatttttgtactcttgtttggagtactttgtaatcttttggttcagttacaagtaaataagccgactttgatatcaggcacataagctagtgtgagagttttgttggcttgaataggttgaccttgcctttatagaggtagagatcttattaatctctcatctccgtttgattaacgctgcaggctcgtgaaaaatatctatccctgaggaaaagcacaaaaactgatgtagcatctgttttagaagaggtatttcattcctagttctttagagtttaaatttacatgcttacatctatgacatatttcggtttggcatttgtgaatttctccactccaccattctaatatagtttgaggtattctaggagcttcatcatgcaagatctacatttgaacaagctcgttttagcctggtaaggctgttttctggttaagatgtgctttaatttaattccttaaatgtaatgagaaatttgttccagaaattctcattacataccttatgggtttgtaatgttgatcattctctttcagattacagctctttctaacgtagaagcaaaaaagaggtttgaatttctggaagctgttagcgggacaatggatgctcatttgcgctacttcaaacaggtggattttatggcaggtctttttatgctcgtgttaccacatattttatcacaagtgtgttaatattcaatgatattgacatgtagggctatgagttattgcatcaaatggagccatatattaatcaggtataattttagtgattgtgtttgttaaaagtatgttcgattgtgttttttagctagcttttcttgtgtcatcattgttccctttccctatgttttgaccttggattttaagaggggtttacatacatttacattaggagaaagactgatcatgaaaattggtgggtgccatggccatgggtcagaattgtggcgggtaatgggtgtcatggaaatagtggtagtgttgattgtaataagtagcagagttatcaggagtatagtagtggttttatgttgtgtatagatgagaccagccacaagaactcctgggaattgtattccttcgctggttgaatacagaagcttccctgttatctcactctctttgttcttgctgcttgttgtttgagtccggttgatgcatctcttctaattgctccaaatcaacttaactcaccaaggcctttttcttttagctgtgcatatgatttgtgaatcagtagcatgccagaagaattctgtggtgaatagtgaatacaaattactgtcaatatggcttgattacatgatgggctgagattttaaaatgttttttattttacgatgtaaatgtattggaagattcatttattatcctttattattttgcaggtattgacttatgcacaacaatctagagaaaggtccaactatgagcaggcggctcttagtgaaaggatgcaggagtttaaaaggcaggttgatcgtgagagtcggtggtcttccaatggttctaatgggtctcctaatggagatggtatacaagcgattggccgaagttctcataaaatgatagaggcagttatgcaatctgctgcaaagggaaaggtttgataaaagacttttttgagcagtttatgtttcctccatctgaatttctctccgcctcaagcccacactgtttgtccatcttaatgttttctagcgtttctcaatttaacatattgagcattatatcaggttcaaacaattcgacagggttatctctcaaaacgttcctcaaatttgaggggtgactggaaaagaagattttttgttcttgatagccgaggaatgctttattattatcgaaaacagtgcagcaaatcatctgtaagtaaaatgttatgaaaattagtgatgatgcaagggttaaattatagccataataaacttgactcttgcattatgtatacttgtaggcttctggaagtcaactttcaggtcagaggaacagttctgagcttggttctggacttttaagtaggtggctttcttctcattatcatggtggagttcatgatgagaagtctgttgctcatcacaccgtgaatctgctcacatcaacaatcaaagtcgacgctgatcagtcagatctgagattttgtttcaggattatttctccaacaaagaactacaccctacaggttcgcctcagtgatagcttgaacgtttgggattataatttactaaaaagaactcgcggttgtgaatctgttaaatttatgttgtggttctgccctgagggttgatttaactagcatttgttcctcaatgaatatttatttatgcttgtcagtgcaggcagagagtgcacttgatcaaatggattggattgaaaagataacaggagttattgcttcactacttagctcacaaggtcctgacagggtaattatgttcacattttgcattgctatacatgtatatacaaccattgattcccatagaattttcagtgatgtgtgctctgttttatttcagtgtctgcctgctagtcccatgggaagcagtcaccatcgttctaccagtgagagtagttcatttgaaagctctgactttgatcacactgcagttgacgagcttacactggagaagagttctgcacatcttgagcgcccattgagaggttctcagcagcaacggtcttgcatgaaaaatgagaagccaattgatgtcttgcgtagagtatgtggcaatgacaggtgtgctgactgtggtgcctctgaaccagattgggcatcattaaatcttggtgtacttgtttgcattgaatgttctggtgttcatcgtaatcttggggtacatatatcaaaggtaaaatttgagtttaactacttgggtcttttgttatgcattatgtcggacatctgaatctgaccctctaaatgcatattcttgtgaaggagagttactttagaataatgaagattgggtaagacgtgaaggtttttggaaatagatatattaaatatatatctatataaagacttgaacctagctcacgtggttgggttggtggcttaagtttccctgaagtatatgttacaatatatgtatttgtaaatataaaagttgaataaaaatttagataaggcgcattggtttcagtgaatgttttaatataagcaaaaaaacttgtcccatgtatgattcttggtaaatacgataattttgatttagcacacaattggatatctatatatgcgaggcatctttgcatttacatttatgagtacatttttatattcttggtcttgatggtttctgccaattctgtaatgtcataattaaccacgattcatttgcagctaaacctttgtttacttttctttttcaggtaaggtctcttacactagatgttaaagtgtgggagccttctgttattggattgtttcaatctttgggtaatacctttgccaattctgtctgggaggagctattgcaatcgagaagtgctttccagattgatcttgtctcaacagggtaaaaatccttttaatgatcaaaatagaatttccagagtgatatatttatatatacattaatgtgatacattaatatatttacacaaatctgataaaccaaatggctaacctttatcctttgttcctttggtgaagctcatacaaatctgataaaccacaactgggttttgtcagtaaaccaagtcatgccgattctatatcagtgaaagaaaaatttattcatgcaaaggtgaacactgattgatattcctttgctaaggttttaatattatcttttcatttctaaatgacaaaccaaagttgagaggtccctgagtgaaacatagtaaatgtgtagccttctaattgcagtatgcagaaaaactttttcttcgcaagccgaaagataggcaatatcctcatctggtggcacaacagatgtgggagggcgttcagactaatgacaaaaaagcggtgtaccgtcacattgttaattccgaaccagatgtaaatgcaatttataagcaagcatctttcggctcatctttaactcttgccaaagtaatgctattgcatgaacagccaagccttgagacaggggattccatgggaaggtcttctaccagctctttgaacttgggtggtacaagtgaaggccagacaatggacgatctagatgaatgcactttgcttcatcttgcatgtgaaactgcagatataggcatgctcgaactcctcctacagtatggtgcaaatgtaaatgctactgatataagaggtcaaacgcccctccaccgttgtattctcagagggaaaacaacatatattaaatggcttcttgcaaggtgctttaatgatctggttcctgtcagtttgtttttagttgcatcttatttttgttacaaaactgagtttttattgaacttgcaggggagccgatacacgagcagtggacagggaaggcaaaacaccctttgagcttgctgttgagctaaactttgatgatactgatatccttgctctattatccgattccagtggatgacgaggaatcaccgaagagccaactaagatgctggaatttagtgtgaaaagggagaagataaaaaaaaaattacatatatatagatatatatacaaaagtcttgttgcatttgtataattaaattccataatgcgagagatattctccatgtcaccgggggaatattttgttggggtgtacttgtagaagaggggaggagttgagtggtagtggaagggctcacttggttgtggaagatggttccatgtaatttattttcattggttcctccattactctggtgaatcaaagagcatcatgctgctctaaagccagagctatgtgatttgttttgctatatatataaatatatatanatatatatattatatatgtatgttaattcagtttgtctgcttccttttgtggcgaagctgtgagatgtagctttaggtcattgtgtatttgtacattaatttcttctttttagtgaagatttcttgtggctgttgctgttaactgtttggtaactaaattttcctacatccaaccaaggacatgagctttctttttgttctcatgtgccaacttagtgtacatacaattg

SEQ ID NO: 28308 - DNA, 3007 bp, Cannabis sativa
aatatatattattaagatgtagtcttaatgaacaacaacctgttcatcaggactacatcttaagatttattttgaattatattacataactatatccgaaacctatatatatataatacctgcaaatcgggggaaaggcgtccttttctaaaggaccgtcttggaaatcgaaaataattgagtctctccaatttgctgttcttgaaacaagcaaatctccattacaatagaatctaactcttctctttggatctcttgagtaccaagctatcttagtctcattaggttgttcatgaaaatctcttataccatccaacatgttgttcatcacaaaatcaggaattccatggttaatcatttgaaagaaaccccacgactccgccgcttctcgaatttttccaacaattaaacctcgtttagtagtgtcaacatcatcatcaaaaccctcgaggtcaatgatcggaacctggtcatcataatcattatcatgatgctggtcatgataatgattattattattttcctcatcagccgaaaccagagtgttttctttatttttgaagagaaaactctctggtggatggatgaggaatctcgggaccttggtgactccagagtcaacaaggcctttgactccagctcttgtttcgtcaaatagtttcacttccatctctctatcataaaaacatgatgactctacttccatggctagctgaagaaaaacaaaaaagctaaaagaaagagagaaggagaaactgtttttttttttttttgagagagagagatataaagatgaattagatgcctctctcactaggtggttatgtatatatattattcaaatgaagagatattaaaagataaatatatttataataagttagagaaaaagccaagagatatgagatacccactattggcattttcgtaactttatatatatataaaaattgtcagctgaatggaaaatggcttttcattaataacatatatattgtttcgtctctttctttcttttacagatagatatgatacatataattatatatatcatatatatttatttatgtgtaaaatgtaccttactaagatatagtcttttttttttccataacattattggcaaacgcccatttagtcacattggaccgcgtagttagatatacagtccatactatatagctgatgattcaattaattttggcctatttacaaaactataaatataatttatttgagaatgtacgttactaagatatatatacagtttacacctcatgattcaattaattttggcctatttataaacaatatatgactatacatatataactagttgccaaaaatactgatgagcgttgcagatggaataatgcagctcataataattacattttttacttgaaaaataaaaaatttattaatttcagtcggtccatatgatggtcaagtggcacgtacgtacacttaaaattcatcatacatatatacatatatatatataggtgatcttaatttccagttgtaaaaacccatttatatatacatatacatacatatatataacacattataattatatataattcagtcacagatgaccaagggccacttactacacttgttgatgatcatcaattgtacatatatatatgtatatatatgggtcatttgtattaatggtgattcaactgtagatttcaaaatcttgtggtaagaaaaagtcacttgctaagttaccaacagccctgtgatgtgaatattacattttttttaaagaatctcttttgtctttttgcattaaatttgaaattacttttttcatcagaaatggtgattccaaccaatgaggaaatagattttggtgaagaatattatcagcatgaattcatgatttaacgattgaaaaccaaaaatatagtaataattgagtttaaactacattttattactttaattaaagtactacgtacatcaaatataataaaactactattattaagatacgagctgagtgcgtatatatatgtaaggggtcttgaaatcaaatcctaaatttatgcaacgatctataattaatgtatattaatttaagaggcttacaaattaaattttaaaaaaaatacatgaaacaaattttataatgtacatatcaaatgtatctacatatatatatatatacatgtaataatttgagtataagaaacatcttatgaacacaagtatcacgtttgttagggaggatctatcattgttatataggaaattaaattaagttgctacaaaaataattgattattaatttacctacagcctaactatatgtatcacttatacttgtaattattgtaacatatactagcacgcatagtattctattgtttttagggtactactagtatatatatattctaatctttttagggcaccagtagtatttaagtggtgatttgcgattaattagtaatattttataaaaattattatattgaattatgtaagactaaggctcgaccttaggtataggcgagctaggctataccacctagcccaaaggctcgaattttttttttttttttacttttcaaaatatgtacatattttttttactgattttaaaaaatactacatttttttctaaataaagactcaaaaatagttttttttcctataacacgctaaatttttaagtcggccctaataaaatttgataattaattgtactaacaacgatatgacatattgaaaaatgttaaatactactagtatattttagtatttctcttaattaatggtctaaaactaaaatattttgtaattacacttataatttatgcaaaatatataaaatatcctactagctagctattaattttttttttctcttaatacatgttgacatgctacttggaccaatcataccaataatgtaaagtcaagagatcttacacatatgtcatttagagttcgtttggtacgctgtattacaccgtattgtaatgtattg

SEQ ID NO: 28309 - DNA, 1266 bp, Cannabis sativa
aaacaatccctagctcttttcaaataggattgctataaggcaaaagtggtgttaactattaagcacttgagcattgctattgggcaagtggtatctcgcttctctggatatgtcgtttcgtaattagttagcgatattttttaaaaattattatattaaaatagtttagactcgttagaccaataacgatattcacacataagaggttgttagtcactattgatactttttagtatttctctaagcactattaggagattgcttcttaaaaattagttgtaataaattatgtgagatctgatacttaattaaaatttaatttttcacgcttatggccaataatttaaaaataaactcaagttaaagatcataaggaattaaaacttatttatacccttgctatttgaaaagtcctccttttaactcaatttatccatcttttaacactgataaatttaatcaactatcgcaccatttcaaacttttatccctaaccttcatattacattattatcgtacctactatcatactatatcgagcattcatagaaaaattagcaaactttatcatggtataaattttaagcaacaacttaaactgtatcgaatactattaaactttatcaactactctaatctattgaaccttcatccctaacctataaattactctatcatcgtaccaaccataccatcgtacactatcaatcaaacataaaaccaataaaaattaaataggattgtattggtttgcatattttcaattttgtaagaaccaaataattattttgatttatgaaaatgtttaaaatgaaaccaaactaattaaatgctcaaactgaaccaaatcgttggtcttaagaatgaatttgttcggtttgaaaccatgatttgtattttgtaattattttaaaaaaaaattaagattgtttctttttttactaacttttttattttttattttcaatgtttataatgttagaaaaattaataataaatccaatatcaatttgtatataacgcagaacacaataataatatataataattaggtatgcgtacctgattgattcatagcaattacctcaattcgattcatagcaattacttcaattcgatagtgtaatactatcaactaagtcttcctccttatatctctaaatagaagcaggttatttatctgattatcaaaaggtatacaattgtgatgagacaatatgtatttatagagttagggaggggacttagctacaaaaccctagttgg

SEQ ID NO: 28310 - DNA, 1127 bp, Cannabis sativa
gtacatgtcaaagttcagggggtaaaaatccaaattagcctatcagaaattgtgcttatcatgacttgagggagtgatctggcccctagcagacttaagtggggctagctgaattcaagtatgccttggctaagcatctttctgacccgccgagaaatgctaaaaggtaccagtggtgcctacaaccttctatgtgtcaatatcgctattggtccaattaagtatcaggtctcatataatttaatgtaataacttttagagagtatcgctagctaatcgcaagacatgtcaagagatgctaggcaccactggtgtctaatagcaatgctccctacactctctaagcaacattttttttaattgtggacaatttaattggaacattcctgattggtctctttttggattgttttgacaattttttgtgttttatgactagcttagttttctcaattttgccatatttaagatttgttatttattctgccaagaaatattaattgattaattatcattaatttcttattttacaagaattaaaataaatattattttctctaaaataatatatttctctctttaatattatttaataataatattatatttgactaattaatataattttatctaataaaactaaataattaaatactattagttatacaattcacaattgtcataattaatcaaaataataatttcacaaattagtatcttgcccttaaaaatttatttgacatagaaattaattttcacttgtaattcatttattaaataaaactttccacagtacagtgttgtataaaggtgactcggggaccatggacctatatttcgaagctccaataatccttgattattatcaatctcattaataaaataatccggtttattcattctataatttactctactataaatatagaaatacactcttggacaatatagaattatatttacataattcttacttgtagtctattgatataatcagtataagcaatttgccctccaatcattagttcattattaaagttgaccaaaaaactattttacccttctaattatctcttcctttcttatgtaccattagttcaatttgaacagttaatctataacttatt

SEQ ID NO: 28311 - DNA, 1029 bp, Cannabis sativa
aaaaacaaatataagaactattctgtttatattagtttctctttcgtaaataagattattttactccaagatagtcttcgatggcatttgacatataatgtgaagaggtggaattattttaaagatattttttagagatctaatatattaagaaaataataaacccatgttgtctgtattatttttattattatatgagagccgttgatgactagctcttggctcactgggggaattcaattaggctacatttggagactaaatatttggttaaagccagctaggatgaccccattaattgcattaatcaaaagtaaatgccaacaaagttgatcccttccaacagcttcccctcgacgactagctctcaggctctcactataaaaatatgtcctcatccttcctttcatatcataaataaatcaagttctctctcccttccccaacttctctatctgatagtgtatccaagagaatagttttcacaaacttagatacattggccagagataaagtcctccgataaaatatgatgaatccggggcaaggccccaataggggtcgcttatggccccaaatggcctttgcaatggccatgcttgtagttgcaagcaatgtcgtttcagtttccgctgatccttacttatacaactctccaccacctccttatgagtacaaatctccaccaccaccagagaagtctcctccaccaccatatcactacagttctcccccaccacctgaaaagtctccaccaccataccattacacctctcccccaccaccggagaaatctcctcctccaccataccattactcatccccaccaccaccaaaacatgaagagaagccatatcactactcttccccaccaccaccatctccatctcctcctcctccatacgtctacagctcaccacccccaccaaagaagtccccaccaccaccataccactacacatccccaccaccaccttctccttctcctccaccaccatacgtctacagctcaccaccaccaccaaagaa

SEQ ID NO: 28312 - DNA, 1552 bp, Cannabis sativa
aaagcttttaaacaattacaaaagacaagaaaatagagtaatacctatattttcttgccatcaataatgatatttgggatgtgagctataattggccagtcctcccctgtctccctctggactcttggtgttaacatcggacaaccaatgatataaatatcagaaagcgaagtgggtagtttttttggcaagcatcggaggtaatgacagccttcaattgtcaattcctcaagggaggtgaggtgctgaaaggccgcctcctctaagtgtgttaagttaaaaaagtacataaatgcaatcttctttaaagtggtcaaaggggcttgcatgagttgagctcttgggagtaataatggtaatagtacctcactgttatgtattacaagctctgtcaatgacggaaaataatctcctaacaatgtcactttgagtctgttgcagtcaaaaaatttaagattcttcaggtgtggaaaaacactaccttccataaatgaccactcttcaaacttctccaaattattaaactccaaggtctccaaagatctaaagaatgtctttttttgtattgcaccagaagaatcaacactagtagagcaataaaactttgaatctattctcaccacaccacaattcacaatcaaaagaactttgagagagggaagttgtcccaatgacggcaagaagctacaattactacaatacattaacttcaaacttaccaaattagacaagcaacgatgatcttccatccaatttgggaagctactgcctttgtaggaccaaatctcaagtttcttcaaatttggatgaggctcaacagtgcagagtctgagtagctctctttctttgtgcaagtcatcaagttcaggttcatagcgataatcccataccaaagataggtgactaagaaactttaaactctttaatggtgctgcaacatctgaaacttcctcaaggctactaactttttgtagtcccttaatagaaagactcccgtgcagatcttgaaactctttcaatagcttaatgccaccacaatctctagttcttccaacaacaaatgcattaagtgtttgcagattttgtagcttgcccaactgcaatggcatcccgaataaattcttctcaggaacactaagatgtcgcaacttgactaaattgcctatatcagttggtagttgagtgactttcctacatttctaacaatagtgtctccaaattatacaatttacatattgtgttaggtatctcttcaatatcaatacaacaatctaatctaacttaacttccttcaaaaaatatcttaaatacttcaaattgcctattgaattgggaaacttggtgatgctataatcacatatggatagtactctcaatcctgggaatgacttgtctaagtcctcaatctttaacagctccagcagatcaccgcttaactcttgttgccacaatatggtgcgcacgcccttcgctttgaataactcctcaaattccttggggtcattggctctttcacagtcacgcatgtacgaaaaatgacgaaccttgtgag

SEQ ID NO: 28313 - DNA, 2931 bp, Cannabis sativa
caactcacaacatccaaattccttttcaaaattctttgtcttccccaaattcgtcacatttcccaaattctttgccttcattacgtaagtatcttttacgtttttgaaattctgaaatgtgtttgagatttagggtgtaacgaataatttgcatgagtgtatctggccgactttgattttctttttgttgcttgcatgtctgccataggagatggtgaataggttttaggcttttggggttgtcttcaaatatcttgaaattaaagtgttgatttgcttgtatcatattgacagacaatattaggttatgtgaaactctatctttttggtggttttttgctgaaaaaatgaatttagaaaaatgttgttgagcatggatgggttttaatcctctatccaggacccttatggctccgaatgaaatacttcgagaattttccatcaaattcttgtgttcctaatgtgatcattctggagcaatgttctctgaggattttacttctggatgacaggtctgacggggacttctccaagcaattttgggggaggactctcccgtatcctttctagtgtggtattaactacttattttgttcttatcctttaccagttactaccatggcagacatcatctaacttgaggaagaggatctgatcaaggaacaatccggtgacacaacctcagaagaaatttacaattaatctccatgggagatggatcaaattgtaaacaaattccatagctacgaagtgttattgtcttacgaaaaggatcgtgtggtacgtgatatccctggtctgtgctagaataaaccttcgcacaagggggagtcgccttgtgtgtgtacagaaggatttagcgctaggagttgggcgcacattgtggtaggaacgcagctacctctcaagggttattttgtcaatttctacgcagaagtgggagttttgtccttttcaattcatcccacaagtgtacaagctgatggcagggtggtatgtcctctgtagagaccgaaaggttgaagttctaatgctaaatgagatactttacatttgtagtgtaaagtcatagcctatgtcaaaaaataaaaccaagatttatttttataagctgcagaaacactctaaggtggtctacctaactagcagccttaggcatgctcatgacttccatgactactgattcctcacctctagtttctcgttaaaaaatttcacttgatcgaatttgtttaacatcagtcgatattaccactctcttaaagatcgtgtgtaaggaaaattttgatcaaatgggtttaattgtatctcctttgatgcacattctttttagttggaccatgaaagaaatattatctgcatagtgaactattggtacttctttattaggtgttgttatccaaaagtttgcacatctgactggcacttacatgtagcataatctagccgacccttaatatgacaagggacttttgggcaaaaatgtgcctagcagatcccatatgaggctgatatgtgtgggttgtagattgcctttcaggaaccatctagccaaaccatcaacatgtcggccagagaaggggagattgactcaccttgcaaaaatgtttcacaagtaatcccacaagaaagataagtctcgaaaagggtctggtcaggtactgaatatgttagccaagaaaaacgacactaggaatgtccgataaagctacacaagccttgatttttccttcaacaacttccaaaaatatctctaattgtatcctacaaatgcgaatccaactaatctacccgagattgtaggagcttcaacaaatcgtaactgcaccctagaatatagggatatttactttttggttactccttttacgaagctgattgtaacaacttttctcctataaatagtgaatgaattcataggagaaagtgtttgaaatcataatctcgcactaagagcactttgctaaatattctctatatacatcttgagactttgagcttgtagatcgatcacaagacaaagaaactatatgagtcaagtgggtctacaagataaaactaaacgcagatggctttatcctaaagcacaaagcaagattagttgcaaaagggtactcacaataatatggagttgactacaacaaaatatttgctccaattgcacatctcgacacaataagggcattaatagctctagctgcacagaagaaataaaaaaaatttcaactcgatgtaaagtcaatatttcttaatgagtacctttaagaagaaatatacgtggaacaacctcaaggattagtggtgcaagaacaggaagataaagttcttaagttaaaaaaggccttgtatggcataaagcaagctctgcgagcttggtatggtagaatcaatcactacttcattgaacaagaattcaggatgagtaaaagtgagccaacactatacataaaaacacaaggtgtgaatgataaactaattgtctctttatacgttgatgatctcatttgcacagaaaataatgagaagatgataaggaagtttaaagaaaatatgatgaaaagtttcgagatgatcgccttgggcttattgcactactttctcagaatcaaaataactcaaaacgaagatgggatcctcattttagaaaagaagtatacagagacactattgaaggaattcaaaataaaaggatgtaagactgtatcaactccattagacaacaataaatcacttaagaaagaagatggctcaccaaaagccgatgaatcaaaattttgaagtctaatcggcagcttactctatctaattgctacaagaccagacataatgtgtgcagttagtcttctatcaagattcatgcatgatccaagtcaagttcactacagagtagctgtaaagcccgcttaattaatttggaaattatcagttaat

SEQ ID NO: 28314 - DNA, 2233 bp, Cannabis sativa
  modified_base (1679)..(1682): a, c, t, g, unknown or other
aatcacaagatgatatcctaatcctgattggacccccaaagatgtaccatttgggaggaagaggaagttgcctagctacttgaagggctacactgaggaaaagaagaaaaggcgagttctttcaaagaacgtaaatacggaaagaccacctaaccgcagattgctacgcacattcaagaggtggttgattgaggacatttcaaataatcgtcctaggaatgtgcataccggtgtcgacaatgtcaagttcttcacgaagttgtagctattggggcattggttggataataatgtaagtatataattatggtactcttttataatgtttttattattttttgtttttgctaatttttttgatattttgcgatatttttgcaatataaaatgtcgtccatattatgattgctttttgttcctattacttttctcgacattctcaacattattgcgacattgttgcgacataaaaatgtcatccatattctgattgctttttgtttcacgttatcttttttatcgatatgttcgtgacattttatgaatttcagcgacatatactatcctcaaaatagttttttagcttgtggttagtgtagtactttcacgacatgtagcgacatattgcaattttagttgtgatgacatgtgacttgatttgcgagatctcgcgatttagattgcgatatgatgtatttattgcaatatttttccttttatttaatttgatggtttcttctctcattttcatgcagcatatagattccatatcacacatgctgaggaggagacacttttattttccagaatcatgccctcaccagggtgtgatttttgaacaacactaacacaattcttcacgggcatttaaggggctcaccagggtgacataagcaccttccaatggccaaaagcagtgacagagtactacaagggtgtggagggtcgttacctattatgtttgaaggaccaagccttcttatacttggtcctgcactttgatagacaacaacattgagtggttgttgaggtagacattgaggagtggtagattcgagtttacgataatgatatcttgtgtaccaactaagatgattttaaagcctaaatgttactttagatgtagctgtttccacatctgctgaagtcgactagttatttcaatctcaacaattacattcctaatgtattactaggggatagcagccaactaagaataatgcatgttaaacgcatcccaagtgaggtggttccccaaagtaaaagaaggtaatattaattaatttagtatatttcccctactaatcattaattttttgaagtttttaaatgtattattttttattttgtagtagtgattgcaggatgtacgacattgaggaggaattaataagattgagaatttacttggtaaattctaaagctacttattggaagcttggttacataggctcatggttcccgcactaactaggataatattgttttgtagtctcaattaattaatttatttaattaattagaattctaaataaagactatgtcttatttgtgaatttaaccacggaaggacacaattgagaagaaaagagaattcaaagtttatttattaattaagagaccttgaaaggtctaattaataaatatatttaaatagtaattttatttgataattaatnnnnattattaaatagatagaattagtatttaaataactagagtagaaaaatgacattactgaagaaagacaagtttgtttcattaaggaagcaaaacaatgatataattctaactcatgggctctcttaaagggttcgacattaaagtccactttaagccattggatctttcatctcggcccatttagctctaatcctaaacctaatgagtccctataaatagaatattaagagttttgattcagatgatgactctagactctctcttgtctattaaatcgaatgaaaaagttaacctattattttctattcatatttttcaaaattctttgagttttcttcaccaaaattttgtggtccttggtttgagaatatgcccactcatgtcaaagaaatacctagcatagtgaggaagactatgtagttcaaactgtcaattgtcttgatcatactctgtgatagataggatcaagggttagagatctgaacagaatgagtcatttaattccgatataaccaatgtaaggttttttataaacttttatgtgtttatt

SEQ ID NO: 28315 - DNA, 1775 bp, Cannabis sativa
  modified_base (1743)..(1746): a, c, t, g, unknown or other
tttcttttttttttttttgaaaggaatctctctatctctctctctcttggcataaaataggtacattttttctttgacaaatgttaaaatccctagtagtaactagcactcttctaggcagcattcttacctgtcaaaattgtgatttgtgtaacaaaatattgttgcaatataattttatgtaataggtgagtaatagcaatgatcttttttcttttttataccttcattattatggaacatacaccgttagatatgtaacacttgtcaaatgatcatcaaatttcaaccataccgacaataatatgtcaataggagtaaaagtagaggtatagtttggtcttttaaactgaaatgtgttcagccatttttcattttatataaattttaaatgattaagctaacttttttgattcgtagaacaaaattaagcaaaaacgagtgcaaaatgttcattagaattattgttaatacattatatattaatcgtacgagaagtgtacgtacctgcattcgaaactcatggaccaaagaaatcaaggggacgagtctaagatatcggtcaatctcgtgttgaatgtgacggaactgatagactacggtccaccccatggcaaccatgtagagacaactgttgtctctacaactgtcaaccaactccaccgctttcttcagggcctcttctaacccatccaacggctcctttacggcggggagattgatcaggtccgttgatttcagcttcccaagtaacttgtcgatcactctcacgtgctccgccagctgctcgcagtttcgccggtgcgtcacggcgttgcgcgccgaggatacgatcgcgctcgttagcgttactcccatcttgaaccttgaatttgtctgcaaaagtagtaaagtacttactgtgagtgagaaacggaaacttgttaatttggacttataaattaatttttattttttccacaacatttgtttgttttattaggtaatgtgcccaacaccgtactaacgggttagtgaattattattttttttattaaattaaaaaattaaaatatacagtgtctcttattaaaaaaaaataaaaataaaatttagtggggtttttcatatttacattaactatttggattatttcacaattacacaaaatataataaaaaaacttacaaaaatatggttgtacagaattttaaatatttttacgattttaataattttatttacagaaaatacggtctttatatattgtactcttattaattttttgttgatttttttgttatatgtatgttattttttcttgttgttttaatgttgtttggatgttattttcctattatttttatatagttttcttattgttttcgtgttgtttatatagaaagccgtaaaaaatttacaaaaaaaaatctttaaacataaaaatgtaaaatttttacaaaaaatagtgttttatgtaattattccttaactatttttttttcattaaattatgtgataattgttatgaaatattatttatggatgtccaaatcaccaaattaattatcaccattaatgtttggttatactttcctttattacattaatttagtttctcattcttttagtcatatttttgtataaatagggattcaccccattaaaataaataacttagaaattctcttccagtttctctttctatcttcatcttcttcttcttttcttcttatctactttatattattctatattattttnnnncacgttatcagcacgagtctctgctcaag

SEQ ID NO: 28316 - DNA, 1935 bp, Cannabis sativa
cttttgtcatcactgtatcttacttgtagactacattcaaaattgttacatactcgttatcatatctcatttttaatgcattatcatttccaataagtttttacataataaaaaaaagatcaaacaatgagttaactacttacttttatatatagtaaattttgcagtttttatgtattccttgtaaaggaaatgtaaaaaataaaatttattaattaataatgagaatatagatacaattgtatctaataaaatttaaattcaaatgtatttttagatcttttaattaacttatatatttttaaatttttataatcattgaattaaagagatatctttaaacttatagtaaagaaaagaataaaaattatagaattgtcacataaaataaaaatataaaaagaaacataatcgataaatccatagaaaactcattatttaatttcaaaacttaaaaaaaatatatagtgaaaactttaaatttaattaactaataagtataagttattaaaatagaataaaaaataagaaaaataaatagaatagataatagtttgttgagatttttcagtaatgttcaaataataattagagaccgaaatattatgaacttaatattgaagtgaataaaaaataagaaactaagtataaattgatcacataaaaagtgttaatttttttatataatatatttagattagtttgagatatttatacaaatatatatatttaaaaaataaatacttaaaattcattatgacacatatattccctaaattatttatttaccattaccaatataaattaaaatagatgagaaaaaataataaataaaacaaacaaattcacatggtatatatacatataaatatatttataaattgtaactaaatttttgaacacttactcaaaaattctctaatttcatttgtattatagatttatttttttcttaaaaagatactaacaattaatttactgaaatatgaaatattaaaagagaagaaaataagtgaaaagaaaaaaatagtaaaaagtgaaatacacttacacaaattaatgtttcgtaaaattatgtatcttaacaaatatattgttcctaaattcattattttaaagcaagaagttttgtacatgcattctatttagtattgcattgaaaagttataataacaattaaaaaaaataattaacctgagcagtagaattataaacaactatagagaatgaaaaaaaaattaaaaggtttatttacagaacccttgtagcttctatcaaccctgctactaagtattgttgtaatctatgtatatctagtctatattatgcatggtttaaatatttggtatatatatataatatatcgtatatataagagagatagatatatatattttttttgaaagaactaaagggagttcattgtagaagataatttggaatcacaacaggggatccctccctattaatgtagccattacaatgcatattgcctctagcccatcgagctaaagcatcacaagctgtattgtctttgcgggaaatataataaaaattacaaacactaaacctattacacaaatttaaaacctccatggccaaaggccttagcttccacatgggaggacatttttgatcattcaaagcattgattagaaccttcgcatccgaggctccagcgaatgagtacaagcccttctgctccgctaaatgcaatgcccatttaatagccaaaagttctgtctctgctgcagaagaggcttgatcatactttgcataccagaaagattcatgattccgtctgtccagcaagccaacagctagacccgcattactctccttccatgaagcatccgacacacaaaatacatcattcgaattgcatagtacccttccatccgcaacagccggggtcctaagtgttggaaattattt

SEQ ID NO: 28317 - DNA, 1706 bp, Cannabis sativa
tataacttaggtattatttccgccaaaaattaaacttaggtatttatttacaactgggagttaaacttaagtatttatgcctcaaattactcttaaatatatataaagtttaaattatgtttatctcatgatggctaatttgaactgtttatttaaattatatttgtcttattaccacaaataattaaaatataattttttgtaaaaaaaatcattagtgatcagtttggaccaaaccgagcaactcattagatgagttactatttttttcttttttatttgggcgggtatcacttaaattttaaattttgtaactcttaaaatgaatattaatctgtgattataattagtagtatattttaaatttatgtatctattttgtgtaatatttttcttgcacaattctttaaattctttaaatgaaggtgttaaaattgagaggaaattacatataatatgagaattttgttgtgtcttacaaaaatatggctgttttttttattattaaatttttatggtatatttttaaagggattcttttctatatgtttttagtttctttttctagcaaccaggttctcaatatttatgaatgtatgatagtaattagtttatatatatatatatataatataggtgtattttttttttaataaattatggagttttaataataacagttaactaaaataatagcatgcaatctaattaggacatctcccttattgaaaacacgataaggattaaaattagaaaaacgagtcaaataatcaaacgcctgattctcaaatcgtttaacaaagaaaaactaaaataaaattagatgaaaaagaatgcaccatcacaataaattttaagaacacctatattctattttatctaccgctcagaagacacaatagtagaaattattgtagtaggttaattgaacctcatagcttgagcactcaactattgtgtaagatacgtaactgcactactaacaacccattcagccactaagaacttgttattcccaactactaacagcaatttgatggcgagcaatcgaagaaccaacgacgaaacaaaacaaaacaaaaccatgtcacgctgacaagactaaaacactcaaaagtatatcacagagacaagactaaaatactcaaaagtatatcacagaaataaaactaatcgtagtaataaaaattgaaattatggtatcaaaacacaacctcgaccaagccccacctaagcccagagaaggccgacgggcttggacggaggaaaatgacggcctttgattttatttgtgttgtttctcagttgatttttgatttagttattttaggtaaccaaattttcatttagttattttaggttaccagtttctgatttaattttctcatgtaactggtttttatgcattagtttttaatttgattgctttacgtagccagtttttttgtttcaaattttttaattagctaatacacgcaattggtttctgtcatttttttatttcaatttatcttttgattgtttacatgtcttatttcttatctcaagtttctaatttggtgtattctgtaactgttttttgtatttaattattagttttgttttttttttaagtgatttagttttatgtttcacttttttgattttgttattttaggcaattgatttttgtatattagtttaaggtttttttttatttttttttt

SEQ ID NO: 28318 - DNA, 2750 bp, Cannabis sativa
  modified_base (2406)..(2406): a, c, t, g, unknown or other
  modified_base (2481)..(2483): a, c, t, g, unknown or other
ctaaataataattatatttattctcagtattaatctgatctgatcgtaacatttctggtatttttatttttaatgaagtcttatatcttttgtattccaaatgctaatttatttaataaagatttatttaataaagttgatattaataaagttgatatttataaagttgatatttcatctaaaataataataataataataataattatctttaattacaaaataaaaagaatttgtacatacaaatgcatttggaagaaaactaagatcattaactataaaataataatagacatataaagtattattaattatttttttaattatataaaacattatttacgatataaaatagtaagagaattacaatggacacataaaatattaataatttttttttaaattactaataaaattattaaatagaaaattcaatgatagggaaaaaaaaataatataaagttacctaaatctaaaataaagcttattaaaaattaaaataagagtaaaaattaatataaaatattaaaaaaattagaatctcaccagtcgaatgttaatatgctaggatgtctcacttcattacttttgttttattttttttgataagtaaaagtttattagaaagcaaggcagaaactagtagtcacaaaagggggctacatcccttacaagaccagtggtcttcaccctcgattctctagcccaacgaggtaaggaatcggccaaaccattctccaaacagagaatgaacgaaacaacggcatcctcaaaggatttacacagctcaagacaatgagaaaacaaaggataagtgccccaaccaaaaggaagagaacccgactcaaaagtcaaagtcgccactttggaatccgtttatatcttgaccttgcaaactcgacgatcaactgcctctttcagcgctaactgaatgcccaacaactctccttccaacacacacaacaccattgagaagtcaacaacagtctaaagtcgttatttaaaataactttgtctttatcttttattcgtacctcttactcaacatataaaataaaaataattaaatatatgagaacgaaaaataataaaaaatacaaaaaataataaaaaataaattttttaattggaataagattgtatattagaatatttctaaaaaaaatatatattttaaaatagtttaaatataaattagttttgatgactatgtagaagaataactctactttcattataataattttttttgaaaggttgactgtaataatctttatgtatatgcatcaacatttataatattttaatcttttagttataaaataaatgaaaaagaatttcacaataaaaacaacaaattatgcaattattttctttagtgagaatatataaacaaacctaatgagtcaccaaaaaaaattatttcttctattattttgcattaagaatatgagagatcatctttccaaaagtattattgattatatatggctttgttacatttctaatctcttttagcctcaacaatatcatagatgatctactcatatacagtaatgttataagaggatatattaagctcaagatttatttttatcgtttatttaatcatttaacaaaataaaaaatctaattagtaacttcttgagaaatgagatttgttttctcgttttttttttttccttattatgataaaatgagatttggtttagtatagcacaaacaataaaccttatttccacacaatttttttccattcctttttttcaaactttttgttgttcttcttcttcttaagaaaaaaaaaaggatggatttttatttttttttttgaaaagaaataggatggattttagtgtgcctggtgttgttacgataattaaaggtggattttgaaaataaataaaatattggtgagacaaggttgttgtttaccaatgaaattgaccacttttgtttcttatactcagtactcttgtgacttgtactaattaatactatacctacccaagattctcagttcatttatgatatgaaattactcatgcactgtttcaacttttaactagataagatagatagtccttgttggattgaattggtaacttaggggggtgtttgttatggggaaggagaagtattggaatttgggagcttttaaagagaacttattggtatattttttttatatgaaaatctgttgggtcccacaataacttttagtaggtaacaccattttcatttaaagatttaaaatttgtattaaatttgataaaaaaaaatgtgttagtatatttgacccactatttataagagaaatgctaaagagcaccagtggtgtctaataacctcttatgtgtcaatatcgttattggtccaactaattatcgagtctcatataatttnatataatagtttttagggagtattgctagtcaatcgcaacgcgacatgtcgagaaggtgttaggcaccactggtnnntaatagcaatgctctatttataattatgcttcaatgcacaagatgaaaaataaaaaaaaaaaataattgattatattggagtaagttgaaaaatacatcttttattaatcaattaatcaaatttacctccaatttatatttaattgaaacatacctctttttatatatactgtacccaaactaccctgacataaagaagtcacatggagagtatcttgaagtgacaggagtaaaattggtacaatatttaaaaaaagaggtaaaaat

SEQ ID NO: 28319 - DNA, 4463 bp, Cannabis sativa
gataatggagttttggaaaccagtagtgtttttggtttgtaagtccctacctttgctcgagttaccattggatgttggttgacaagtggtgggggttggacattggtttgaacaggttcacttggggatgtaataggcaattgagaagtggattgtgtgttggggagtgactgagaggggacaggggaaggagatgcaggtgagggctgtgtttgggaatgggaagttgttggtgtagataactgactagtggatgaagagatggtgggaataggctgtaaagaggacaaggtgggaatggaagcatttggaagatcagtacatgactgatctgaggtactagcagtaggagaagaagtgtgagagaaaggaaaatcattttcattgaatatgacatctcgggagatgaaaattcgaccattgctagcaagacatttgtatcctttgtgcttgagactgtaaccaagaaaggtacattgaacactacgaaattctaatttgtttttgttgtaaggccgagtgtttgggtaacaagcacacccaaaaatttttaaagtggaataatcgggttgttgatgaaacaataagaacagaggagtttgattttgaatgacaggagaaggaagcctattgattagataggtagaagttcttactgcttcatcccaatagctcagaggcatagaagcttgagctaaaagagtgagagccgattcaataaggtgcctatgcttacgttcagcaactccattctgctcatgagttgttggacaagagactttgtgtttgataccattagccaagagataagactcaaaggcttgatactcaccccctccatcagattggacagtgataatagagtgattaaactctttttcaacctgagttcgaaagttttggaaagtctgaatagcttcagatttggctttcaataaaaatgtccaagtatatcgtgagtaagcatcaatgaaagagatgtaatatctatagccattagaggatagggctggggatggaccccaaatatcagtgtgtatgaattctaaaggcttagagtaaccagtagtagaatgggagaaaggaaatttatgaatattttctttgcaacaagcttcacaaaactcaatgtgttctttattattaacagggacattacaattggccatattacagatttaacaacacgactagagggatgagcaagcctcttatgccacaaagaaaaagaattacagacattgacagactgtagctgatcattaatatgactagcagtgtatgtaacagggggatgcacaaaggatggagaagttgtgagctgaagttgattaggctgaatgacatagagaccattatgaattgtgccttccattagagtatgcttggaaacctgatccttgacaaaacaattggttaggataaaactcaaacaaggcatgattgtctaaggcaaacttggaaacacttataaggtttttggtaagttgaggaacatgaagcattttatcaagaaccagagttttggaagtaaaaggtgtatgaaaaaaggtcttaccaacattctgaattggtatgccagcaccatcacccatgtgcacttgattggagccacaataaggttcttgctgagtgaagttgcttggatctagagtacaatgggaagtagcacctgaatcgggataccaagcctcatcaagaactgtatcagcagtggctatattagctgaaggctgacctatgttagcagcaccaacacctggaaaatcgaaattgaacctctggtaacaacgagaggcaatgtggcatgttcttgagcaaatttgacatactggtttagaaccagatccaggagcagtagtcgaatgaggtggaggagttggggaaaaaccacgaccacctgaagaactagaaaaaccaggaggtgtggatcttggcatgacagcatatggattccaaggaccacgattgccacggccagaataaggagtagagtaatcgccatgagatttttgatcattagctgcagagttagaagaaacatttccttttccacgaaaattacgactagtagcaatattcacagaatcgagttctttattgtgagtgtccattcgatgtttgtccattcgatgttcttgagagagtaacaatgtctctatttcagcaacagtgtaagaagagtttcttgaattaacagaaatgacaaaagtatcatattcagaaggcaaacctttaaaaatggctgcaacatgatctttgacagaaatgagatgacctacagagccaagatgatcgacaagagccttgatgcaaagcaagtactcattgatggagagagatcctttctttaaattttgcaactgattagtgaagagatcgatcttggcagaggtctgagtaacaaagtatgtttgaagagtttgccaaacttgagcagatgtctcagcacgcacgatcctggtcagaattccatcggacatggaagatagaagccaagaatagagcagctggtctagcacttcccactcaacgaaacgaggattgacgagaccagatctttcatctgcttcagtgagaaactttgaaggcgatcgaacaggatctgagatgtaatcgaagaggcgatgacctcgaattgcagaaagaacttgaggacgccatagtaagaagttgttatcattgagtttaacagaaactttgtgagaaaacaccaccggagtgaatgaagaagaagtagtagtcgccatgaacgaagagagaaaaaaaatgctactctgataccatgttaacgagagagaaagagtgaaaatgatctgttattatttacagagcaattgctcaagagtttaaatacagctgaggctatggacagaaagcaatagaataactaactaactaacagaaaagtagttacaatgagctgtacaataaacagaataacaacccttaactaacaactattagctccaaatcaaaatacaaattagccaccataaatgattaaataagaacttaacaaaataattcactaaatcttacccacaaaaaaaaatttgaaaatatatatttatatatgaagaataaatgtgatgcaacaagctatacttttttaaatatatagattaatttcttccttagcagtgtcttaggtttaactcaaatttactatatttaagtactcaacacaattatatatagaatttaaattatttgctactatattttcatttaaaaaaaaaggaaaaaagaaaaatggagggaagggttattgattacatgttagtttcatagggctctttgctatggtttcttaccatgattggcttctctatcgagttatacaacaccccaccaagacaaatgttgagaattcaccacagtcggcaaccaccccagctgcccaatcactagcctagtcattgtgccaagtatgccctactttatagaagaatgctacaacacctctaataatcttgcagtagatattttgtgtgtggtttctgtactattagttgtaatcatttgataattctattagaatattctcctttgttgctgtgcatttattttgtaacgtgtcagtgtttgaatagctgatgccttgatttgtattccctttataaatatgatagtacaaccctaaattcattgagttgagatttacaataaacattccacatttgctttagtgtgaaatttatcttagtataagagtcaatagaaggttgcatttatggctactccaacacttgaaaatgagggttaacaaacccatatgcagcagcccaatcaacaatggagaaactggaccagagacaaggattcaagttaaccctgaatttgagcaatggatcatcaattaccagctgttaatgggattgttgtacaactctatgaccgagtctattgccacagaggtgatgggagctacaacatcagctggactttgacaagcacttgaaagtctccatggtgcttattcaagagctaaaatggatgagtttatagaacccttgtacaaacaagaaggaagggtttaacatctatggctgaatatccaaggcaaaagaaaaattggtctgacatcttggcatggtgatctttaccctgagtcacatctggttgctaatgtgttgtgagaccttgacactaaatacatctccattgtggttgagattgaagccaagctaaaaacaacctggcattaagaattggaggacatcctgctgagctttgacaacaagatcgaacgattggaaactctgatcaacaatggaaagatcattggagcatcatcaacacctcaagtaaacatgtcagtaaatcttcaaattcatggtcgaggcagaggttcttttactaatcaaaatacaatcattggaaatgaaggtcgtttcaatggaaatcgttgtgcaaattgtggctgatttaaaggcagaggtcgtttcaacaactataaa

SEQ ID NO: 28320 - DNA, 2540 bp, Cannabis sativa
taaaattgggtttaagtaaaagttatcccattttacaaattatgtatagttttagattaggataccaattttaatccctaatatgcatataatttcaaatttcccaaaagaaaatgcctatgggatgataaaatgcttaaggttgatacattctaagccactataaaaataatatgtatcctatcttttagtcttctcatgtacgcctttttcattttgtggttttatttaactaagaaaataatttatagtagtgatgagagagatcgccatgtgatgataaggacatgcacttcgagagaccaaactatagtattgatcaagtcaatgcttgtttactttataaaaaatacatcaaacatttattaacaatattttggggaccaaaaaaatgatcacaattatttattttttaatggtataatccccttttttttaaaaatgaaaaagaaatcctttcgatttaatatctattaccataactatgtgattaattatgattaattatctgacacgtatatataaagtcataaatacttcttgtatgacatgaaaaaatatagacttgaattaagtatgatacggacttgaattaagtttgataatttccttttgccctacattgacatgataattgatgccaccgcagggcatgagttgatgagttttatggatgctttttcgggttacaaccagattatgatgcatacacccgactgagaaaagacatctttcatcacctaaagaagaacttactgctacaaggttatgccattcaggttcaaaaatgctggagcaacttaccagcgaatgatcaacagaatattctcccaacagttaggattaacaatgaaagccttcattcatgatatgctagtaaaatctagggacaactcagaccacgtcaaacatctctgagaatgtttccaaatcctcctagtttactccatgaaactcaatctgtcaaagtatgccttcctaatcaaatttgggaaatttttgggtcacttggtaacccgacgaggagtagaggtcaaccgagaacaaataaaggctttccaagcaacggctcaaccaaagaccatacaagatattcaaaagttgataggaaagatcacaaccctcagccatttcatttcaaaactatccggcaaaagcctactgttttacgatctactaagaggaaaccaaaaatttaatccggactcaaaatgtcaaaatgcattcaaaaccttaaaggaatacttaagctcaccatcggtcctatcaaagcctgtacaaggagaaagtgcttgtctacttatccttgtcaaaacacggagctagctcggtactaatttgagagcaagaaaaaatgcaactcccaatttactaccttagcaagactttcactggcgcagaagggagatatcccatgattaaaaaattgacctgggctcttatcatcatagcaagaaaactcaagccttacttccaatgtcatactattgcagtaatgactttgtttttgctaaaaaagagtgctacacaaacccgatgtatcatggcgactcatgacatggagagtagaactaagtaagttaggcatataatacctccctcgaacagcggttaagggacaagtgctagcatattttgtaataaaaattgttccaaaacatgtttgcaatggagaaaaattcaaaaaccaagaatggataccaaaagtctatgggtcatctaatgtctttggggtggagtcagaatagttattttgtcaccaaacggagaaatgcaagagcaatcactcagactaggattcaaagtgaatgaagccccaattcaagggattggactagtcaaatagataggggcatagtaaatctcagtttagtttgattaccagttaattgtgcaacaagtcaaaggggattttgaagccaagaaataaagaatggttagctatttggccctagtgaagaaattagcgttaacttttgaacattttcaagtaaaccaagttctgtgagaagcaaacatgcccgccgacgctttggccagactagggtcctcttccccactccaaatcacccgaatgataccattcaacttcatccccgagcctagcatctcactagaaaaagaaatccaatgcacataaacaatggaacctctagaagactggagataaccaatcacataatatttaaaggaaataagctatcgtcggatccaaaggaagctagaaaggtgatatcacgggcctcgaggtacacactaatacaagatgaattgtatagatgttgtggtatattttcaacacgcaagtatatgtattgtttaataagtaatactcaagtaagtgagatcgtttctacgaggactgtagctaagtaccaatcaattgaattcttgtttctatttgccaatcgaatagataaattttaaaactaaacaaactaagaaaaataaataaaacaaataaataagaggtttaacaatggattcgaaattagggatgtgattttaattgtatctatctattatggtctaacatgatt

SEQ ID NO: 28321 - DNA, 4455 bp, Cannabis sativa
  modified_base (2016)..(2018): a, c, t, g, unknown or other
gggtaatgtaaaactactatagataaaaggagcattgttgtgtaactaatgaacaggtttgaaaatccaatatattttgtttggtaatgactaataatagagttggttaatgatgggagtgattttgatatgaacttttttgttttgttcttgtattgtttatcttttgtatgttaatcttttttgtttgtttttttgtgttatgttttattgccttatgggggaaaagaaaataattcatcaaagaaacaaaaatgttaaaataattgagagaaggaaaaataataatgaaaacttcaatttatttgatattcttcttctttataacatttcaatttgggaattgggaattgggaatatctaattctaaatatcaataaactaaattaaattacataaatttatttactaaataaaaaacagtttttttaaaaaataaaaatatgtgtaattaatatttaaacaacaaatgtttgtagcaataataataattatttgaaacataacatatatgttttataatttaaaaaaattagggtgtctcattcttaaatctatagctattgaaagttattttttttggccaggatcgatgattttacttgggcttaggtgcggtttggtcgaggttgtgttttgctattacgatcagtcttgtctctgatacatgcttttgagtattttaatcttatcgctatgatatggtttcgaatgttttagtcttgtctatgtgacatgattttgttttgtttcattgttgtcttctatgtttttcaatggctccccattaaatcactgttagtggttgagaataataagttttttgtgtttgaaggggttgttagtagtgcagttacatactttgcacaatagttgagtgctcaagctacgaggttaaatttattgtaactgtttctactgttgtgtcttctaagcggtggatgaaatagaatataggtgttcttaaggttaactgtctttcatgtgatttttttttaaaaaaaaattgtcaaacgatctgagaattagatgactgattatttggttcatttttctaattctaatcctagtcatgtatgtcctgattggattgcaggctattatttaataaaattctaatgatgtattcaaaagagtttattttttgaatagaaatgcaattttattaactcatcattcaaaagaacatcatgtaaactattcagaattgtaaaatctgaataggtacaactaacatttaaccacaaagctctaataaaatgatgagcaacacgattagcagatcacttggcaaaatcgaaaagacattattcaaactaaaaagaatctgtctacactctgaaaacagaagtcatatctaacaaacttcggatagcttggatcgtgaccaaactgtctgactccaccaccacatcatgctaccttatttctttcaaccaactcaacacctctttaaccccgatagctctagcaagaacaggatcaaccacccccatccgacttactgtccgagccataataatttgaccaaaagagtttcgccccactcaaccatacccatacttattctgattgctaaaaatagctgcatcgacattaattctgactgtattaccaaccagtgcaatctagtaaagaaaacaaagaggaaccgaaaattttatcttgagcacaactccattgatcaaaactacccttagccaaggaaaccacttctttaacagtcttattcttaccatttcacaccttgtcattgcgcacagaccacatcatccatcaaaaacatagcaactctatctctatggttcattctagaatcccaacactaaaatctattgtatgaagccatcccctaaaagagttgtcaccaatctctattaccgaaatacccatcagtatcacccattagcaagcaaaaacaaacaaacacacaagcatcttgaacaccattatctatataatgttggcaattttttttccataaaatatatatataaaaataaaaaaaaaaataannnaaataataataaaaaaaaactctacatggggacaccattttttccttatctttcaaatttgtaatatctcaatgtggaaatatctaaagaaatatatatattatattacaaaaatcaaaaaagaaaagaaaaacaaaaatgttgctgcccaggatcgaactggggacctttagtgtgtaagactaacgtgataaccactacaccacagcaactaattgataagtaatcgccaattttacaacttattcccatattacccctacaagttcttatctttttctacaaccatccaatcactaatttccaaatggataaaaataattcaaacatgcattgtcttaataaaagacaaacatgtaagtttctaagaaattttcaaattaagctaaagtttcatagcaaaaaaaaaaaatatttaagtgtgtccctcacttactactaggcttgcattgccttacatgagtctatctcttaaacccataatgtgattggatttttcaagtgaagaaaaagctcttgacccttttgacattttattgagttttcaagattggaagagagtccaataatataaacaagggttcttaaattttcaagagctagaatggtcacaattgtaaaatcatgcttgaagtcactccttaaattggtgaattcaattttggggtttgttggaattgctatgatcttgtatggtctttggatgatgagagtttggcaaagagacatggaagatttttcctttgatgatcttctttctactactccatggtaagtactaagtagttctttaagtgagtaagattcgagtgagtcatattatcgtgtccaatcaatccaatcactattttctttttttcgaactagtagttcttttgtcattagatgtttctaccactcatattgaattcgaattgtgtgatcatgtctgacctaaataaaatgtaatataatatatcataattcgagttgcagaaataattattctccccttagagattcttaaaattaaggtcggattcaagttgtgtgtgacctaaattattacttgtttcacaaaaatgtttagtcatattggtgtttatatttttcaggtttatatatacttttcttggtgttggagtaacactatgcctaataacatgtttaggccatttagctgcaacttcttccaatggttgttgcctctcttgtgtatcctttcctcttgttattatggactaactctttgttacaatgatattttcaagttttcatattattattcttcttttaatgaatttacttatatattcttctgtgataaatatttgtattttatctctaaattctatattgtgctcagttttatgaacttgagtttttaatgattaacattcatccgactaatttaattatttatagtgtgaactaaactaaatcatctctgatttggacaaaatctaaattctatatccttaactcaactagtatatgatgatgattttgttacttcttctattagagacagcaattgtaacagatatactcttaaattctgattgggaaaaggtatataatctttgacaatcatcttcttatattttaataaagaaaaaattaaattttttttttttttatctcatgcgcttaacaaattcttttaggatataccaaatgatcgtactggaagattcaatgatttcaaagattctataaagtcaaactataagatccttcaatggattggcttaataatagtcttagcacaggtatccatcttttcaaattatgatacttttcatgaaatatataaaaaatcaaatgagaaaacattggaacaaatgggattgatttacactaattttttctccctccataatttgcaggttctttcaatcttactggccttgattctaagatgtaaaggccgaaatgaggactatgatagtgacgatgaaagctcaccggcaaggcttccgctcataaagaatgtagaccaaccagcaccatatgttgtcaatggcgaacaatttggatttgcctctgagaacatcaacaactccttgaatgtaagaatttgttacaaacttttctattctttttaaaaaccttttaagtttaagaaacaaaatttgattgtcgcctcttatttttctcagacaaataagtgaagagcaatgtttcgagcattttacaggaaaagaaagtaaaggaacgaaaaacgacatgtggaaaaaaaaagttatcagtgtactgtgaattgaacaacatttacttatgaccaatattattagggccagtttggcacagttgtgttgtggagaaaagcagttgtggttgtgctgtgagaaaaagcagctgcagtagaattgtgaaaaaaagctgaactgagtgtggtaaattataaattttaaagtactgtgagttattaagatctattataataacaatgaat

SEQ ID NO: 28322 - DNA, 2148 bp, Cannabis sativa
  modified_base (1246)..(1247): a, c, t, g, unknown or other
gttgagtcgcaggatttatctcattattacggggtatttcttgttccctagttcgtggttatcttatgccctcaattctgcgagaagcctttggaacatcataatgttcattcccctggttcataaatccttggggtctttaagatacttcgcgacgatgttcttggttatcctgttcatcagttggaacatccctagttcccccaggttgctcctcctaggtgttctagggatctccttggtttgtttcctgcctcttggttcttgaacctcgaggtctacctcatggcctccttactccaggttcaggttgattttgtgtattatttccttgagtcatccttgccgttgtaaacctctctctctgtctctcttacttagcatttcattagttagattcttccaagtgttgctgaagttgtcgattttccaatttcactaatggtacatactagtgggatcatatgcctcctcacttctgggtacataacttttagtagtattggtttcttagttccttccttctgggttttgattactaccaccatggttccttcttgaacgtggttttctaaaagtgggtggtctttgagaatccattggttctttcccaggatgatgtaaggtctcatcaggatgacttccatcattttgagtgtcaacagccatagatagattgtttgtatataaggagggatttattctgagttttatcacgtaggctctcaatgaaagtaccaaactattaacccatatttttgtaaaccaataattagcctttttcgtaataaatttaacacatgaattatatgaaattaataaagtataataagtataataagaacactcgatatttttacatggttttacagttaaatctgcatactccccgagtccatcttattcaagatatttctgactatttaatacaatatacaattgatagtatttctgtatttctttcaaagattttttgtccccttctttgtgggattctatccctatttaaaggattataggttggcagttattttacatttaaattcaaatagtatccatttaatgaaacatggtaattcccacgtttcattttgaccacgtgggggataacaataagtaaatgcataaccgtggctattcttatcctttaggatggtcaatgctgatctcagtagcctctcgcttaacctataaatggttaaagttgatttagacaattacatgccttccagcaatggcatgagcnncagtgtactgagcaaccttaagaactgctctttgaccataaggccttgcaaattggacaatcacatcttgcagatttactagttgttatcattagctattgtaatgtggaaaatatgctaagtgttgattcgcttcgtcaagtttctcatgaatagcgaggtggacatctcactatatgtagcccgaggttgctttgcataacttcatttattccttcaacataaatgaatcacctccttggatttgtattcttcgacaccaacttgtgtacttcgaggaaagcttctacctcgtcaatataggttttaatagttttgtatcattgtctcgcttaagactatacagtcagcgagttaagaatattttctattaatcctttatttaatgagttataactttccttacatagtataaatttattataccaggtggttcaaattacactactttagacgtgtcatcctctaaagtgtagctaaattttgggtatgacactttatagtagaaaaatagagtttacccaaaaatccctattagttaagtttgaatatcttatatattcattcatagtgaagtaggttctgtgaaaaatatactgtggcccaatgcgtgacaaaaattaatatttaaactgttttggtattgtgtctctgatttttgtgtaggttttaaacatttgggaatgatcaatgttacgctgttgaatttttggtagcataagattttcaatttggttattattcactttaaatttatattaaaattaaattttgttataaaaaaatagtttgaatatcactaatattatatgtatcataataagttaaatttaaaaaatgtaaatgttatcccaagtttggcactctgacgtggcatcacgagaatggtgacacgtggact

SEQ ID NO: 28323 - DNA, 1791 bp, Cannabis sativa
gcttcgtgctgtagcaggttgaaggcagagtttcctccattgggtagctgatgtgagcggagtgagcatttgccttctttctttcttcttgagacccacgctacaatgcccaagttttctagcaagtggccgtcactatggtggatggacatctctgttgaggtgtctcaagtcggaggttggtggccgtgggtagctccggcctcaggggttggtggaaggcgacgaaggtgggcttctctgggctatctccctttcaataattttagggacagcgagttgtggtggtccttcttaggcgagaccttaggctttggattgttgtttctcttctatttttctcagatctctgtgttccttgggtttctatccagacatcttgactccggtgcacaatggctcatggttagctttcggagtgttgttgctgtataggaggagactcgggttttacccaaagagatgtgcttctcttgtcttagcgccctcactgtttagaacccccttgaatggcagagaataggcttttattgttggaagatggcattgtttctatcccttgggtttgcttgtcttgggccttcgagtgacctcctttgtgcgagggaaaagtcttttgaagctatcttatgttatgtttttatttagtttaaattttatttttttgtttagttttgttagggtagaattctctgtcctttgtggcgttggctttgggccctttttgggggtttgtccccttcgatgcttttgcgtgagccatgagcttaacgctcctttcgatatcagcgtggttggccaacatttgagtcatcttctagtgagatttgtgcagttcctctgttggacttgtaggattttgacctttgtttaacctgaaatgaagttccccttcaattttttttttggacttattcaaactcgaatatagggcttacttattagatgtaatttcttcatttcttttcaaataatacaatttttgtcaaaatagcctcccatacacttcaaatctaactctcatgtaatgttcttcatcaaaagaaaaaaacaattgagactgaaaatcacttgtttttcaactgccatttgagtttttaggtgttgaatgaaatccaataatgactacattagactactgcaatgggtttatgaagctaaaaccaataggttaaggcgtcaagtttattcggcaacacttacgacaactatatatactgtatatatattatatatggtggtataagaatgaagttttttaaaatataaaagtttatagaattaatgtaattgtaaaaagaatcaaatatgatgtaaagagtagacgatagtgttactgtcaatctcctattataatttcttagtcaattttcgtgtccaaaaatatatgtcagaatatttttattaaattttttcatggcattgttcgttatacttacaacatcatccctgtaaatttttgaaaattttcgaataatttacagtacggaaaatactttttaaattttttgaacgtgcgtgttaaactggaatatcaagaactctgttttcggcattgtaaattattcaaaaaatttcaaaatttacagaaatgatactgtaactgtaacgcataccgctattaacaaatttgaaaaaacaatattctgccatgtgatttcaaacgtagaagttgactaaaaattacaataagaaattgtaattagcaatcctcaaaaatagaattaaaaatattatgccaaagaaagttacaaaccagaattagtatggttagagcatgtaaggtttgaa

SEQ ID NO: 28324 - DNA, 931 bp, Cannabis sativa
aagaaggggaaaatgccattcatatctttagagattgcgggttcactaaagctgtctggttgggaggttattttccattgagaattgatctcattccaggcgaagatatgatttctttcctggaaaatttgtttgctgatctgtcagattttaataggaacaatcttatcaattatgttggatgtctttgttccgagatatggttccaacggaatgcctcttgcatcaggggtattgttgctgatccatccacagcacttttgaagatcgataaggctgttttggagatcaagaattctgtgttaagtaatggtgaggctgggattattttttctctcgatcctgatactagtgcagaacaaaattctctggtatatcctcatcaggttggagttaattgccttatttacacggatgcatcgtggaaaaaggaagcagcaggtcttgcagcggtttgtgtcgataaagctcagaaaagatggtttgtaaaagctcagaagtctcaagcgacctctgctttggatgctgaattcaaagccatacagatggctttagaatgggctatttcaaatggatggcaagagattcttattctctcggattctcagttggcagtgaaggccttatcttcaggcggtagttcaccagattggagtattgctagcacttttttttctatagttaatctgtctaagagtttcttaatctgtaggtttttctttatcgatcgtacttttaattcctttacggatggtgttgctaaaaatgctagagtttctagcattcaagatgttttgtatcaaggggagggagttccccctgtgattcccatcactttttccacttaatgaactctttgttctttcaaagaaaaaaattaattactcaactggtgccctttttttttcttttcagaatcgatataactatt

SEQ ID NO: 28325 - DNA, 1722 bp, Cannabis sativa
ctttcccttagagtattccaaccattaaataaagtaaacaaatgaaaaggagtgattaccatacctatcactcccaatcctgattagtaaacatgccatcaattcacttgcaaataactatctaaccttaaattttagtggaaaaatcttctaaagtactattttgtttgcatatatataaggtgtcatctccccagcatcgttaactccttattttgcttacgtggcaatgataaatcatctaattattggccaacgtggccacatttaccaagtcagaaaatataaaaataaaaagtaaatatttaaaataaataaaaatcataaaccaaacttaatataaatcttctctacaaaaaaccaattaacataaatcataaaccaaacttaaaactaaaaaaaaaatagaaataaaatcaaagctaaactaatttaaggaaaccaaaatcagaaattaaaataagaaaagaagaaggagacgaagacgaggaaaagaagaaggagatgaagatcaaaagaaggagacgaaaacaaaaagcaaaagagtcgagacgaagacgtgaagaagaaaaaataagaaggatcgaagcttgaaagttggctggaaaggagatgaaatggcatttcgaaagtgtaacgtggatgaagcacctcctgattacagtaagtgttactctcgactcctcctactttagatttctagggttttttgttggagaataattttgcaaggtttatggttgattgagtttcaaataatgaccccttttatgtgataattttggttggtgctgggttagttgatttaagaataagtaggtgtggtccattagtaggtgttatattaaagttaaaaaatttaggggatcttagcaagttgtcgtgctcgtgggatacacttgcacatgggttctgtaggaaatattagcaaaattgtctgttttgctgaaagtggggtaaattgctaggggttttgttgtaacttattttatcagaatttagatttactaacatgtatgtttgattataatctataatctaacattataaacataaatatcctaaaataatgaaataaacacatataaagttatagaaaaccttatattagtggtaggagaatataatggctcattctattcagatctctaacccttattcctttctgtcgcagagtattaccaagatttgaacttagatctccttcaagtgatggaattcttcacaatcttccacactatatttgagtattgacttgaattatgtgggcaagtaatctcttcactatagggttcgaattcaagaggggaggagagaagagatttcaaaaattaaaagagcctctcttatttgtctaacaaagtgaattttagttctcatgctatgaaaataagagcatataattatctatatatatgatgtctattagggttagattagaatttaaatatggattaaaaaaaaaaagataaaatggctttaaattgaatccttgtggccgaaccccttgtgtgccttacgaatttccattttgctactttattaaatagcttatctttctttcttaaataccagattttaactctaactctacaaataccaattttatttatttaacaattataattaattattaaataaaattatcacttaatttatttattaattagacctatcaaagtctcttaattaataaacacaccctataaactctttctttac

SEQ ID NO: 28326 - DNA, 2100 bp, Cannabis sativa
gtttgaaaatgagaggggtatttttgggtttaatgtaaagtggtcatatttttttaattttgaaatgcataagtttagggaattaattttccccataagtatgcatttatagtcaaattttatataccaattaaattaataaaaataatataaatttaaattaaaatttaataattattataattataaaaaattgaacattataacaacataaaatagacattttccattctcataaacttgataaaataccacatattataatcccaaattcaacaaaaataaaacaaaatacaattacagattcaaacaaaaaaaaaaatacaattcaaaatacaaacaaaaataatacaagctagagattatcatataaaaataaacccaatatctagataaaaaaataataaaaaaaagcactcaggtccatgtctttgtcttctccgattgatagccccctaacccccgcgtaaagcttgaggtttgtcattgtcgagcactggagatgggtcttgggtgggagatgcgtttcacctgaagtgtctcggagtctatatctaggccatgacttctgctccggtgaagagagagaagaagataaggggatgtgggtttgggttttttgtggtctgagaaggccaaatctgagcctaacaaccaaaaacaatcacgaaaaacagtgggtttcaatagagatgagaattgttcagcgttgtgttgcaatgaaggagtttaggtatctagatttaggacttagagaacctcatcgtgcagttagtttctatcggaattgggcctagaactgatcgcgaggaagaggacgagaatacgagagagagagaagggagagattagggagaggaaagtcgaggtttattgtttgaagggaatctggatcgactgagaacttatcgttattggcagctggaagtccttatggcgttgcacgatagagagcaacgagacaattaaatcagataagagagaaaagaggggaaagaaattagggttaggtttgttttttcatcatattctacttatgctacctttattaataatttgtttaaattctaaataaatatatgatacaaatttaataagcctaccgtgatttgtatgtgtgatttcattttttttaaatgagaccacgtctagttatgcaggactagaaaattcctccaaaacatatttttagtccaacaaatttggacttaaaaaaataatttggttttttggaaaaaaatatatatgtcacgtccagtactagtatttctagtccaacaatattgggaatgataaaaaaatttctagtccaacaatgatggactagaaaaatcctaaaaacctttccatgtccaacaataattttattggacatgaaaaagggacattaaaaaggtttttttgtagtagtgaaagttacgcgttgaaaaagaagaagagacgttcaaggtatttgccgcaactgaaattctttcttgttgtcgattggaagttgtaaaagatagtcgagaagtaactactaacaagaagaaagggaagtctaacgaacacattcagactttttgacgacgtatgaaaagacgtactattgtgtgggaattgtgaaggtgactctcaattgagggatagctttaaaaattgcaacgttggaggacagttttcttcgtttaatacaagggccctcatggatgcgagaggtggattctacccaccaccaccaccaccaccaccatattgatgtggcgctcaagtaagttccgttctctttatttttaatgtcacactggggacaatgtgtcactttagtttggggggatgaacttaatttttagtttctaaaattactttctaaaattaaatttttttgtttgagttaatttgcttaatgtgagttaatttgaaagtaggtagatatcatgatttgaaaagtttattattatttgtgaaaaatccgtgtgcttggtgatatttcattcttgactaattttaattttgctttaaaaaaaatatgcaatcatattaagtaattttctagtaattgaattggtttatgtatgctaatttgacttgtggaaagttgtttggaaaattctagaactt

SEQ ID NO: 28327 - DNA, 1560 bp, Cannabis sativa
ttagcaggatcaagagactcaaacttggaatgttgagaatcagaatcagaaaatatttgcttccaatttcattcccttatggattgagtcttttcattcaggttactttattaatttgcactaattaatttagttctaatgcatttatttcgtggtatcattattgttataaataactacaaataagatgtttttttttatatatataaattattcgaaatttttatttgttattctaagaaaacgagaaaaagtgagaagaaatattctgagttattggtactattttttgtttaaaattaatgtaattatttaaaatcgagagttcaaactgatattaatcctaatataaacttgaacaatgagcatttgttttgaatttattttggtgtgttttgtgtatgaagatgattttgtggtagaaaaagttatgaaaagtcttcaaagctcaggtcttctttgttcttgtggaatagcaacatctttgactgatttaggagaacaatggttagtaaaaattgtatacttgttcaataccataacgacgtgacatcttataattagttgacgattttttatattatttattaaattaaaatgtgtaaacttaatattgaaatgtactaataacatgttattttttttatagtatttgacttaataaaaatcaatcattattatgattttgtaatatagggatttcccaaatgggtgggctccaatccaacatatgattattgaaggtttggcaaaatcaagatccaaagaagcaagattaatggctgaaaatattgcgatgaggtggataagaactaattatgtttgttacaaaaaaacaaaaaccatgcatgagaaatacaacgtcgaaatttgtggagattttggaggtggtggtgaatacaatcctcaggtttgattttttctttttgaagaattttcaatagttatgtttgcatgttgatcttataataataaaaaaaaaatgtgttattagatgtttaatatttagaattaattttttccccttaattaatattactactttattgatttagttatcttgttaaatcatatcttttacttacgtaacatgttgatatttaaatctttcacactttcgaaatattattattatagaattatgcatccgaaattattatttaattgttaagtggtgatcgcgaactattactattataaaatcatgctttttaaatttttgagaaaggaatatgatttagtagttataatagttcgaatgaatttaatacaatgagaaaaaaatttgaaaagcatgattaagtagtgattataatttgacaataaaaaattttatttttctaaaatttatatgcatttttaagataaatattgatgatatatttgtttttttttattgcagactggttttggttggtcaaatggagtagtattggctttgttggaagagtttgggtggcctgaagatctaagtatcgactgttgttgatttaatttcttacaaaataaacaagattagtcttaatcaaatacttttctgatttgttattccaactctcg

SEQ ID NO: 28328 - DNA, 2682 bp, Cannabis sativa
aactttgttttctgaaaactgttttcaaaaaacaaaatcaaacaagcatatttattttcaaaaaataattttatgtttttaaaaataaaaaataatttttttagttatgatgtcaaatatgcactaaaatatatgaggaaatgctcatattataatgtgtgcaactatcttttactttgattataatatgtaaaaaaaatacaaaaattgcgtatatagtattgaaaaattctacaatacacccccttaaaatgggtatatcgatgcacccttatctatttcggtatctaaaaaactaatttgtccgatttttttttttatgatagtatacattatacttatttaagacatctaataaaattttgagaaattcgaaaaaaaatttaacacgtcgaaaacagtgttcaaagagtctattgtacgcgcgacttttattttatacgcgtgtaaaatagacggtttgaatattgatttctatattataaattattctaaatttctcaaacttttgcaggatgtcttacataactaaaacatacatgattatgaaaaaaattaggctaaaaaattcttatagataccgaatcaattaagaattacatcagtacattttaatatggtgtattgtagaagcactcaatattattttgaaagaaaatggtcaatatcgttgcaaattagtaacaaataacaatactaatataatctattatttactttttgactgcagaataagagaagtaaaaactattattttctcgtaaaatattttgcattaaaaagaaaataattgtaatgcacttttctttctctttgataagaagaaaaatttacttcaagaaatggcggaaaaaaaagaaaaaacataaataattccttaaacaaaattaagtttaaggtttgataagaagaatttgctttctttttgtattttaatttcgagaaaggtttagcttgagggaaagtttacatagatatttcataatagagggtggaatttcataatttcaaatataaaagggaatttagtcaaatggatgcaattttttcaattctctacatctataatttttgcatacataggtatattttgaatgtttaaatcgattaatatcattaagatgctctatattttgtcatttccttttataaaagaccatatgaagtataaattaatttggtggagtaggattgaaggaaatgaagattttgttagtgagtttgttcacctaatatttctgaattctgaaaattgaaattcacatctccaaaatttcattcacaatatataatcacatctaccataagggtttattattagtactattttatcttaattttatcattttcttattagtttcctattgtaaattgtctattatttcaatatgaagaaaggcttaataagtagtcaaaagtcagttgctttgtctacctaatttgtttttaaagttgctgaatgatcgtatacgtacacaaagctatcaactgaacctgttttcccttatggtagatttggtgaacaaaggctcgaataggaagacttctaaactattttacaacacaaaaacaaaacgttctgattaaaaattaaactgccctccaaatccattttcaataattattttgtattacaaagcccttattggctactattataattatattaatattgagaaattattggaaaacaatattttgatgaggctaattattaggagaccataagataagggagtggagtggagtaatttgtatgacatgatcatgagctttagcccaccaacttcacttcggcccatcatctttacattttaccactcttttcttacataaatgaaaataaagaggggtacttttgtcatttcagcaggcatattttcttgtttattaattttcaaatacattctatccataacaattgcgcaacactcgcgggactttatggtcaattctcaaaacccaaatcaaacggacacgttcgatacgtgtcagcgtatataaagcaagagaccacaaaggccttttctttcaaacaaacacaagacaaagaccaagcctttctaattctattctctctgaatcacaaaagagcttctgtttacattaatggatgcttccgacgatactggcattgacgagtcttacaggccactccctgctctttacttggcttttctctctatttggcttgtctccgcttgttcttggactttcaacacctacaaaaagcgccatttccaggtcatctttttcaaaagttttacttatttttgtttatttatctgttttcgatttggttgattgcgttttctgatttgcgttgagattaagatgagaaattgtgtggttttatatacattgagagaactttgacgtgtaattcggtttcagagaaaactctggaaaataatactctgttttactttaaccaaatgtcacgtcgaacaactgatccattttttcgtgtgaatttctataacgacatcgtattttcatcaattcttgagatactctttacatttttattgctctaaattatgattcgcaaattattcaagttgatctcttttttgtatttgtttcatttgtttgataactgatcttacattggaattattctataacgacatccatttgtttgttctaaagcaattttgagtttggtttaatttcttattt

SEQ ID NO: 28329 - DNA, 3822 bp, Cannabis sativa
aaataattttatatttttattaaattattatttaattttttattttttaaaatatgagtttatgaatacaataaaattatttttgttttaaaaaatcttaggttatttaaattatttattaaatattgataattttagttttattttttaaggtacatatttataaataaaataaaaaatattttttttttaaaaataatttagattttttaaataaatttattttttaattaatttaatatttttatcaaatttattaatgattttttcaactaaataaaaatattaatttttaaggtaaaaataaactcaacaaattatataactactttattttgtaacaatttttaataacccttgtattttaggaggtatatagtgtcgaaaaaaaatgataattaaaaaaacaaaaaaaactaaaaagagttgaaccaagcgagagttccaggagaaaaaaaagaaaagagattaaagagagacatggacgatgaagaggtctctgttttctcggactctccgtaccgtgttttaacatctttattgttatttattcaacaaaatctacacccaataatatcactaattaccatcatcatcattattattattgttaacatcaccctcttatgccaattcatcatttttaataagttttcttcgtaacccatatttgtttttattttttacaataacttcaatcacatcagttcaaaattaaaatgataattttatgatagccccacctctttttctttcaatgatgatgaagaatatacattgagttttttattttctaattcttggttcttccctacacgattcttcatttgcggtctctcattctgaaggttcgtaatttcttttttattttattttattttgttttttcttgtggtgattaatttaatctttcagatctgtaattttattcttttcggagttctgttattctattttttttttttcattcgtaacttgtgtagtttctgatttttgtttatttcttcctagataaataaatagaatcttcaaactgtacggatatatatttttttggggggaaatgtgggattcccagatttaaatggttatgtatatattttctttttgaaagtattgaatggttatattttttgggcttagctgagagtttcatggaattttgtataatgataatcttcaatcgttcatttttgttatattattttttgccttatattttataaaataacctttttcaaatgtttaacatttaatcatgcaaattattgtcattttttatgtttttctaaaccattttaatttgaaattttaaaatctgtgtaataattcattttgaaaggaaatatttgtaataataattcaattctagcatattatgatatctgggaatctaaagctctacatttgacccaaatctttttgaattgacattttctatcttgtatgtaatgcattgaacaattaaactttctcttcctattacaatcttaaacaaaaacaaaggcttttaattgtgggagtttacctttgattactactcaatcaaagggtagaattgcttttgtgttgacttgattagtttagagaatatatgaatatggaaaagaaaaaaaaacagcatgagaataataatttggtttaaactataatttgcctgcaaaacctaaaaaaatcaggcgaatcatggcgaaaaaggggaacttaggagaaaataaaagcagaagtcccatgtcgcttttcattatagctggtgtgtgttgcttcttctacatattgggtgcctggcagcgaagtggtttcggaaagggagatagaattgctgatttggttaatagacaaacagattgcagcattctttcgaatctcaactatgagactcatcatggtaatggtattgggatggatgattctaaagaaatcagtgagttcaagccgtgtggcgatgagtacatcgactatactccttgtcatgatcaaaatcgagccatgaagtttccacgagaaaatatgacttacagggaaaggcattgcccacctgcagaagagaaactgcattgtcttgttccagcacctgttggatatgtgacaccatttccttggccaaaaagtcgtgattatgtgccttttgctaatgcaccttataaaagcttgactgttgagaaagctgttcagaactggattcaatttgagggaaatgtgtttaagttccctggtggaggtacgcagtttcccgagggagcagatgcctatatcagtgaacttgcaactgtagtcccattggacagtggcatggtgagaactgcattggatactggctgtggggtaagttaaaatctacatactgttcttatgtttctttcatatgccaagtattggatgtagaatatggcttaaagttttgtttagaatgtgttttgagattggttttactagtgccatatttttgcattgtccttatgtttaataacttttatttagtaattcatgtatatatatatatacacacacacacacacatacatatgtttagtggttttattgatttgggaagctgtacaggttgcaagttggggtgcatacctgctaaaaaagaacgttattgccatgtcatttgcaccaagagactctcatgaagcacaagtacagtttgcactggaaagaggtgtgccagcagtgattggtgtcctgggaactataaagttgccatatccttcaaacgcctttgacatggcccactgttctcggtgcttgattccatggggtgcaaatggtgaggacaatggacacttttatgttaagtttgtctatttttcttaggcttttaagaattgagtgcagttcttactttgtagtattataaggtaatcatgcacaatatcaccatttgaaagtctatctataggtgggatgtacatgatggaagtagacagagttcttagacctggtggttattgggttttgtctggccctcccatcaactggagtaaaagttttaaatcgtggaaaagacctgcacaagagcttgaagaggaacagagaaagattgaagagtatgccaagcttctatgctgggaaaagaaacacgagagtggtgaaattgcaatatggaggaaaagaaaaaacaatgacagttgccggaatcaagctactcaagctattatgtgtgaaaccactaaagatgatagtgtttggtatgctaactgttgaaattgaacctgtttatgtgcacaggttaaataatttatgatcaaaaataaacattgttgcagcttttgttcttgctatcaagcacttattgtttagctttattgcaggaacaagaagatggaggcatgcataacaccttatcctgaggtaagtgaattggataaagttgctggtggggaatggcaaccatatcctgagagacttaaggccataccattcagaatatccagtggatcagtacctggagtatctgctgagacataccagaaggacatccgattgtggaagaaacatgttagtgcttataagagaatcaacaagcttatagattctggcagatatcgcaatatcatggacatgaatgctgatctgggaagttttgctgccgctttagattctcctaaactgtgggtcatgaatgtcatgcctacaatagctgagaaagatactcttggcgttatttatgagcgtggattgattggcatataccatgactggtaatttctggaacaacatgttttcagcttggattgattttcatatttttccaggaatcagaattttgattagtttagtcatgctagatatttatccaaactcttcatgaccctc

SEQ ID NO: 28330 - DNA, 2328 bp, Cannabis sativa
tgccttgctctggtatcaatatgagaataagaagagaacaattctgagttgggaagaactgaagaggttggtgttgaagcattttagggacagccaaataagatccctttatgaccagtttcttttagtcaaacaggaaggatcagtgggggaatttaagaagagtttcatttgactcttggctccattggacaacatcccaccgaaattcaattgagtaccttcttcaatggcttatagccaataataaaggcagaattaagggtccaacgtccccgaaacgtggatgaggcaatggaaattgctcaggacttagaagagaaattgcaaagtacttcttttttgtgccctaaaacagggaacattggacgcacgactgatcaggggccaagtcccagtacgagttcaaacagtatcaagactcctcctggtcgtgtccaaggtgaggtgagacaccttactgatgctcagatacagcaaaaaagagagagaggtttgtgtttccgctgtgatgataaatgggctccaggccactggtgcaagcaaagagaactcatgttttaatgataccaaaggcaaccgacgaagcaccattggagcaaggctccgaagacctggaacaagacacaccaaagctagagtcaacagaagttatcaaaactgtcaaaatatcagaacaatcagtggttgagttgacttcgaataaaactttaaaactcaaaaggccatattgaatcacaggaggtcgtgattctcatagatcccaaggcaacccataacttcatttccaaggaagtgctagtgcaactcaaaattccaaaggcttctaccaatatttatggtgtgattatgagcaatggagaatcaatcaataatgaaggattgtgcaaaaatctccatgttcactttctaggcatcgatgtaaaggacaatttttgccaattaaattgggaagtattgatgtgattttagggatacagtggctggccaccttaggtatgacccacaccaattggaaactccaaacaattgagttccaattgggaaaccatacaatccctgtaaagggggatccagcccttggtcgacgcttgactacactggaaaatatgtgtaaaatgctgctggctacaaaaaatggagtcttggtggagttaaatagggtggaaacagaccaaccatcgaatcctacggagtgccctccatacttacaacccaccctccacaaatacgcatccttttttgaggaacccacgggtttgccccctacacggcaacatgagcacgccattacactacaacctggtacagcccccataggtgtgcgtccatatccgtacccacattacccaaaaggtgaaattgaggaattcatccaaacaatgctctcaacagaaattatccagccgagtaacagccctttatcaagccctgtcctcttagtgaagacgaaagataggtcttggcgtttttgtgttcattaccgggccctcaatcgtgctactataccaggttatcatcaaatacgaatgaaggaggatgtgcacaagaccacctttcgcacccatgatggccgctatgagttttgggtcatgccatttggtttaacaaatgctccagccacttttcaatccttaatgaacgacaattttcgcccccatctaaggaagcgggtcttgatattcttcgatgacatactaatttatagcaagactgaatcggagcatgtgcaccacttgactgaagttttcagcattctttctcaacaaaagctcgatgttaacaagaaaaagtatgcctttgggcagcaggagattgtatacctcggccacatcatttctcagaagggagtggcgaccgaccccgacaagattaaagctatggttaattggccgacactcaccactatcaaacaacttcgggggttctcggtcttacggggtattacaaaaaatttgtggcaaaatatggttgcattgcccaacccctcactaactagctccaaaaagaccaattaggctagaattccatggctaaaaatgccttccaggccctagaaatagctatggtatcggtccctattctcactttacctaatttttccaagacttttgtggtggaaagagatgcatcaagtcatggattaggggcagttcttttgcaagataacaagcctatagcctacttcagccaaaaccttgggacacaagcacgaaaaaaaaagcaatctatgagaaggaattgatggctattgtttatgctgtagcaaagtaaagagcttacttaataggcaggaatttcgtggtccggaccaaccagcaaagttta

SEQ ID NO: 28331 - DNA, 3194 bp, Cannabis sativa
  modified_base (1269)..(1271): a, c, t, g, unknown or other
tgccacgtcagagtacaaaaattaagataacaaatgtattatatagtttattaatataccatcctattaaacattaaacaaaatgttatactcctttttttagtaccaattatacccctcaaacaataaaactaaacacatctccattcttttgtattggttatggttacatgttttgacatctgggatggaaactattaatttggagagaagataccagaagctttgtgtggattcgaaaagccttgtgtggaagatcttatagaatccataaggattttccaaataagcttgtaccgcatatgaaatgtctctcccggatagcttgttattaatccagaggtacattcccaaatagcttgctgacaatcttgaaggtccatctgggaaggaagccatgtacgtacccgaaaggcttgtgtgtttataaagctttcagattgtccatattgaaagcgtattttttaagatgacgtgaattattattgttggtgatgagctggatcatttaaggcagtataaatgtgccacgataattttggagataatttggccaataatacaaatatatagatagctataaatgtttgtaacctatgtttgaaaaagagagagtttaaactagagagagaaacttcgtctcgtaatctctgagagtttgtgaggattcttgaaaccttgtaaatactgatatcaataaagatatggctattgttgttccgataaagatatagagcattgcacatggcttgaactcgttaatcctggtattatccttttctattttactacttaattcaatacttgaatcttgagatttcttgttatataatttctttattgtattgcctgtttgttggtacggtaaactgaatcgtaagtcattaatatttttttatttagcccaacattccacctctctttctcccctctctctctctttctttctctctctctctctagaaagtcacacacacacacacccagttggagcaccctttgtcggagcatccttgccgaatttcatcaacttagctgttttatccccttggcgcccatgcattccgaatgcccaggctgcaatacagtccctgggcacgctggtgaggctacatgtagcttgggcacttggacatggtgctttatcacctaaaaatgcgattttcttgggatttttcctttttttttttcgaattttcccaatttcaaaccctaaaattcaaaataaaatattatttttaatttatttaaacttaaatatcaattttnnnttaataatatttaatttttaatagattattatgaattcttccatattttgagatttaaatttgaaaattgattattttattttttaaattatggtcagattttaaaaatttattaatttccttaatacttatatatcatttaattataagattagatattttaatattagccatattttaaattaaaagataactttacccttttaatttgaaatattatattaaaattatcttataagataaattaaataattattaaatttgaaattaacatagatatttttatagatattctgacaataatatttttgaattcaaaattagttattgttaacgcagattttcattaaccagatatgagcctaaacgatgataaacatgcacagaaaaataaaaacaataaagaaaaaagtatgaacacaaaggtctttcaagtgattttgcagttaaaattctgcatagttcacgagtccaccttattagatttttaatactgttttcggaccttttctcttatgatttttttgtccctttttcagtctatcttgcctctatttataattacatagtcacgcagttaaatacagagatgactgatatctttacaacaattatcccctaaaatcgtggggtttaattacataccacgtaaaataaatgcagttaatatttgaatatcccacaactgtgattaatctgcttttactgggtcaaggtaatcgtgtagtaaacacgttataaatcatattgttctgggatgtctcgataggaactcagatgcaatgaccttgatggcaagctggagcttctcccctatctcttcgaggttgataatgtaaacctcgtcgcttcttcgcttgaagatataacgcttcattttgacaatcacagttcttagtgacaaggggtactttagcagttaacatcatttgaatgtcagcttctgctcaagagaactgactcgttaaaactataatctcattaaaagatgtctgaagctaattggtgaaagtaccaggagcgtgccttcctagagagattggcgcctcgctattagttgcttgggtttacccaattgttatacttagtttatatattgtatattatacactaagtgtcttcacagtcattatatctcgcttacgtctactcatgcgtaacgaggttgatatctcactttgcacattcaatgtcgtatagtttttcgttaatgcacgaggcaacagattgtatatctttatctcgcgtaagaccttacagtcaacaagttgtaaatatactctgtcacttttgcatttatgagttattgcatttttaaatataattaccgttacacgcattgattcatattctttccaatttgacacgtgtctttcattgaaatggtagctgaaatgcaggtttaacaattgcccatttaaaaattctttttaataaaaatggctttttaaatgatcacagagcgtacatttgtcataatccctttcttcaagaccacgtatgctcttaaacttaacagcttcacgatttcgaggttcattattagcattaatgaactgccccttccctttcttcttcactccaaactattagatttcccaacctttggccttaccgttaatgggttctaagtataaaatgaatttcatccaaaaattggattttcattctcctacggagatgtcccatccaggctcagaaatttatcccgcaaaacctgtagctctggaatacaccaaacacctatctttccctaacattccccaagacttcaaatctcggttcgaattggaaatgaaggatctcagggttgaagattgtccaattgatccaaaccaagaaaaaaccgtcaatcgatacaactgattcttacaagggatttccgatagtgagcatcgctctttgtaaatggtggtctgatct

SEQ ID NO: 28332 - DNA, 1284 bp, Cannabis sativa
aggattattatgtgaatcacttgaatttattttatgttttttagtggtaatgctcccttcatttctatttgcaaatttaaaatgtcagtaaaatttgactataaaatgtcaattggatatgccactatttacatgtatatatatgtcatgtttttattactccaattaattttggttatttaaatatcataaaaaaataaatttaaactgtggtaatcttagttgatatttaatgatcaaatgtaaaaagaagcaaaaaagataatactatcacaaaaataaagataaaaattaaaaaattaagtgtataaaattaaaataaattactcttatattattaattattaaaataagagtctcttctaaaaactgttatttaatataaaaattgatcaaattaataatttttgtaaaatataggattgaaaataatattcacctttaattaattagaaaaaagaatgtaatctcttccaaaaattcaaatatatacttttttaaaaattataatttatttttattaataattttacacttaattttaacctaattaattatatttattttctcacttagtctctaattttataggagtttcaagtctaaccttttttggcacctcttgacttgagtaaataaatagagcctaccctatatatgtgatgtgatgatcataacgattgcaatatatatccaaatgaaataaatctcatcttaattatgaccatccatctgtaagcataatttcttactatcttaaaaaacctaactttgtggaagactattacttatttattattctcattaattgttttttctttcctttccttgaaatgcttattactcccatctcaaaaaaaaaaaaaaaaaagcttattactctcattaaatttcaaacctaacttattgtttttagctcgtcctatatatttttatctagctactttgttctagaagctttttcttattttccttgtcaatttatatttccataaaataattctattttttttttatttagccaataaataaatttaattgaaaccatgtatgtttttagtgttatataaatgtataaaagctaaagtatagtttcttttgagaaatttgaatttatatgcatatatttggtgtatattaaatttttgaacacaagctaactaaaattaaaaaaaataaacacattttatattcatacttattataccattctctttactcttttatattgatggtgatccgatggtgacccgacgctacccaatttttttctttttttttttt

SEQ ID NO: 28333 - DNA, 2475 bp, Cannabis sativa
tctctctctctctctcaactgaatttaaagtatgagcttttggagattagaactctttactcaaaactcagacctgaaataacccctatatatagttgttggtggggtcccctttaagttggtattaaagccaactgttataactagcagcagctttctttagattcatctaatgagcaaatagatggacatactgacttgacaggttaagtgagtttaatcccaacaactatgtttggataaagtaatgtattgtattaattattacgaccacatttttttaatacaatgtaagttgtattatttaatatataatacatagtctatattataattagcttgtaatataatatttacaaaggatctgggtcaacctaaatcatcgacccggtccccgactagacccgagacctagacccagacccggacccgagacctagacctaagattggggactcggacccagacccggtccctgacctgactcaggacctgaaccccgacccggacttagggcccaagacccggacctgaacccgaacccaaatccaggcctgaacccaagactcggaatccaaacttagacccggactcgaacttaggactcaggcctggacctggacccagaccgaaagccatacccaaaaccaaattcggatccgaacgcggatacaaacccggacccaggacccaagactcgaacttgggacccagaagtgacccgtaatcggtgttggtgtcgagtttattgaaaatatattatttttacataatctatttgtataagtcaatatcaaatataatatttattaattaaataatactaatacaataccatacaactgtaacaaacaaccgtgaaatacttacaaggtggataacatcattcatcactacattgatgttaatttgtagtcaattaaatgaactgtgttttgaaaaatacaaaagaaaaagaagaagaaagatcaagatgattattaatttttcatggagcaaacaaaagtttaaactgaagagaattaatcagaataatatctttccttatcatcatgatttggcgtgtatccttatcacaatctttacgtaacaaaactccattagtgcaaatttcaacaactggattcagctccgtctccgaatacataatacgtcatccactttcctaataataattttttttttgtcaagaaatacttttatttcaaataaaaatgtaaaaaaaactcattttctaaccaaataatctcaaaaaattagacaaaaacaaattatatattgagcaactttgtctctaataattattaatttctcttatcattgcacttttttttccttcgcgatagctcttagctgtcctcacagttgggccttatttaaaatttactgtacgatacatatttgtttttatttttttattttttttatcttaacgtgaatttaaaagtgggaaacctaacactataccgcatgatggtgtgaatctaaactaaagttgaataaacgacaaaaactagacattattagtatataataaactagacattattagtgtttggaaaagagataaaggtgggttaggatgtttacaacttttatttttatgcctagagccccgagtgacgaatgagtagggatttgggtggatctggttaatgatgtgtaatttactagaagcagctagggtcttaatcaagcttcaacaaattttatcattggtaattaatcacataatacttacataatacttatattttttttttaaaaaaaacatatatatgcatatattctcaaactatatatattatcttaaatatgtataagtggtaaattttgtacttcagtctcagtttgtttctctcaatatctgagtttggcattcttcaaaatcgaagttcctgcagacccaagttgattctcttaatatctcagagtatgttttcttctaatctttcatttttgttctctaattttcttttatttgatttttcttctcccctgtgtagaacaaaattatactagattgactcatatgcaggtctatctctcttgattttacttcctccccttgctcgtgattgtcactgctgcaatttggttttttgtggcctaatcaggttagtaatcgatatttcttcttccactttgttttttgactacaaaaatttgtgggttcaaaaagaatttgcggtctgattataaatataaaagttttatctgtttgatctgtaagtcgatcagttcctacctttggtttgaattgtgatattgttgaagacttgtaaattagaatttttaagaaataagggagtgagtttgcaattggcacacgtagggtcccaacatctgtctcagtcttgacagtcttggcctgagctgagcaatggagccctcactcatacattactcctcagataacacgttattcgatgtacaataataattccttcacaccatagccctccttattcttat

SEQ ID NO: 28334 - DNA, 1437 bp, Cannabis sativa
ctggtaaaatattcccaacaggacacatgttgcacaagggtcacatttggcaaacaaaggtgtcatgggaacattcagacaaaaggggtgtatgaaaatgcattggtggcgcacacactaccatgatctgacacaggggacaatatgtgatcatgtgttagaaagtggacacgtcaatttaagacaaacgtgcgcctctcgtctcgcggtagacatccagtactcacaccctgatagatgttcgactatcatcctatggtaggcgtccaaaagtttcctgcgtggtttgtttcgaagtggacccttatcttcattagaaggttttctacttccaagtgagcccttatcttcgtttgaaggttttctttcttttcgtgtctcagaaggctagggaggattctaggccttgcaagaacattatgtccccaaggcaaaactttgggccttcgttgggcttaggcccattcgaggtctggactagcattctgagagcgggaaggcttaggtctaactttatgtggtgattacattcagattatgccacgtgtctctattctagaaacacagataacatttatccccaagcttccaacacttaagagtggcaaaagcttacagtcttccttttgggcgaccttagagtcatcaggcatgtggacaatcgtgaaagaagtggaagcatttttctctttccagcactcatcaattgaaaagtcaagaattgatgtagagaacaatcggcatcacatgcgtgtctccacttcccgaatttgtgagtgccatgccctttgggaagacacattttgtgtgaaatgatggaatgacgaccatttacggtcaatgtgggccccgaggtgagtattaatgattaaaaaacatctcgtttcctataaaggcatctaatgttgtcccctcacttccttatccattagatcacaattttttaatttttctagggaggtcttggcccttgatttcaaagcacgtgaattgccactcttgcctatatataggcatgagggaaccactttcaccattttcttatttttgaatttttgagcttttgccttcaaatttgaacgaaagctttttaccatagaacaatccccagaaagccctagcttcaccctttggtgaatgaacaatctctttgacattggcatccaacttttactataaatctgagcgagggattccaggagcgtcacccctgaatcctgttgtgagccacccctagtcgtctgaaatagttgacattcaagcgagatgtgaacagaatcttcgttaagctttcgattcccaagccaatcaccctcgtcttcctctatccccgcgtcatattacaagtaagtatctctaaatttttgaactttttaattatatattgtaataggaatttatattcgattatcgatttgagaaaccattattttcatg

SEQ ID NO: 28335 - DNA, 1960 bp, Cannabis sativa
gttgaaatttgcatttccaaaagggaatacgaatcctgaaacccactatgaagctaaaaaaaagctcagcaaattgggtttaggatatcagtccatccatttgtgttatcatgattgctatttggtttacaaagagcatgctttaaaaaatttatgtccgtgtggaactagcagatgggctaatcccaattctcaaggataaaaggtcccgcgtaaggtgatgcgttattttccattgactcctcatttaaaaagaatgtacagttcaaggcatacaacaaaagagatgatatggcataatactggtcgatcgaaagaagttggggttatgcatcaccctatggatgggtctgcatggaaagagtttgacgttagttgtcctaattttgcgagagagcctagaaatgtacgtttaggattggcttccaatggaattaatccttttggaaatttgagtcaattgtacagcatatggcctgttgtgctagtgaactacaatctccccccaatggctttgtatgaaagataataatttcaaattgactagtcttattcctgggtcaagatcacaaggtaaggacagcgatgtacttcttaggccattggtagacgagttgaaagagttgtggagtaatggggttcaaacaagagatggtaaaacagatactatgttcaacatgagagctgtccttctgtggacagtgaacgatttttctgctaatagtagtttgtctggatggagtggtcaggggtataaagcttgtcctacgtgcaatgaagatacatcttccatccgtgttattcaaaagacatcttatgttggtcatagacgatttttgccccataatcatgagatgaggcgggacttggactttgacggtaaagttgaggaaagacatgccctaagaaagtttacgtgcaagcagattttagagcaagtaaatgctctaccacctcaaatcctaggaaaaaaagaaagttttggaggattgaaaccaaaaagaaatgcgagtgaaagtaattggagaaaaaaaagcattttttatgaacttgagtactggagtacactcaagctaaaacataacctagatattgagaagaatgtgcgtgatagcctcctcgacaccgtcttagataatgaaaagtctagagatactgttaatgctacacatgatcttaagaagatgggaattagagagtggttgtggatttatgaagatgagaacaaaacaataatgaagccacatgctccttaagtgctggatactgaagaaagaaaacggttttgtcaatttataaaaggggcaaagttcccagatggcttttgttctaacttgaagaagaaggtaagtgagaatgacaacaatatattggggttgaagtcccatgactgtcatgtaataatgaaacgattactttcactcggtgtttgtggattttttcaaaaaatataggagacacaataatagtgttggaatatgttttaccaggatctaaatttactaccatgtatgttaattaacatcctaaacatgaatatctaaaacaatgtaaataaacgcatataaagtttaggaaaccttacagtgggtgcaacagaatattaatggctctttccactcagatctctaacctttgtatcctttctgtcgcagagtatcaccaaggtatgaaattatgaagaaggaaagagaagtggcttgtttgaaattaatagaatagaaggctcatgaaaattttactaaaggtgaaaaattttcatctttaagtgtgagctatcactatctatttataggcaaccacctaggtttaggttaggatttattagacattaaaataatagaaaaattatgtgtaaattaccaatcaagtggccagccatactaatgggccccacttttgaaattttccacttttgacaatttttcctttattttctcaaaaatgccatttttccaat

SEQ ID NO: 28336 - DNA, 1361 bp, Cannabis sativa
  modified_base (119)..(119): a, c, t, g, unknown or other
  modified_base (196)..(210): a, c, t, g, unknown or other
tttttttaaacaattttttctaattaatattttgaacaccgaccccaacttagacattagaaactgaattcgaacccaacttcagtcccgtcctcaaacccgacttaaataaaattaanaaataaaaataaaatttacagattatacttttgtttttgttttgttatgaaaacatttttattttttaaaaataaannnnnnnnnnnnnnntttatgattaaaaaatttaaaaataaaaatgttaccattaaaataatattttaataataataataataataatagaaagatcataacgtacaacttaaatatcgattatagagcacatggtagtcacattctagctttgagcacatatatatatatagatatagatatagaatatagttatatatgtatataaaatggatatagaaataaaagtgtaaatgacagaaaaggaagatcaaaatatgtactgtacctatgatattgcagagtgtcaagttactcggccagaggtgatgataataatggagacggggaggacgaagcacgcgaagaccaaaatcgaggcaataataataataataatagtcacctgccttcatggatgctcagcaatcacaatgcataaaaggaaaaggaaaaggaaggagatactataaaagtaacttcatcttcagtccatatatatgtatatgcttaatttactcatgcatatatattttcatataaccgtgtacatatataatatttcacttggtagctagctattagctctctcacacttgaagcttttctttacatatgatatggttcttttaaatttacgtacggtgactagccatatatatataaagactatgatgatttttggcttaaattattttaaatgtcaggtgtcctccaacttcaataggaaaactcaaagaagatacatctgtacgacgtgcttccagcatggtgtcttttttctttgcaattttttttccattttcttttgggaggttacgctacaattgaaaccaaataactcttttgcatgtatgtactacgtggatgaactgagctcctcgatcactatatagattatgctaaactaagtttgtacgacaatatatatttatatacgtagctaccatgtttgctagctagtagtatatatgtatatgttgttgaaatagtactagtcgtactcgtttttgttgtataatctttttatcggtcatactaatcttgtatatatgtatgctgttctttgttgctgtttattcatctctttttgtaattttttttggaactgtcatttgttttcttccttttttagttaatatgctatatggggttaattttaatttgttattggaattcggaagcct

SEQ ID NO: 28337 - DNA, 4130 bp, Cannabis sativa
aattactattacctacctggttattggatcagaaggcagagaagggagagagattatctcagcttgtttggaatccatttctatggttggatcagatcagatcagatcagcttagcgttttgtatacttatttggggtctttccttgcttccccatttcaacctctctcttaccaattttctatatttataaacatcaataaaagcaggggatattaattattaaaaaaataaagccaagtgtgaatgaatgaactcggaacaagccaaatatttatttatttatttatttatttatttagagtagaatagtcactggatgtggactgtgggaacataataacctattttttaacaaatatatttataaattaacaaagttaaaatgttaaatagtggaagaattgcttggactccatacagtgagtgagtgagttaagaagaagaagaagtggcttgggctgccttgttgtgcctctatctactatacatataaatatataaataaaagcaaacactttagtttaacaaaaataccatgtaaatgtgaccacacatatcatgtattaactggccagaggtctaggattgggatgggatggagtggggggacctctatcccattctcttctcaagaaatatatttttacatatatagccatgtggttagcaccttcacattttcccttattcaattctaatttattaaacttgtttgcagctagcaacccaagattggaaatttctttctgtctgaaatcaaaagtctctcacttgctcttaattttcttccatttgaacccattattgttgataaattactagacatgtttcccattttttgtttttaatttttattaataaataattttgggtggtggtagtggtgagggtggtggtggtggggtattaaaagtgtaagtaagcattagacacatatgttgttgtggattctaggcaaggcaatgcattggtccatccaatttgaaatctacaagtcattgggacccctccacatccaatttaatttattgcccatttttccaaatcagcagtcaagtttggagttttagtttataagataaaagatcaagagcctattagttatcagccagacattcacactgagaaaatggaataatgatgataattggctttattcttacacagtcaatatgctaagttaacacaaacttttgtctttgaaaattcaataccacttcatactaaactcaaattatgaaatgccccaaaagtctaaacctctcttctaatcactgcaatctccaattattgttggaagagaaaaaatgaaaaagataaaagctaagaaataaaatatacaagaaggaatgaaaataataacttatgaagttttttctcataagcatcattatcatcatgcctcaggttgcatcttgtcacattcttctcgaatcgattggaaaagaacagaggacaaatatcgttcaccgaaactagggaacaccacctgaaatgcaagtccaacaaatcatcattcaaattctaacagtaaacaaaagtatttaatcttattgttcatttttatattgctccacatgaaacatgcttgaccatcatccaggtaaaataataataaaaaaatttacttgctgaaaaatcaaagcacccaataaacatgagtaatgtaaatacacaaatattgactcaagcaaaaaagtagaactttttttctttgttatccataccatagaactactagtagtagtgtataaacaatgtaaatacttaatagtattgtgttcaaggaaaaataatggtgggaaaatctttgtgttggcaaataattcttccaaatgtgccaaaccaaaccaaaccaaaaaaggagaaaggaaaagggtgagaagaaaacactaaataagtaggcctttttcaggttggccagtctatagtctttcaaaggactagactttggttagtgcacatgggacagtacaaaaatcacttcatgtggtaggcatgtccactttgaaaagaagaaaaggaaaatgttccatttttgtaaggtagaaattataaagcagatattcctcttctatcagtaatagtatgatggttttccacttaatgcagctacttttcaatgtgcattattattatgttatgtttggtttcatttgaatagagatgacatacagctataagcttcccggcattttcaggtctctttccaaccttgattgcagcggctgctgctgctcccgaagaaattccaacctgatgtagattaaaaatagattaaaaggaaaagattactactttatacaaattagagaactaaaaataggtataaaggtagttggaaaaatagagttcacttctttttctctggtcagaacttcagtgttctaaagtttgtgcaacagactttctatacactctggaaaaaaagatcaatcaatttcatcaaaattattaaaaaaaaaaggcacaaaccaataagccctcttggagtgctaattgcttggcagtttcaactgcttcatcactggatatctgccaatgacaagattcaaaatttgtgagaattgaaatttggtataattatacactcaaacaagaatggacttcagatttcgtagtaaagaaattaacagtgctcaagttactattagctgactttgccaacttaaccataatatagtagctttcaaaatatagactaaatattatgaagagaaaacatttaatcaaataactaaatacagcatatatcttgggggaaaaattcaaacctctattatttcatcaatgacatcttgatcaagattcctaggtataaatccagcaccaattccttgaatcttgtgaggacctgtatgtaattgcaatagaaaaataaatgactaaaattcaagtgaatgattagtatataaaaatagagggaaattttttattaaactaagttctctaaaaagtgtgtaggcttaccaggcttgccaccagataatatgttgctttcagtgggttctatgccaataacctgagaaatgggagtcatataatgtcacaacaacggaaagagaagtaaaaaaaaaaaagacttgaagaagatgaacttttctttgtgaatacttttgctggagtggaaaggttctaattggagagcaaagtggatgtgctcataatggaaaaaaaataagatgtaatttttcattacctttacattaggattttgctctttgaggaactggccaaccccagaaatggttcctccagttccgattccacctacaaatatgtccaccttcccttttgtgtcttcccaaatctcaggcccagttgtctcatagtgtacctgcatacagggtacaagtcaaagtgacacacagcaagccttaatcactataagaaaagtataaaatccctctaaaattgacacaaaaaattttcaggataacttttagcaggtaagttttgtaactccaattacacaccaagtataaagccacacatagaaatcaagcaataccgttctaagataaatgatgttgtgacatataaaccaatataagagatcacaaaccttaggattggcagggttgtcaaattgttgaagcatataggcgttgggtgtgccattcactatttcttcagctttctgaactgcccctttcatgcccttggctgaatcagtcaggataagctcagccccaaatgctttcaaaagaactcttctttccatactcattgatgctggcatcgttagtatgagcttatatcctttcgaggcagcaataaatgcaagaccgataccagtgtttccacttgtgggttccactaggatactctataaattggagaaatgaagaaaccaagttaaatcattgcagacactactagcaaaagcaacttccacaagaatgaagaataaaaaccaaatatatatttgcatatcaagctttcacatcagtcaatcatgctttttcctatccatttttaaggaaatgaagagcgttacaaacagaagggagaaaaagacagttaagtttacataattctcttcaaatgtaaataaaaataactggataaaacccaatgtcaatcaacccaaacgcttacaataagaatcatttgtaagcacattct

SEQ ID NO: 28338 - DNA, 1128 bp, Cannabis sativa
gtgagatttgatattgaaatacaataatagcatactaacatttcttaatatattgatgggatgtggatctatgtataattatttaaaactggaagtctaaatttgcattaaaagaaaacagaaggacccaatgattatgttttttttgttttttgattaatagaaggatttaaatttaaactctccaccataccttctcacctactacttaaacctttttaactgtttgagttagatttagtggcaattcatagtgaatgctcacctacccaacttacttaaattggcctttaatatatgtttggctgcaaggatttgttaagttactccaattagcctttaatctatttttatgtttgtcaagaagaataagtgggtgaataaagaaagtggagaatattatactgtttggcaacaaagcaagcaagagagaaggagaagtgtatggatttctaacaaactcaccattttgaatctttccacaaatgaaggtttttttaataactaacatgctcaacttaaataattgttaaaagaagtatggccgagtatgcgaagttgtgggtgtcaaagaaatttttagctgtatcaaatatcagaattttttccatgtagttgttgaaactgattatcaagtagttattcatgtaattggttattcccattaaatgtcttattcttttggtttgattattttttattgtaaacatctagtagtctacttgtttctttaaacaatatttttattgtgtttgttaaacgattaacgaacaaggtgactatttgtttagcgtgttcaacttgttctttttcataatgtcggtttagtggggagtttgtccctgctgatcttcaagctattttgttagctaatttgcttaattaataatacaccaactttttattaaaagaagtaataattgttaaaatattatttagcctatagcactttaatacccataatccacaataattaaaattataattttatttgagtcaaacttcatatagcaatgcacactgttggccctgattttgtccaaaatacgtggaccaaccggatgatgacatgtggatggaaagggtttagcatttaaacaaaataactaagtctccttaaagcgcagg

SEQ ID NO: 28339 - DNA, 2143 bp, Cannabis sativa
  modified_base (1214)..(1215): a, c, t, g, unknown or other
  modified_base (1421)..(1426): a, c, t, g, unknown or other
  modified_base (2017)..(2018): a, c, t, g, unknown or other
taaatttttggtataataataaatttttttaattatttaagcatataaattcaaatttcccttctctttttactagttggtggagaaaggaaccacacaagtcatttactctttatgtaattgtaatttgtaagcttgtcctagccattatatgtgtatatgctgtttttctttcttctttcaatgtaatgacaaagtcaacattctatttatgtatttattaattattgaaatactaactaaataataacataaatgaaatttgaataaagagtcccaatttgatgttataaactctacaatagagaaaacgacaaagtcagttaaaaaaattaccaagaaaaaaattgtaagtgactttacattggtatggtacttatttatttatttcgagataagtttgagccacatttcataaagagggtactactattagaaatataagatttttactattttgattaaaataatttttagtgcttgaaaattaatttttctctcaatatgtccattagaaaaatgatgcacaacagtcttggcatcgtcgctgtgagatttcacgatttttcgagatgtgtgagtaacattttaagagaatactaatgaatgtaaaagtaagaaaaaatgaaaagaagaatatttctaatttttgaattaaggggccattttcacaaaattaaacacaaaaccaatcttcatattcacgtcttagtagtatgaattcattgtgacttatgggaaaaaatattctgatatgggtcctggcaagatttcacaaaggggtaccactattagaaatgtgaaatttttactattttgattaaaattattgttagtgcttgaaaactacattttctctcaacatgtccaatagaaaactaatgcgcaacggtcttggcttcattcctatgaaattttacagatttttgggatgtatatgatgagattttaagagaacacaaacgagtgtaagagtaagaaaaatacttattaaaatttaccctgagcagaagaacattttaaatttctaaattatggggtcattataaccaaatttaatacaaaaccaatcttcatattcaagtcttagtactgcgagttcaatatgtctaatgggaaaaaatattccaagatgggttcgggccacacttcacaaaggggtaccactataaaaacttggctttgtccttgtaaaatttcacgatttttggagnngtgtagggtgagattttaacagaagactaacgagtgtaagagtaaggaaaaaacttgttcaaatttatccagaaaagaagaatattttcaatttttgaattagggagccattttaaccaaatttaatgcgaaaacaatcttcatattcacgtcttagtagtagaaattcattgtgactagtggcaaaaaatattccgagatgtgtnnnnnncacatttcacaaaagggtaccattatcaaaaatgtgagtttttcactattttgattaaaatgattgttagtgcataaaaatgactttttctctcaacgcgtcttatagaaaagtgatgcacaacggtcttaaattcgaccccgtgaaatttcacgatttttagagatgtgtagggtgagatttcaatagaacactaatgattgtaagagtaaagaaaaaacttgttaaaatttaccgcgaaaaaaagaatattttcaatttttgaattagggggcattttaaaaaaatttaacacaaaacaattcttcatattcacgtgttagtagtacgaattcattttgactaggggcaaaaaatattccgagattggtccgaaccacatttcacaaaagggtaccactattagaaatgtgagactttcactatttttattaaaatgaaagttagtgcatgagaacaactttttctctcaacgcgtccaatagaaaagtgatgcacaacgatcttagcttcgtcctcgtgaactttcaccatttttagagatgtgtagggtgggatcttaaaagaacactaatgagtgtaagagtaagnnaaaaacttgttaaaatttaccgtgaaaagaagaatatttaaaaaatttgaattagggggccattttaacaaaattaaacgcgtaatcaatcttcatattcatgtcttagtagtacgaattcattg

SEQ ID NO: 28340 - DNA, 3782 bp, Cannabis sativa
acatcttgttgatgtgagtagtgagaacagtagaggccaatggttttgtgaaggcgtctgctaattgaagtgtgctggaaacagggatcagtcggatggttgagttattaattttgtcacgcacaaaaatggcaatctaattcgatatgtttcgtgcgctcgtggaatgttggattgttggctatatggatagctgattgattatcacagtagataaaagctgatgtagtttgaggaattcttagatccgtgaggaggtattgaagccatgttatttcactggtggtggctgccaaggctctgtattctgcttctgctgaacttcgggagatggttggttgttttttagttttgtatgaaactaagcaatctccaaggaagatgcagaagcctgtagtagatcgtcgcgtgatgggacaagaagcccaatcagagtctgaaaaacccctaagctgtagagaggaatgtggagagtacaatagaccttggcccggatgtcctttgatgtatctaaggagatgatgcaaggcctgcacatgagtgctgtgagggttgctcatgaactgactaaggcaattgacagcatacattatgtctggcctgggcagagtgaggtagagtagtttgccaactacttgtctgtagtaagagggatttgtgagtggttctccctgttgatcgtctaatttggtccgggggtccatgggagcttttgcaggcttgctgcctgcatatccagtttcttcaagaagctcaatggcatacttgcgttgagacaaaaataagccatcctttcctttggcaatttcgaagccaagaaagtaacgtaaaggtccaagagcttttagtttgaatctggaatggagagactgttgaagttgatgcaaggtatcaagattaggtccagtgagaacaatatcatccacgtagaccagtaatgctatgaaattgtcctcgttacctctagtaaataaggtgtaatctgcctgagattgattgaatccttcttggatgagagcttcggataactttttgtaccactgcctcgacgattgctttaaaccatagatcgacttatggagtttgcagactagattagattctgcagacagagaattaggtagagttagaccaggaggtaattgcatatatacctcttcattaagatccccatttaaaaaggcgttattaatgtcgatttgtagtatgtgccattgtttaatagtggatatagcaagtaaaagcttaaatgtgaccattttggccacaggggagaaagtatcaaagaaatcgagtccctcttgctgagtatatccctgagcaacaaggggagctttgtgtccttcaatagagccatcgctattaagtttgattttatacacccatcgacaaccaattgctctttttccaggaggaaggggaataacagaccatgtcttgttgtttccgagagcaataagttcattgttcatagcatcgagccattgtctgtattgtattgttttttgtatgtttgtggctccttttttgaagtaactgcaagaatgaaagccttgtatgagttatctaatcgagtataagatatgaatttatctaaagaatgtggtgtggaggattgatcttgaatgtatgagtagcattcaaaatctttgaggtaactcggtggtttagttggtcgtgaagatcttcttgggacatcaggtggggcttcacgagatgttggagaaacatcagtgggattgttgtcaggttgtagagattcagcagtgctgttgtcgggttgctgaggtgatgcagcagtaggtgctgagttgctgatgggagattcaagccttgttcctgcattgtcagtatggatagtaggataatctccaacaagagtgttagtaatgttggaggaaggcagtgcaggtgtaagaaaaggatcaatgccattgttattgtcattcaatttgtgaaaaggaaaaatgttttcgtgaaaaacaacatttcttgagatgaaaatttgctttgatttcatacaatttatatccttttacaccttggggataaccaagaaaaacacaagctttggccctagcatcaaactttgtgcgatgtgcagtgagggtagaagcaaaaacaagacaaccgaatgttcccaagtaagcataatcaggttgtcttttaaataacagatcatagggagatttatttttcaggtttggagtgggaaatctattaatcaaaaatgcagcagtcataacacattcactctaaaaacgaataggtatattggcttgaaaatagatagccctgaccacatttagcagatgctggtgcttcctctcagcaattgcattctgctcaggggtctttacacaagtataatcatgtagaattccttgctgctgaaatagatctttgaatgccaactcaggggcattgtcagatctaaaccttttaatagaacaagaaaatcgatttttaacataggaaataaattggggaatcacattaatagcatcagatttatgctttagcaaataagtccatgtaaatctagagtgatcatcaaccaaagtaaggaaaaaattttgtccagagtgagaaggtatatggtatggtccccaaatatcacaatgcacaagatcaaaaattttagaagcaaatttattattgctagcaaagggaagttttctttgcttagctaagggacaaatgtagcaaggtgtgtctttgtgtaaaacaaaaacattacatcctagtttattgctaagaatattcaaatgtttatttgagggatgtcctagtctagaatgccaaacatcagcacttatagagaacacagggaatcgatcgggtgtaggatccagtatgtataagccattcctagattcacctttgccaatcatcctcttgtgcattttttcctgtataataaaatgatcagtatagaatttcacataaagaaaattttcttagttaggcaattcacagctataatgttgtatttgaaactaggaacatacaacacattatttaaaaccagattatatgagattttgactgaacctcctttatcaacaagcagatagttgttatttggtagcaacagtctaatgggatcgattttacatacaaattggaacaatttcatgtcagaacatatatgccttgtggctcccgaatcaagtattcaagtttcattgaagggaagcttggttacattggaaagcataatacaagtgttacttgtagatgtgctaggatctgcagtagctatgttgctttgctgatgagccagcaaatttaaaagttgctgatactgtgtagaagtgagttgaggaaggatagcttggctgtctgcaccagtattgctcgtttcagggctggcttgaacttcattagcagtgcatcttttcctttattttgattataaccaggaggatacccatgtattttgtaacatttttcaattgtatgtcccaagatgttacaatgggtacaaaatggcctattccttttctgttgctgagtcttgttgcctttagtgttgtttttctctccttgaaaggcaaatgccatactgttgctttgatcatttgacacattgacatttcccttttgattttcctcttgagtcaccagatgaaagactcggctcacttcaggaaggggatccatcaagaggatgctgcttctcacctgtgaataagagtctgaaagtcccatgagaaaggacataacatattctgtaacaccctaactaacttaggcgaattacgtgatttttaaacgta

SEQ ID NO: 28341 - DNA, 3393 bp, Cannabis sativa
  modified_base (175)..(178): a, c, t, g, unknown or other
tttttttttgctctaaactcgtgatctcgatacccgttaacttgaaatccaatcaacccgcccgatgttaagccctaacatgcactgatggcacaccaaatggacggagcagtaccaccccgaggtgttttttttttcgtttttttcttgctgtgcatctctctctctctctctnnnnctctctctctctctctaatttcttcttcactctcttttgcaatctcagattttagtccctcctcatatttttataatatatagtaaataagaatatttgtggcaaaactcccttaacattttcaattgttacacatatgaccccaataaaaaaaatagcgacaaaaattcttttacttatgattttgttgcagctagcctttttagttgttaagttgtcaggtgcaacaaaatcatgatatgtaaagggacttttgccactactttttattttcaattagggtcatatgtgtaacaattaaaaatattaagagagtttcgcctcaaaatacctctattatatattacaaacacattaaacatattatatattattaatttttttacattaaaaatagtaatttatatatatatatatatattttttaaaattttatataaatatgtttagattttattggatcgattatttttatatgtcaatcaatatttaatttgtacaagtatgatttttaaattttctaatccaatccaatctaatctacatatttgtactttataaattggattaaattatataaaattaaatcatgcagattgaattgaattaactattttacgaacactcttagtcatacttaatagctctacaaaattaaaggcgtttgataatattgtgctactagactgagggagggtgatgtgtaaatagtggtatggttgattatacatttgaccatatttcttgatctttgacaaatgaatatgtgtgaatcagcaagtttattgaaagttttagaatcttgctgatgattggttgatatactatggaggctaccagctacaatatcattgacaaagcaagccaaagtcaatataaatgtatttgtttttttaataaaaggtctccaacaatttaaaagaaaggttaagaaataaagtcaagaacccaaataaattaatatgatgataacaataataagagtagtttggctaaacactcttattggcacctaaccttagcttagtgtaatcttctcttagatagtgaacatatcattgtattactaaattacataagaaaaaaaatttcattctttcatttttttcctctcacaaatttgattagttaaataaagaagaacttgtcaaagaagttagttattagacttgtctgatataaataaatagaagaaaacaagaattcccacttaattgttattttatttactatgcataataatgtaccctctttctttggctgtttgtatttgatttatttccctttgtctctcagacaagttaaataaaaattgtattcacaaacttgtttctcttttaaattctagagttggtagagtgttacattaacaatctataaattcagagcctcatattaggttgggaagaagattatgtggactttgaccataaactcaatgaatcattaaaaattattatgccttgtttgctgtcagaaaataagaagaggatgtcaattgagtatttgaagaatagaattttgggaccaaacttaagaaaatatgagcattgttcacatatcattttactgtatggtggagccaatgactaagggtaacaataataatttcaatcacaggaaaagaaaatgtgaactagttttgggttattacaaataaatcatcattttattgggactttttaagtggtacaatcttattggcttttattcttttcatctatttttgtttttcttagcttaacaagtatttttattaggtgtagtagtattatccaacaccattataaagtgacactttacaaatagtttgagacaccaaattttagtattgcactaacaccaaaaatagtgttatatttttcttttttcttttcttttttttttttttctaactacacactaaattacaccaaaattaatatatatatatatttttattattatagtattcttttcctaaaaaattagagcactctttttactattatattattgaaaatttttatagtgcatctctctaaaaaagatgcactgatacaccttctatctgtttcggcataaaagtaaattttttagttcattttttatatgattgtatatgttgtagttatttaagatactttgtaaaattttaaaaaattcgaaaaaaatttacatgtcgaaaataagattcaaacagtttgttacatgcgtgactcttttattttatatacataagaaataaactatttgaatattattttttatattgttaattattcttaatttttcaaaagtttattaaatatcttaaataattataacgccacaattataaaaaattgatctattttttttttcttaaatactgaaataataggaaatacatcagtagtgcacttttttttgaggtgcattgtaaaagtacataaacaaaattattaaatatatatataaaaaaaatagatgttattagctacatggcatatatgtcgttcactgtagctagaacgataaaataatgttaaaaatgctgctatgttggaagtgccgaagtggagtatatactaaatttgactgttatgctatgctgtttaataattaatttaagtaggtaaaatttaatattaaattacatcaataataatacaaaaacactatattttatcaattctcaacttaaacccactcaaataagcaaatgatacatatgaatttatgaaatgttgttattattattaatttgatgaattgatacagataaatatttgtcctcaataaacagttctctatcaagatattccaatttttaagcaagttatttgtcctcttttgcttgggctctatattagcaggaatcctttattaaggctttataaatatactttaatgatctctgtacactcctattcaaatctccttaggccaacacaacatttttttggatctattaaaccaaacctcacatgggttattttttggaactataccctgttttcaacttatgaatattgatcaaaatagtagttgatttgcttctctgttttctcttgtatttaatatggtattaggtggttttaggttgtgatgaaggatttttgatggttgacatcttaacctgtgagattgtggaataataatcataatcataatcaaatgtaaaaagggagaaaaatatgtaacatatttgttatctctaaatggaattctaattcaattttcttttagttttc

SEQ ID NO: 28342 - DNA, 2057 bp, Cannabis sativa
aatcatagtgtggaagattgtgaagaattccaacacctgaggagatccaggttcaaattttgtaattactctatgacacaaaggaacaagggcaaagcttgtttgctcaagagttcaaaaaggtgccacggagcaatgaagtgtggtctagattgaatacaccgaagcatagttttctacaatggctagctatgatgaataggctcaaaaccaaggatcgattactcaagcatggaacgattgacatagacacttgcctcctctaaaactcggctgctgaaacagcagagcacctattttttggctgtgtttttgctgcagaatgtattgaacagatcaaggcctggtttggttggaatacaagagagagttcacttcaaagcatcatgaggagggtgagaaaagcaagttgctccaggttcaaaaagagagtactggctgctggtttagcagcccttgtatacttgccctagaagacccgaaatgagcagcagtgggaaggaaaaaaatctagtgtagctgaggtaatccaacaagtaaagtggtgtgttaagagtagagtagtgtctatatggcctaagaaattaaacaaaaagatagagattggtttgatttgttataagtaaattgtatagaaaagttaaggcctactttattaggtgcttataggttgtaaagttttgttttgtggtgcaatgaaattctgaattatataaaaaaaaaaaaattatgaaaaacagttaaccttttctcaatgatgttgaacattattaatacctaataattaatgatcctaatatataataaaccaaattttcaaaagaaaaaaatttgagaaatttatagccaacactataaaccaaccttttagcaattcataattaacctaataatgcacgttttttttgaacaaacctaattgtgcatgttcgagcaacttagttacattagaattttcctatatatatcatctcaaaaatatataactaattataaatacaacaaaattaaaagttataatttggagaatatgagtggagaaggaaaggtagtgtgtgtaacaggagcttctggcttcatagcttcatggctagtcaagctcttgttacaacgcggttacactgttaaagcttcagttcgtgatcttagtaagttttctttcttaatctctttttggtttattattaattcaagagaaatgttataattatatgattcttagaaaaataaaataaaataaaattttctttaattactagatgtcatcatttttatataaaaaccctaactaaaaaaaattaataattatgtttacacttgtaataaaattattattttggggtacaaaaaattaaaagaagtgttctgggcttttttttttgttaaaaaaaatatataggaaaattttatggtgcatgatccttttcgttttttcggcatacaatatgactacatacaatgtagttatttaagatattttgtaaatttcaaataagttcaaaaacatgttatgtgctggaaaataaggttcaaaatgaaacaaggaatagaatgtttgaactttgctttctatattctatattgtaaattattctgaattttttaaaattttgcagtttgtcttaaataattatgtcacagtcatacaaaaaactaaaattaaaactatatgaatgttataaatacgaaaggaatgcattagttacaataataattataataaaaaaagttagagtatccttttttttcgcatcggttctccttgaagattaatgttagcgtcagttcagtaaccgatatttgtcaacgcatttcggttatgtaccgatgtcagcctatactcatttctctagtaatatgtttatatctatatctatatgtgtaaacttaggtgatgcaaagaaaacagaacatttgatttcacttgatggagccaaggaaaggctacaactatttaaagcaaatttattagaagaaggttcatttgactctgtggttgatcattgtgaatgtgtttttcatactgcatcacctcttactttcacagtcaatgatcc

SEQ ID NO: 28343 - DNA, 4169 bp, Cannabis sativa
atcataagaggacataggttggatggctttatcaatgggaaccgtccagcaccgcctgagttcattcgcacaggagaaccaaacgttgatgcacctggatctggaatggacatcaacccagaatatgaaacgtggttggttcatgaccagctcttaatgggctggttatatggatcaatgacagaagcaatcgcatctgaggtcatgggatgccagtctgctcttgctctttggaatgctcttgaagaattatatggtgcacactctcgagcaaatatggatgagttacgaaccaagatccagaccactcgcaaggggtctcagtccatggcggaatatttgaagatgaagagaatgtgggctgattctttagcacttgcaggtgaaccctatccagaaagacatcttgtttctaatgttttatctggtttagatgtagaatacttgtctattgttgtcctaatcgaatcccaggagagtacatcttggcaacaattacagagtatgctacttagctttgatggtaggctcgagagacttaacaccatctctgctagtagcaaactggtgggaaacgcttcagcaaactttgcacaaaaacctgggtcgtctaacacagcaggccaaaggagatttggttcaaatcaaaatcaaggaaggggtcaacaacaacaatatactggttacacaagaggaggaagtcaaagaggaagaggtcgaggaagaagtaatgggcctaaaccgacttgccaagtgtgtggcaagtatgggcactcggctgcgatctgttataacagatacgatgaaagctacatgggaaatcaacccaacactactggaggtcaggacaagcagttctcagctcttgttgcaacacccgaaatgattaatgatgactcgtggtatgccgatagtggtgcgagtaatcatttgactgctgatgcaaacaaactgcaaaacaagacagaatatgagggtaaggaactaattaccattggtgatggtagtcagctaccaatttctcacattggcacaggtttaatccaaacttctactactaattccttactgctcaatgatatgttacatgttcccagtatatctaaaaacttggttagtgtttcaaaactaacggctgataataatgtttctgtcgaatttttctctggttcttgttgtgtgaaggaccaaagcacagggaaggtggtgttgcaaggaacccttaaagatggattgtatcaactcaactcctcaccacagtcacaacaaactcactctgtcttctcggctgttactaccaacaaaccacctgttacacatgttaatcatcattccctaaaagacatttggcataggcgtctaggacatccttctattaatgttttaaatcaagttctaagacagtcaaatgtaaagtttcctttgaatgaaattccacacttttgtgatgcatgtcaatatgggaaatcacatgctttacctttccaaaaatcgcattctaaagctgctggtttgtttgatcttgtgcatacagacttgtgggggcctgcccccatatcatcacacactaacttcacatattatatacactttctagatgatcacagcaggtatacatggttatacctgttgaaaaacaaaagtctgatgctctaacacagcttttattcaattcaaagctatggtagaaactcagtttggtagaaaaataaagaaactaagaagtgactcaggtggtgaatatcaggccttttcgagccttgtaacacaaaatggcatactatttgatcactcttgtcccaatacttcagctcaaaacggtcgagctgaacgaaaacaccgtcatattgttgagatgggactcaccctccttgcacaggcagcaatgccacaaaagtactggtctgatgcttttcagaccgcagtgtacttaattaatcgcttgccaaccactgtacttagccataaaactccttttgaggttctatactctaaactacctgattataaactactaagagtgtttggggctgcctgttttccttgtcttcgtacctatcaaacccataagtttcaataccattcaacaaagtgtgtgaatttagggtatagtgatgttcacaagggttataaatgtcttagctcacatggccgaatttacatttcaagacatgttgtttttaatgaaaaggaattcccatgtcaacatggtttctttaacaattaccaacctgaacatgaagtcactgtgactatccctcattcctggtttggcttaccatttaatacaattccatctcggtctcctgcagcatcacattctcagtcaccttcctcacaagaccaggtaatttctgacactcacataactggtgcacaaaattctacttcagatttattgttgcatactcctgcagtctctgtcactagttctgcctctgttcattctcaatcagctgcttctcctataccttttccctctcctgaatcaccctcacctgtgccacaaccaccaccaactgctcctcaacatcccatgataacccgtggcaaggctgggatttttaagccacgggttctggtttctcacacagggtctggtattcctctttccattcatgaggcactccaccatgaggggtggaacttggctatgaatactgaaatgggtgctttgcgtagaaacaagacatgggtgttagtgcctccctcaccacactacaatgtagttgggaataagtgggtttacacagaaaagtttgatgcagctggtgtgtttcaacgattcaaggctcgccttgtcgctaaaggatttcatcaaaggcccggggtagattttagtgagactttcagtccggtaattaaagcctctaccataagagttgttttgactattgccgtggcttataattggactataaggcaattggacattaacaacgcttttctaaatggtacgcttgatgaggatgtttatatggcccaaccacaagggtttgaagacccttctaaaccacactatgtctgcaaactgcagaagtccatttacggcttgaagcaagcaccaagagtgtggtatgaacagcttaaaagtacattactgaagtggcattttgtgaactccaaagctgactcttccttctttatgttaaaacactcagaatatgtcattatggtcttgatttatgtcgacgatatcattgttacaggcagcaagactacagaattggaaaagttcattgctcgactaaacatgaccttttcattgaaggatcttggagagttacactatttcttgggcattgaggtatttcgggataacacaggtgtttatttatcacaagggagatatatctctgaacttttacaacgggtcaacatgatgaatttaaaaccaagtcctacacctatgacagcaaataaaccactgtcaattcgagatggagaaccaatggccgatccttctcactatcgaagtgttataggtgctttacaatatttgagtcatacaagaccagatatttcctttgcggtaaataagctcagtcagttcctgaaaagccccacaaatgtccattggaatgccaccaaacgggtactaaggtacctcaagggaactatgcaacatggcatacacataactccaagtgatagactctctctcacgggtttctcagatgcagattgggcgtgttgtccagatgaccgaagatctattgctggctattgtgttttcctaggtgactcacttatatcctggtcttctaagaagcaaacagtggttgctcgatctagtacagagtcggaatatagagccttggctcaacttgctgcagaactcacttggcttcaggagttactaaaggaaatgagatttaaactccctgcagcaccaataatctggtgtgacaatatgagtgcgagtgcacttgctgccaatcccgtctatcatgctagaacaaagcatatcgagttggatgtacactttgtcagagacaaagttttacagaaggagttggaaatcaggtatataccatctcatgatcaaattgccgatagtctcactaaaggtcttgcacattcaagattccaattcctggttgacaaactcggagtgacttcatcaccctctcgtttgaggggtggtgttacaggataaaataggcagg

SEQ ID NO: 28344 - DNA, 1541 bp, Cannabis sativa
tcttagctatatttgaggcatgcaaatgtggataattgaagtatatatctatacacaaaaataaaattataaatttttattattattacgaaagatattaactattagctgtttttttgtccttcattaattaagagccttcatttcataatttttattagttgaaagaaccctaataataattgtatatatatttgaaaatataaataattattgtacataagcagctgtaataagctgtacatcattaattatcattgttaagcacaacacatccaaatagttttaggtggctcttgcctagctatgctacatatatatagggttttggtcatgtccaataatttatatttatcttatatatttatataatttatatatatatcatataaaattaatgcatgtgttaactacatgtgacccacttttttttttattattattattattttattttgatgaatgacccacattattcatttagtaagtgataaaattgtgttattatttttcaacttgtaattaaaccccaaattaattatattcaaagctcaaacaatactcttcattttatttaacattactactactatttatcatgatttggaccacaataaatggcgtggaaggcaagtcaaaatttgaatatatttatatatattatttaatatttatacgtattttcttaatctaattcttgtattgattaataatttttctcgtgaaaaatgttaaataaatgcatttttgataatacgtgattgggattaacaaaaaaaaccccaataagtggacattttttaattaagttttagaagtcaaagcaactacaaaatatatttattataaatggttggtgttatttatttatttattttaaaaaagaattaatgtattaatttattaattttaaacacgactataataatctctaaataaactaatttgactaagaaaatgaaacttcttagttcttacttaatcagttagttaatcattaaataatatgtttatttttataattaataatcattagtaagagagtacacaagtttagttgacaaaaaacaaaagtttgggtgaaacttaatgtcacgcactaactaacaaaaaattagggctttaatgtgtgaaaagtaccctaatcatcatcaatggtaattaatggtaaaaatttaagaaattatataagtaataatatgtgccgattttttactaaaattttctagctgcttatatgtcggtaaatttttccgatcgattaattaagtgatcttgagatcatctagagaaatgttaaaagatatttatggtgtttagcactttcttacatgttaatatttttattgatataattaaatattggttcctatataatttaaatataataattttagaaattatcgttaatcaagatgacattcgcaaaccacgcaggaatctccatgaatctggatagctcatcgtctaaccgaatgacatactttgtcaaaccataaactgctaaaatcaacaagtaacatgagacaaaactgctccca

SEQ ID NO: 28345 - DNA, 1853 bp, Cannabis sativa
gtcaggccttctcaatttctgggctttcttcttcgggctgggctgatgttaggcctttcatttcaacaataataatagcaataaatgacaagaggatttttatgtggttagtccactttattctgggttgataaattgtatacataatacaataaattgttttactaaatgaattatagatacaattctctttctttttccaaaatggtcttcctttgttccctgggttctgtccatatttataggagtctaggatgacagttattcccttgggatcttaacacttgtaaatgtccgtgaatcgtggacaatgcccacgttttatatttacgcacatagaataattacaagtaacttcccataactgcactcttaactttatccacaaatggctgtgttgattatgcttcaaactcctccaagtgtgacaattatttttgacaccttatcgtaagccaacgtctaagtatatgttgtaacattcctcgcgttcttcttttaatgttgagtgaggcacatgagagacgtttgtcacaccaatataattgcgaggtgaatcatgttgaaggtgttgtatttattctttcaacatgctcacgtgtataggttaatgagctactagctctttggataactcattatctacctttccaaataattatgtttatgtattctgtatatcccaagatgaactttctttgttcatctcgctagtctcatcaattggtagttattattcatgcctccccattgtctttaagagggtgagtttgaatatttctgccaactatatttcccgaggcgagttgtctgaacgcatttgttattgtataatttgggttggtttatatttcaactatattacacatgtcagcaccatattgttactcaaaatatgggtataacaatgtgtttcatttattaattctcaaaattaatacatataaccactttaacaattatggttactttatttataataaaagcctcaaattataaataaatttcccgtcataatcattaaatatgaagtaactctttaattcataatttaaaactattttaaattaataggttaattttaaattaccaagttaattctaaattaatcttaaccagtttacatgctttaggtttcaaaaatgataaacacataaacacataggaaaatcttaatatatcatgtttctactatgagatgcatgataatatataatagtgtgagatttctgtatgacatattattcactaatgcatgagcattgttatcccaattttttcccagataacatggcatgtccatgtagccaagattgatgccacatggaatacagcttgtcagcaagaaggccaagtcaccatgtacaacatactagttgagaaggagttgaaatacttaagcggaacaaagagataatgaattggccaaccaagggagtctggtcggaccacccctggctgaccctatttctagcataggtcagccagcctccagcaaagggagggttgaccagcctctctcctggcaggcactttttgtgcctctgtagcttttaacctagacaacacttccagttacgaattaggcttcaaaaacccatgaaggtaggagataaactttagttatttacctattctttaggattaattaacatattatttacttattattttaacgtgtaacaaataggtgatatcttctcattttaagggatatcaacctatcatctcctataagctctcctatataaaaagcactaaacaaaacctaatctttctaagttctatgcgctaagttttaggctctatcctcttaagttctaaagccctagcgctctctctctctctctctc

SEQ ID NO: 28346 - DNA, 2453 bp, Cannabis sativa
taatccaatcttgtccagtccagtccaatccttttcaatccaatccagtccaatcctgcgtaccaaacgggccctagaagtacttctctaccactagtagagaaggactgagacttccaattgaacagcttattccaaatacgatcacaaaatagattaaaacaagaccttttttagtttctcaacatagcaggtgttatccatgttttcaaatgagaacacgtgtaatttccaaagggattatagctcaatcccttcagtcctaataacaggcccatctaaaatgtcttaaatactaaaacgtacagagccatttaaaaaaaataaactaagatattctactcgatgccaaaataaatttgaatacatccctacatactttttttttaaaaaaaaattattaaatataatgtaataataatataagaatgaaatgaactagctactatatacaccaaatattgcgtatagtgtacttgtacgcttatatatttgatgcaattataatttcttggagtgaaaaaagttaaatttaaatcaacactataaatatagtcttacaaccactattttaccgagtaccatatgttttgtgtatgaataaaaattaatccaatctatcacacttattttgaaatgaaatatttttaattagtaataaaataacatttgattttattatggtgttaccatagatgtaatatttatagagaggtattataccatgataaacacaaataatttggaaccgaattttaatttatttaatttggtacatactaaaattcttataacttcaagtcattcatttcatattttaaatttgagaggacacaccgtttagttttgccattttaaaaaggattcttttatttgcaacaacaatgggttgtatataatgtggagaagatctaatttaatctaattaaacatggatctaattcaatttaattatatgaaaatataaataaatatctaatcataattggatttgaatagatgttaaaagttttaatctaacttgatacatgatgcatctacaaatattttttcattgccgattctaattagattaaaatgattattggatgtccatctcaaaattaaattcaaagtcgattcaatcaaattatatttaatatgtattaaaaattatttatttaaaaaaaatttaaaataaaaaagtatattttttaatgtattttcacagtctatttttttttttatgaatttgtaatacttggtcttgttttgtgtatatttgtgtttatgatgttttgttgtattttattatttaatagtattattttttttttactttatttcaaattttttagttgaattaaatttgctgcaatgtacaagggaaattatttgaagcatctatcttctacatactcaaaggctgaaatggagcacatcctttgtactctttggtgcatttggacagaggaaaccaagtcgttcatggaaaatcagaaagatctacggtctctcttgctgccttttccaccaattacttgaataattttcgaacagctcaactgaaatatgggcaacctattgcgacctcctctttgccacctgcttcagctgctacccctgcactatgacagccgccacctcaaagatacttgaaactgaatgtagatgccgctattgatgaatctcaaaatatcataagcgtgggtgctgtagtcaggaattcatcaggacatgctattgctgccttctcaatgcctactgttggttatttttcatcacatgaaatggaggccaaagccatgtttcacagccttaattgagttcttcaaatgcagctactatcacacttgtggaaacggatgctcttacggtctcaaatgccttaaattcaaatatcgtggccacttcttctttcaaagatttaatcatggacatctttagtctcctttccttttttcctaacatatttgtaactcatggtaaacggactgctaatgtagtcactgataatttggcaagagatgtcttagggttggatgagacttgttcttggttagagaattttattccttcgatttactttgttattgtaaataactttcctcattaatatataataacaaagttatcttttcaaaaaaaaaggatgatatattttttaaatataaaacttaaatgaagggtgatatttaatttatatgtatttttcttttcatatttttatgttaagattagtaattgaattaaatttaattaaattttgaagtcttaactagattaaatcgggtgataaatttttaaacttaattattaattaaattaaattaaattaaaaaacttaaattaaatcagatatgcaatcaaattaaccaaacaaggtaaaatttcaattaacttgtacacatgacaaaccaactgatacagtgaataaattcagtatatgtttgtagttatttttaaaagtatat

SEQ ID NO: 28347 - DNA, 1417 bp, Cannabis sativa
tctaaaaaaaaactgatccaagagtcaaaaagtaaaaaaaaaaaaataacacttgtgattcggaaatagtgagcgaaaaaaaagagagccaccaaaaatccaaaaataccgatctaaaaaagtagagcaaaagagccacttgtgatcagggatagtgcaccaaaaaaagaaccgcttatgatcgagttgtctaagatgataatcatataaaatagctactatcttgaggggatattaaagagtctaacattgctaatatgtggaaagataataaaatatataagaggaataatctactcctcctataatcaatttatcaacgaatacttcaacaatttttcttcataagtttgtaatacatccaatcattttcaagtgtaactcctaaaattaagcagaaaaactgatttttttttttcgagtatgcaaaatcaatccataaaatcttattttgtaatgagactaacatgaagaaattaatgtagaagaatatgaaattcaattatccaccgcaattaatggtagctactagctagcccaaacccaaactagtatttgtgacaaggagaggtgagacttgtattgtatcttagtatgttgacacaataaaatcattagtaattttcaaaacattattatttaattatgtccaataatttgtagacttatgtacacaacattaatgaataatgattcgtactcaaaaaaaaaaaaaaaagaatgattcattaatcaaaggaagaagaaacggtagtggtggggtcctaagtctaaaacagttattatattgttaataataattggagtgtgtgggatccataactgatttcaatttttgccattttatgcatgagaagaagaagatctcatttaggggaccctcactggtcaaaggttgttaatacgcagatgagtaattattattagagcaatgttattgtgcccaatactttatgtattggttagtaatattttttaaaaattatttttttaaattatacaagattaatatttaatatggtaaataattgtttggattatgtattttgtaatagttattaattagactatctatttttgttaaataacaaaatagatcatgtattttttaaaattctacaagtagaactctaaaatgattttttgtcaaaataaaacttaataataattgttctgacaaaactggttatattttctgtatttgttagtgttaaaaattgttttaaagttggttatattaaaaaataaaatttttgaaaaattgagctgagaatcctatttttatcattttagaaaatacatggtctattttatcatttaacaaaacaaagtgcctaattagtaatttttacaaaatacaaggtccaaaatagtatttactctacttaatacattttcccaattctattattattgg

SEQ ID NO: 28348 - DNA, 2583 bp, Cannabis sativa
aatcatattattggcagccattggtagttccataaaagaaaaaagaaaaaaaaaatgtaaaaacttacatgaacagcaagggccgaatgtagaaacttacacgcacgcacgacacgtttgggacgttggggctgagacctgggagtgggaggctgggacgactgggctgggtggcgatttgcttgctgctgtgtctgttagggtttcaacataggtgcggctgctagggttaggacaaaggagaagaagaggtaaatggtatagtattagactattagggtaaatggtttttgactttgtattgttaaaaacttaaaataattattaatttttttttatacatcacattgggctgggccggcccgggttgggttcaacggtttagaaaaatgccaacctgttatcaacccaatagtaatgggttgtaagcttttcaacccaacacatattcaacccactaaaagagagcatgctcggcccattttcgggttgggttggccggtttggtcggcccatcgggctaaatgctcacccctacctttagctgttcaggattttccttcctctctgtgagggtccttgtcttgctggtttgggcttctttcccttaaaaaaaattaaataatatcattatattcatacgtatatatatatatacaaatttaatgtatattaaaacttgcaaacatgagaaaaagagttaataataatttaaacctctatttaatctctccttacattgcatgaggaaagagttaataataattacaaacattgaaactcacaatgtatattgattcatcatccatgtttatggggtgttcatctaattcaattcgcactattttgttcatagtgcatctgattcgcattaagtgtgtggattttattttctgaatctaattcaatccgtacaatagctcaaatccaattcaatataatccacaaaagtacggattggatcggttattttagattagttactttttgatattaaattatttaatatttatgaaaaaatatttttttgacataactagcaataaaataaaataaattatagttattttatgtctctaaaaataaattaaaataaataaaataaaattggattgcaatatgttaccaagatcttacaatcgtgatttctttttctatcagttttccgtgctctaataattttaagattattgttagaagtttttacaagtttgtcattcaaattttcaggggtgtccctaatctgtgttgctcatagattaattacgcatgtttctcggatggattaacaacttatttggctatatatgaaaatctatgttttttgttggagatgtgtagtactatattttgataatcatgacatgtatagtatttatttgatgaacatatcataactagcccgtatgacgtttttatatttttaatgaatttattcattactttcaaaaaaaaactacataaataaaataacaaagaacaaatttaaaggaagaaaaaaaattatatgtatacagaaatgtttaattttgttttaaattatatatagaaaaatatatacatttaagaatagaatatacatttgatttattacgttttgaaataaattatattatatgtattagacttttaaaatactattttctttacattaaaatgttatttgtatatataatttttaatttcttttataaatatgtgtgtattgaattagaccggttacttttacatgtcaatcaacatttatccgtacttgtgcggatatccgcacaaatgcgaatatctgtactttacggattgaattgaatcgtgcatattaaattgaatcgactattttataaacacttcagctgaaaaaaaaaccacttcagtcatctcccccttcctggaaaaattcatttgtgcagcactattttaactgattggggttatgttaggctatttttagcctaagtttcgggtcttataaataagcattttctcgattattgttgtcttttggagcggttttacgcttgattttctttgattcaggttcccggtgcgttagagttcaaattcagtcaattgacgaaaagacgggacaaactggtgaaaaatcggccaaagctgctcaacggggatcaatagtcgcgaccagcttatagccttgtcgcgacccttttatctggtcacgactatggtcgcgacttgaggttttggcagaattcccgattttcgagttttgcctgtggtcgcgaccagcctttaagtgggtcgcgaccaggcacggagaacaggatttttgacctaattttgatttttttccaattagaggcacacctctcattcctatataagggatacgattcagactgccaaaggtatcagaaattggcccgaaaaagtgaatgaagaaggagaggaagcaatcttgaagacccggagcgatatcaccatctagtttctttcttttactctttatttctcttttatgtgtatttttgtttcagtattaatcatggatgtttattttatttttatgaactaaattcccattaagggaggatgatgaatgttgtttaaagttttgcctagttaatg

SEQ ID NO: 28349 - DNA, 2222 bp, Cannabis sativa
atacattctagagtaataaccctataccacaaaatagctaaacctaacgtaataaccctagtcttggttttttgcataatatacaaaataatatacatgggcgccactacactaatctctatgtcctaactcattgtcttacctggtaatccaagtatgtggagattccaaaccaccgagagttcctgagcaagcgccggtaatcctagtcatacattcctaagatttcacatatatgattaatccaaaattcattttcacacatatacataatttaaactccaattataaattagcacatagagcccaaaacgagcattccaacgataccaagaatgtccaaaatggagttcggagttaaaagttatggccaaaacaagttttaaaacattctgccttgctgaacccatatcgggtcgcgacactcaagaatcgggtcacggctctttggttaaaaacctaaaaaaactcatatttaggtaccgcgaaaatgcaccaaactcaacactaaaataccttgaattgacaacaagcttccaaatcaaattgaggtgttttccaagcatttatacaccaaaatacacccaataattgtgcacaaactaaacttttaatcaatatcaacctaattctacaatttgtatcgaattgagcacaacacatagctcaagatcaaaaccaaagcacacattaagcatgttacaccaaagttaatattgtacataaatccacaagctttgaaactcaaagcttcaaagcataacccagaaattcaaagtatttttcccaaaattttaacatcaacaactaaaccaaagacttccataaacaccaagatgattctagcatgaacctaataactagggtgttcataaaaaccgataaatgggaatcgaccaaaccgtaaccgaattttcggttccacgtcatcatcgaatttggcaatcggttttgattttggtttttttgacatggtggtcggttttggtttttaaaataaaaaaatggttaaaccaaaaaactgtcaaaaccgctaaaaattgcaataaactgcccgaaatcaccaaaccgaaaaaaccactaaaaactgccaaaaaccgtacggtcgattttatatggttataatttctaaacggtcggttacgatttttgtaaaataaaaactgtaacggattggtcggttataaaattgtaaaaaccgaccataaccaaccaattttcacctctactattaacaaaatcataccataatcaccaaaaattccctcaattacaacaacatgcaaccacaaattcaagagcacctataacatcataagcaagctcaaaatcaagaaaattcaagtaagaaaagaagatcaaattagtacctgatgctctccaagttctaaggaagagaacccacacaaattccacaccaaatccaagctaggggcccccgtaagcaatcccctttgggtaagcgttcaacttctgactcaatctgcaccagccaccagcatggctggagcacagcaaagttcccgaagtaagaggtcttctaaagttagtacacggtctaaagataagagataaaggagagggtatacgccccaacgtacacaatacaccgagctcatagactctcaggaacgtgtatatttttaaatacgcattaccaaaaatctcctcctttgtacagggacagctctcggcgggaccccagcaaaaggtgtgactatcacaatgatattggtcataccacgaacgagtgcaaaaatttaaaagatgaaattaaaagcttaatctgattgggcatcttatatacgtggatcaaaaataggttgccacacttgaatccagtccaaaccggatgcccagtgtctcagggaggaactgcgatagcgctggagggtcaggtacctctaggagggatgccccttcaacaggcacctggaataccacctcaaactaatgggagagtcgctatgatctccggaggccctcatattggagagaccactagaaatgagctaaagtgttatgttggggccctaaaacacgataaggagatatgggaagttactcaactttcggctcaaaggcccacgctcatggatcaacccattacttttactgaggaagatgtaaggccagtgcgctttccgcatcatgaccctctggtcatcgaaactcctattttaaataaggtcgtggccagaatattagtggacaatggaagc

SEQ ID NO: 28350 - DNA, 1729 bp, Cannabis sativa
ctgcccgcagtgagtagagggaacaaaatcctcggaacaagagcccaccacgagagaatattaaaaggccttaaaatgaccccactggcccatcatcataatcatgggcccctattggttgggcccacctttcgatggttttggggaggtggggaccgccaatggagttgctattatttatttatatttatttttttaactttcgatgtaagaaaacgacaaaagaatttgggaaaaagggttgtgggacccaacaggtgatgacgtcatgtggggttttggagtgagggacaaggtgggaaaaagtgaaaccgtgggttttggagttgtagtacacgtactactaaatatatttagttaaaactaacgagtctagctcacttgcatttccagcgcgtgttatttactctcccttcccaatagtggaaggtgaaaagacaaaagtgaccctgaactacttttgtccttttattgcatgattggttgtattatttttaaatgttttgtaattattaattcaaaccaattcttttgtacgtattcatcttttatgtgcaaacaatgttcatattggttttctgagaatttaatttattatgtgcatactcattgaataaaaacataagggaatattttggttacaaacaaaaaaaattaaagatacaaaggattgaattcatttacatttaaattctaattcagcttctaaaataaactataataatttttaaatccaaagttgctttgttttcttcataatcctagtttattatgagtctattattatgagttgaggaattgaaatagattatttaatgtaattttgtttcaattatattatttaaattttaaagagataattttattaattatatatatatttaattacatttgttgatttcaatccccagtctcacctaatttaataaaattatatcgatattttttttatattaaatttattcagttcccatttccccatttcagtttattcagtttgtatttagtcatttttgtttatacataaataaataattccaattcattctctcttgttttataccattatttcccaatttttaatttattttttttggcatgaatatgactaacagcaatgaatctagtcagcaaaatgaattattgattggttgatggtccaacacaaaaaaaataaaaaataataaaaaaaaacaataatagttttttcttttctttttactatgaataataatttattttggtcgacatatataaatataattacatttttagtacaccaaaattgtcacaagcgtacaaggacacaaaggtaaaagtaaaagaaatgatatgacatggcgttcacagaggagcgttacgcacacccgaacggtggcgcgtggaataggacggtggggcctataagaacattgacgttatcaaacgtctgtataggtgtagctgaaagcgaagcatgtgcaattgggtcgcgagtggggtctacctgcttttgagtgcaaactcttctcaatattaaaataaccatctaataattttttttaaaaaaatatcttaaatttcttcatcaaataaattttaaaaattaaattaattaaatatttttattaaaagctccaacttgttcattgcctacccttgcttaatacataaaactactaaaatgccactcaatataagaaaattctataatgtaccttcttaaaatggatatattgatacacctcta

SEQ ID NO: 28351 - DNA, 6105 bp, Cannabis sativa
ctctataatcttgattgtgttctttaaattctgttattatattttctgctactcattaattcatttctggtgtgttgattattgtttgtttgctggctgaggctgttgtctaacacaacaatatatatatatgtatatgagaaagaagaggaggatggtagtaccttcgaaagcagtaaaataagcctcacgagacatggcctgaatagctccaatctgaaagattgaaagaaaagagtacaaagcaaaacatcattaattcacttctacatacataatatagatgtaaacaaagaagagggagagagaggaatgacccctgctgccttgacgaaagtatcagcaatgcgattgaggagagggtggcctaagtctaagaagccgcctttgtcaaagctcctaagctcatccatgaaactcctcttatccaaactaccattgctattgctagtactactattcatgttcatctttcctcctacttctccctctaaaccctcttctttatcctttcttgtttattgattgatttctttctttatacaaattacagtattacacagagagatataatttcgacacgtgtccaagactctcacgtaggtgtctcatgctcacaacaacagttgcaacttcgtggcactcgttgggggctgcatcaccacgtggctttcactctacttcacaactccacactatgagctcaattttacaaatgaaattagagttgagaaacgttaattgtaaacttaacaaatgattgagtattgcatattaaacacatttaaacctaaggcttacacaatctcaactaaagaaataccattcaattcattccaacacattgattaaaaaaaaaaagagagataccaacactgaacacccacaagataagatttgcaagttgcaacataaagttcaataattaattaatttacaataatctatataaatgaagttccagttcaactacattggagaaaaattggcctctaccctcttgtctcagttacaaccacccttccattccagcacaaaacattgcaacaaaaaaaaaagtaaaggaacactatgcaagggcattatatgttggtgccctttctccttctttctcttatatatatctctctctcattctcactctattacatgtttatatattagagcttaaaagtacctggtagtgtcaaaagaaagagaaaaaaaaacaagagaattggataaaaagaaaatcaaatgctgaagaatgttttacaaaatgcaacactaccaaactcagaagccgcaaaagcaagctgaaagggggttggtgttcggttatattaagacagggcttaaatgacattttttcggcctccaaacggctctatacagtatctctccctcctatccctgatggagatccttaaacctaaataattcataaccatcccatccctcttgatgctttttcccttttcctttccttttttttttctttttcgattttgtttcgatccactggcgaccggcttgggactgcattcacgagattcaattaacaaacaagaatagaagaccctgctgactgattctgtagaccaagttaggagccattcacagccatttccggcgaggatttggggggtatcaatgcacactcatctccactcaactgcctattttcgggtgtggctgctacttgtaaaagctctgtacagtttttagaagaagctgcttcatccttctctcggtggttctcatcaggttcaatgctgttgttatcaggacagtctctggaaacaccatgctcattctgttgatgatgatttacttcacctgaacacttgttatcctcatcagctgtgtgagaagatacaggaactgtgcttgcagctttattgcagggtagcactgcctggcttagtgtcgtacacaaagcagcaaatacactgtcttttggtttcgagtttttacctaatcgatgtttctttccttgctcaagttctttgtcctttaagggcaatttccgcttcaaccttaaggggtctattattgttccttcatcttcatcattctcaggttgtttccttagtggtggtttgtagtcttcatcatcctcatcatcagcataatcaaccagaccgacagagttgggactacaaaagtagaaaacaatgcacaaagtttatagcagagttaattaaaaaaaaaaggaaaaaaaaacctgttacttgtttccttttttaggataaaatataaaataccttgaaggggtgtaggttgaagcaactccatttgctataacaggttgagatactccttttttgttgttatttggcattgatgctgatgcagtgtcctcttcatcactatttacacacaaggacagtactcagctcagttctctaagttgcaaaactaaaaatcttgtaatttcaaactgaaacaatatttaatttatacctgtcctcattgaaatattcttcctcttctttctccaaagcacgctcatcaattctctttctgggctccgccactgtaacagtgcttctggctccacatgtctctagacactgcagaaacacaagtcagtccaagcactactaaacctactattaggataagttcagcaaggagagaatacctgctcatatttcacttttagagattgtatggacgccaaatactcgaatttttccaattcattccagaatgaatcaactatatatttaagcaatgatttcatgttctcctgcatgcaacagaaaatgtaaatactaaatagactgactgcacacatttaaaaaaggttaaaaagaaagggcataagataggcaccttccgtataaactcaaaaaggtcaagaatggcagagttgagcaagttatatcgattgccgttgcgaacaaaagcatctacaattggcttaaaaaggttatttttggcgaagtgatttatcagatgctcatcctgcaagtttatatattcttttaatgcattagacaacttgcagaaacaacacaagaatcatttatgtttaaaaaataaaaaatcatggtgaagattttttcactcacccaacgggtaagagtagaacgaatgaatcgaacagctgcaacaactaaatatttttcccttcttcgagtcagaagcaaaactttatctatcatattacttaggagaaaattacacctgcagaaaacagatgtagaagcaaggggcacacgttaaatgccaatagcataaagttacatcaaaatgaatgcacagaaataaactaaatcattactttattctataaggatggtgaagaacacaaaaacatagcaattcacatatgttcgacaaaatttcaggcttcacgacattctgtctttcaactctttcaccagagcctgaagttttaccaattgactgagcaacaccatctgaaggacatgatgctgttatgacatcaattaactgacccaaatgcttctcatagaaaatttcaataatggtgtccctctgcaacacaacaataaagccaaaacactcagcacatcatacaagtacaaacacctagaagaaacagaaaaacaagaattctatcttacatgactgacaagttttccaacaattcagcagaaacataataaactacaaatcaacattaaaaaagtcacctgcatatataaaaaaaatattgcaaacccaaaatgcagaatcatcacataaaaaaagcataagttttctgtcaatgaacaattgacttactttatagcgaaaaaaagtaatgtaataaaatttatacatgtatatatagatatacccatgctaatctgtcacattcaatgatataatacaattctcagcaaaaaagattgatataatacaattagtgaacttaaagttccattggggacagcaaataattttacagacatcatcacaagttcttgaatgaagaataaacttcatgacctattcaaagcaaactattctgtacgtatacagagtgaaagagcaagacaggtacctgagttcctgataatgtaaatgaatctagaagactgcgaagaatttcaagaaattggcagtgcatatcatccccaaaatctgttagcattcctttcacctgtaagtaaatgacaagtaacatgttaacattgtttcaagttatatgcttccctgttctaaacgcacaggcaattacacactataattattaagatcagtaaatcaaaacatccaggcaatgtttactagtccattgtaaaagaaatcctaacgaggagcattcaccaaaacctatttcctaaatgtgtatttacatcaaagaaaaatattcccttatttccgctacaatcccgcgtgtaagtaatgagctaaggttgataggattaccaacgctgttttgataatccagggagttcaagggactctccaatacatgagcactgttttgcctaacatgtctttttatttttatttttttaaaaaaaaataaagcctaacttatcagctccaatccaaaccaagcctctatatccccaattgcccccaccaccacagatttctcgcacttgcctacgctgacgttgattagaaaattctccaccagtagtaaatactttacccccactaccctctaacagatgtctcacacttaccaaagctgaccattattagaatattctctaccagttgctaactactcaaggctaaggtgccagtaatcccttgctgcttcttgtggatccttctaacataagtaaacaatattggtgcttaccatacttccattccatttctttaacagcctaatgtaaagggatgagaaaggaaaacatttccctttatttcaattcccttaaaaaatcccattacagattagtaactgtggctttatattcatgcctaaattttaaactaatgtgtctaagatttgtgtgcaaccaataatgacagcatgctacatgaaaaagttgtctgaactctgaagatatgagctcaataataatgatgacatcccacatgaatgaaagacggacctataatttttttattttagatgtccaaatgaacattcaaaacaaaatttggatatataggttaattgtataatacaaataactaaacattataaatcccaaaaatctcataagttcaaatctattcacttttgtcagggttgttcataaaaacataaaagtaaaaagaaagttggcccgaaaaaattccatgacaatttaaatgtgaaacttaccattcatatctcaaaacgtaatttattatttctttcagttttaagacccccatttttcaaacacgtataaataacaaattagaaaaagttgcatgacttctgccaaggattcacaaatcaaacatagaagttttgatgcatccgtgatcttgtaagcaatagcatacttctgaaaccttaataaagtgcttaccagaagtcctaaaagaggaattccttctggccgaataacaaaagaacgcagaaggtttggatcctggtttaagaaaagaatgaggatatctgtcctgcatcaaccataatttctttttgtaagaactactgaatgaaaaaggcaaaagccttgaatgcaaatcatgaccattagttatgtgcaggctgtttattacagaaaggtcaatccttaaatagtcaccattacccagttaatacaagctttttgtcttgactctgcagagcatcggtcatgatgtcaaaaatgccttcattcacaagatccctgcagatatttatttccgaaatcttcattagaaaaaaaggtccaaagataggtaaaagaaaaacctgaatatcttcacaacatcaatattctactttcgctgggacaaaagtaagagcaaaagtcaatctacaaatttaacattagtcactttcaccatcagctcatacctatatagacgaagttgttgtaccatctgcaggctcttgcttagacaacagaactcatgcacaaagtacacctaaatttcaacaccaacaaaaggagaagcagtacagtgattttcatatcctgaactagttaaaagaaagacgtttacaaaaaaaaaaacaatgattaccaaattctttttagattcttctgaggtggtgggtga

SEQ ID NO: 28352 - DNA, 1349 bp, Cannabis sativa
ttaatgaagtcttttcttcttgatcaaaaaaaaaaaaaaaatacaaaaccaagtttatttaccgaaatacctttacaatgcatttcaaacatttatacaccttatgtttactttcataatttttattatttttttattaccaaaatacattttcttcatgcatcaattatgtattgatgatgtcattgttaaactatcacactcatcaatttttcttctcttctccatactttttcttattttattattacattttctaaattttcattatgaaaccacaatcaaaaattagtttcctcccaaaaattttttttcttcttcccacaatttctcttatggcgaacagaacctccacttttccatcatctcaaatgtatcctcacaattttagcaaattttcttattatatatatttctatataatggctattacccattccatatgttcttcctctcatgttgttgaaaaacctaatgttaagaaactcattgctcaaagttctacatctccaataatgagagtgaaacaacttatggtggatgatgatgattttaatgaaaattttgttgaattgtcaacaaaacagaaaagacttcctttgaagaagaaatccaagagaaattagagtgatgaagttgatacgagtacgattctagctgttaagaaagggaaaaagtaaggtactaaaatgcctatggtttctttatattttctttctcgtttcactataattttagaatttttctatgttattttagtgttttttatttgatttatttgtagggttccatttatttatttttttgtttgttttatcttttaatgttgataggttttaccgatttaaaattttgttagatttaggttattatttttgttgttttctttgaagtagtagttcattggtgtatatttttatatgcattacatatatattttgtaatgagtctgtgaactaattttttatgttatccattaaaaaattataaaaataccaaagttatgatcaaaatatttatgtttatatttcaccgatattgttcaattttttaagtttactttgtattttttgttgaacattttgatggtattacagttttcttcgtatgtttggtatgatattgtttatatatagttttttaatagttgtattacaatgtgtttatccaaatcgctttcattttgatattttgatttcatgattggggatataagttttactcgtctaattatttcaattacatgtgttattctagttgtagttatagtgttattgagagcattaggaaaactatttcaaaagatgtcatggcaaatgttttgtacaactcaattcggtcattttgtg

SEQ ID NO: 28353 - DNA, 1709 bp, Cannabis sativa
tagagtgtttttcgtctgcaactagtcaagtatcaaaatcaacaagcttttataaaatatttgcttaaagttacttacaaaacaaatcatgaattaagagcgtgatttaatttttttctttttgtttttattttaacttacttcaaattataatttcacatgcaacaaaataattttttttttttgaatgtataattagattactttagataaaaaatataataaatggtgaccaaagcaaacactattagttacaacaatggcaagtgtgtaaacaattaagtaacattatagtttatatttgatagatgtatgatttaccttttcggattgaacagcttttacagagaaggatcttttggtagggaaaagcctaagaggagaagaagaaaggcctttgggggataggagagctcttgagagtggggaagaagtgaagttggatttgagcattggtgaagaagttgctgaggccatgattatgccttttgctcctctcacttacactttcacttacacaaccaaaaaaaaaataagaaaactgtccaagtctcaatgaggagttgcagagaccctaacataaaaacactttatttgattacatagatcttccatggaaattgtggctctctctcattcttggatttcattagatgatgtgtggaccagaaaccttatccccttatccaactcttcactcttttgcaatttcatcactttgagatttcttgggctggacctggatagcttatgggcctatttttgcgtcatgtggatatttactcttttgggtccatcactcttctggtttcgacctagcccaaggtaaaataggatagtacctagccagccatgcatagtagtaatgggctagtttgtcttttgtattttttgtttttttatatatttaaaaataaaaatataatatttatttaaatatataaacatagaaattttttcaataatatacttgaaatataaattatttacaaaaatactttaataaatctcaattacaataatactacgtcattaaaatatactgtaattctaaaataatatgcctgaaacgaaattaattcaaaattatatatatttttaattattttcctagttttttaaaagtaactttttggttactgataatgctgataagagactaattagttatttttacgtaaaaaactttatttttaaatgatataatttgagatataatttagttacatctaaaagtaatttgtaaacatcttaataatgtataagctatttttaagatatcatgctatcatattatttaaaatatatttgagtaactttaaagtttatttttgaaattaatgagttgtcatataatataataagctactatttttatttactaattactttatatacacttgtattactttaaaatttatgtgtttatttttacattatattgattaatttgttattttaaacacttttactttactttttttttttattttgcttttataaaaatatttatgttattttaaagtctatttaaaaaattaataagttataataatttttttaaaaaaaaacttacataacttattggtaaaattgataagcatttaaattgctaattaattatttcaaagttatatatttagtcatctttaagtttacaaaatctaattaattttcatatagtataacagatatgcatagatgaaata

SEQ ID NO: 28354 - DNA, 2014 bp, Cannabis sativa
tttttttttttttttttatcttggttgtaagttggctatttaaagccttgtaaacactttggaaaagcatattattttttaataaatttttgagaggttttcttcttgagttcttgaaagaactattcgaacatatcaagcagtattccttgtggcgttcaacctaacttatcaaatgggtttccatgaccgtttgtggcgtcttccttcataccaaggttcatgcttaactaagcattgggtcgcagttccacatccaaatttcaagaatttttagaggctgccatatttggttcagttttcatcacatttcttggtgtggttcgtatcatttgtatcagagcttaggatcatcgaatttggcctatctatcttttgtgttttctattcaattcatgttctacaatcttgtttaacttgtgttctatattcctgtcaattcgtgtttcatctcttctgttttttctttgtgaaatccaaaactgttagaaccacattttgataattttcttgtgtcgaaaatcgtgtctttgatgtcatcagtttcccttatttttttttctgttcttcttaaaaaagaatctaaaatttaacaaaaaaattcaaaaattcaaaattcaaaattctagagccataatttgattttaggctgatttcttgtttccaaatttttctttgtcattagtttcctttttgcttattgaaatttgaaaattcaaaaagaaaaactccgatttgtattgttgaattctttgtttccctatttgtgccacaaatctgttttcttatttttgtttctcattgcttttccaaaattgtttgacaaaggttgtctccttgtttaatatcttctttgtgtcattagtaagcgagaaattcaaaattctagaaaaaaaaaatgagtatggaaacctctcttcaatttttttttttttgtattttcttagtctccatagtctagaggcttgtttaccaaaaccccacacaagtgctccaaaaatcatcaattttttttttttttttttcagtttttattggttttcgtttggtttgtttggttagaattgctacttgaatcctctcttgtgcagtttgattagtttttaaagaacttaaacaagaatacgaggggaaaaaggcagaggtgtgagtttatttgagggtaaaagccatcaaatttgagtgaaaatacgagtgaatttgagtgacaaattatttttgagggaaacacgtgagggagtgcggtaaggtctttctttatctgttctaactttaattttgcagaatttgatcatgtcaaaagtttcaaaagaaaatatcggtaatgaaactacaccacctatttccaaatctacaacttcaagctttcatgcaggagatgaggaggatgatgagaaaggagtgtgaataaatacatgagaggttagatagggtagaagagggaacccaacagaggccacggaggaacagggttcaccaaagggatgatagtgaagtagatggggaagggaaaatttttgatgaagagtttgatgggataccagtgggtaaccataggagctatggtcggggatagagaagttaggaactaggtagataattatttgggaaatataatgatgaaaattcccacttttcaagggaaaaatgatcccaaagcatacctggagttggaaaagaagatggaattgttgtttgattgtcacaactattctaaaacgaaaaaggtaaaacttgctgccattgaatttactgactatgctattgtttggtgggattagttgtgcatcaacaggaggcataatggagaatgagagattgactcttgggaggctatgaagagggtgatgaggcggcgttttgtaccatctcactattatcgagacttgtaccttaagttgcagggtcttcgtcaaggctataagagtgttgatgagtattacaaggagatggagatggctatgattagagccaatgtggaagaggatcgggaggcaacaatggcaaggttttt

SEQ ID NO: 28355 - DNA, 1870 bp, Cannabis sativa
aaaaaagaaaagaaaattggaaaatgaacagcgtgatgtaagttctttaatcaggagttttagaatcaagctcatttaaacaaggctttgaacttgatattggatggtgcctctctggcgttttttattttgatctttcttatataggagcaaattaaaacttatacctgttctttaagcttagttataagaagtttcttattttttgtgttttaagatttttagaacattaagatattaataacttgttgcacttttcgtagtcattcccattttctagtagcctcagtaagcttgtctgactgcagctccttgaagttactatgattataattatttgtctgtctgctattactgtctgccttgtccctttcttcactaatcaactcagctcatcttggcagcctcacaaactatataacaaccattccctttccactttcttgttttaatcttatgttttgtgtattgaagtcatgatagaagccttaagaattttttttggaagcgcaaatgatacattttttcttgtttgaaatggtctggatgtggatagtataaaaatgggagtcatggtttgactatgtcttactatgatcgcagggtcattcttattcacgaagctcctctgtattaagcgctggaaattttacactgttttgacggtggtcttaagtcattatgatgtcaattaggcttttatttcttttcggagtgggtactgagaaaaaaaattgctttgtgtctttgaaatttaaaagggcaaaaaaaaaggaaaagaaaaaaaaaagaagggaaaaaaaagaaaaagaacagaaatttgaaaatgggaggaaaaattctcaaaaatcttccataaaaataaattgtataaatattagtacaaaagcaaaaagatttagaggggaagacatcaaagaaaaaaggaaagagaaaagaatgataaaagttgataaaatatgagagtgtgtgagaaaaatgaaacatgtatagggagaggaattgcgttgaagttatttgaagaggattggatggtggatgtagaatgtgatttaaattgcttcatctttgctgacaagagagcaaggactcgtgtgtggggaacaaagacaaatttcaggcatgcagttgtagttacaagcctcttgctaccggcagggatggtacattccaaaggagtgtgtgccagggtacatatttgctgcttctttggtgataacactcttattttgcagctgtattggccaaatttattatcacattatatctatttatatttttcatttttcaacttttaactttttttttccttataatttgtttccaaaatcccatggacttcaccatgaagatatgctgtgagcaaaagtgagtcactgctgattggtggataaaagacaagaagttgtcagtctagattgacaagagtgaattgtttctcggttgatcgggttggacatagtttgtgagaatgtggtgatagctggagtgatactatttatttaatacagaaatttatttctgagggctatttttctactaggcgataaactatttactagacttaaaaaagtaagaagaaatgaataagcagatgctgggaaggaaagtactaagaattgttgtatcgaaaaaaagtcttaacttactgctcatatagatgtgcgcattcttttccataaatatagtaatttagaatttgctaagagtgtgccttattcttagtattaggcatgcactattgatttgtacagagcctaatgtaacaatggtaataaacagacttacttttttattctaggcatcttgtatgttatcttgtacggggtagtagtatgtctgaattgatgtgaaaatcagtttgtgttga

SEQ ID NO: 28356 - DNA, 1257 bp, Cannabis sativa
acggtaacaatacctaagttatatttttaaaaattttgtaggtacatgaccgttaagtgtcaagtcaatcgccacgtggcatcctaaatacgttcacgtcattcaatttttacttttaattaaaaataaatttaaatatatcaataagactataacacgtgaataataatgtgatacttaatggatagatacttacggaagttctaaaaatataacttaagtattattactgttaaaaattaaacttagatatttatttgtaaccgatagttaaacttaagtatttacggtacaaatttatcttattttttgaaaggcaaaaattcacttatggttaaaaaagaaataaagccctaaaacggagataaagtcgaacaaattttactaaaagatgaccagactaatggtaagccatgttgaaaacaagacgaacagaaaactcgaagctcatgaaagagttgctagagggacaaacctcacaaaaacgatatgggctaacgttactaaggttaaacacccacgtcgtggccctaattagtttttatgcacaactttatgtcattactcggtttagcatattttctttataatctacttaaaatgccaaattttatattataattacttctaactataaataagagtaaaaatttagctagacatatccacaaattttaatttttattaggtatatctttttcttttcaatacttataataataatataaaagacacattcaaattacacactttttacacattaatgtgtaattagtctcaattatataattaaaactatataattaaaactgtataattaaaagtgatgtggtcactaaaaactcatatatagcaaaaattgaatttttatcacactatgtgtaaaaaattgtgtgcaatttaagtgtgtctctgccatcaaattaaatcaagaatgctaaaggacacttatggtgcctaatatttttgtgaggtgtactcgtgatttcatttgttatactttaataaatattatagaaaatcgttaacacattatagggcgacacttcatcatggtgctaggcaccatgtaaaaaatatcatcttcaaaatattattaaaaaattatcaatttccccttcttgaagtgatttaggggtgtttatagtttggtttgatctcaattttatttattttttgagctaaaccaataatgttagttttttgaaactcaaaatcgaaatagaccaattaaatgcttaaattaaaccaaaccaa

SEQ ID NO: 28357 - DNA, 2289 bp, Cannabis sativa
ctccaaggtaattattttttatttatatgtattagtgaatatatgtgttttatctttattatcgtatcactaacagtaatgattctttcactttcatatctggttaaaataaagtaaatacttttttattttgttttattggatttggacatcacctacgtgaaactcatgttattgataataagtaaagtagtatagttgttttaattgtgatgtgcatgggaatatatatgaaacagagcaaaaggagatttggggatcaaaaaaagcaggagaattattggaatgggatgacataagtaagatgaagtattcatggaacgtggtttatgaggttatgagattcactcctcctcttcaaggcacttttcgagaggctcttactgattttaactttgccggttatactattcccaaaggatggaaggtaataaattcttttattactttttgtttatattgggctcaaatatacccgttgctagaagaaattacattttatatccattttaatttattatttttaatttaatattttttaaaatatactcacttttataaataatgttcttattatgatttttagattaatgtaaattatgtgctagacttaagtgggaaataagactatattgagcaacctagtaacaaaagtaggtactttttaatgaaatataatatgaaagtattttttgtttatgaatacaaaaaatagatatttctcaacttatcccttaacaggtactataagttttttgtttttgagattatttcacaaatatattaaaacaacaaaaaattaacaaaaatatctatacggaatttaaaacatttttacgattttatttattgaaaatacggtctttttatgttgtatgcttataaatttgttgttgaattttcgttatctgtatgttattttttgttgttgttttgatgttatttggatattattatcctattacttctatgcagtttccttgttgttttggtattgtttctaaagaaaacggtaagataaaaagaattcgtgaaatgtaaaagtgtaattttttatagaaaaaaaagtgtcttatttaattatctttttttttttttttttttctctgtacagggtataagtaattttaaaaacaagtacttgtgcacactatagagtgagaccctattatgcaaattgactaaaattggatccacatttaaaaaaaaatgagtggtgcagtaaaatattttaattttattttttcacaataaattattcaaaattttctttatccaaaataactactcgctcattttaaaaaaaaaaagactataaatttccataaatgtcaatagataaaagtgtataaaaaaactttttaaaggatatattgtagaattactctatttcatttaattctaatactaatataacgttttcttaattttattaagaaaaaaataaataaaactatggtagtttcaatttatggaaaactctgaattattaatgttaataacactatgtattttttctttttattgcaagtattacaattcaacatatattataaagttggtatataaatttgcaggtatactggacagtgagtacaacaaacaaaagcccagaatattttccagagccagagaaattcgacccatcacgatacgatgatgtgtgtgcatttccaccttttacattagtcccatttggaggtggtccccgcatgtgtccaggcaaagagtacgctaggctagctattctcacttttgtccacaatgtagttaaaaggttcaattggcaactaatttaccctaatgagaagattataggtgatatgatgcccactcctgagaaaggtctcccagtacatctcaaatctcattagttttttatgagttcatatattcttgtttattactagtttacttttctttgtagtatttttgttataactttctctcactgtaaaatagaaaattttcacttataaaataactataataatatcttttttacataagaataaaacgtaaagtgggaataactttgtcaatttactatttgtttcaatattcatacccacaacaagccaaatatggtaataaattctcattactatttttattcaatgacattactattatcattacaattcaccaaactaagtaattaatttttagtaaaaaatgtattagatgaaattgatgggtaatggttgtttttcaaccatgtgaaaatatggttgtatttttcaaccatgtgaaaaagttacaatggtaatttttgacttgaggcatatg

SEQ ID NO: 28358 - DNA, 2752 bp, Cannabis sativa
  modified_base (879)..(887): a, c, t, g, unknown or other
ttaatactcaaaaaaacaaacaatggcatgggataagatagtgatagctaaccataacaacccttattgtcaaaatcttcattttctttatatatagaacaaggaaactcacttattaattatcaatagtagtaataattaatgggtgtgattttttttctttattcttttccaaaagagaagaaaaatataatgtgactagtcctttgtttgggccctataacagctgtaaacaaacactcttactataaaccaagcaaaaaagcaagccaataaggccattttatttgttttcttcccttttaattatttttatttttcatataatctcattgcacattgagactcccccacagtcctcaataatgccactttccatattatcaagaataaaaaaatcaagaattaagccaaaaaaaaaaaagaaagaaaaatatcaaaagtgtaatgtgaaatgataattaagattttttctcttaaattttgatatatattaaattatattatgattttttttttagtttttgtacgtgctaaagtttagaggtagaggtatggtatagtaaatataaaaattttatagtacaatttagtatataaataatcattatatttataaaattaaataaaattagacagaagtctttaaatctaataatttcaattattcaaaaaaaaaatttaatgacttaaaacgttcggaagtataatttaatacatgttaaagtttaaaagacaaaaatctttaagaatatttggtaatacttttattttttaattttttaatcacaaaagtgaaagtaaaatttttggttttaaaattttgtttttaaaatataaaaacatgttttataattacttttatttttttaattttannnnnnnnnaataaaagtgtgttctataactttcattttcatttttattttttgattttatttgagtcaggtcttgagccgaggttgtggttcgtgtccaggattggaattgaggccgaattctgaattctaaggttcaagctggagttagaatttaaaatatttatttaaaaaaattatttaaaaaaaatttgaaagtaatttttttatttttaaaattttgattttcaattaaaaaattaaaaagtgaaaagttttataaaacatatttttaaaaaatatttttacttttttaattaaaaaaataaaaaatggattaaaaaatactaccaaacttacccttaattactcataaaataaaatggctaacaataaagtgagaaatttgttaaaaaagtccatcttcaccatccacaaattcaaataattatttaaaaaaatcattttgtatgagtgaaaaggaataaagggtattttagtaatttcatccaacagacatttgaaggtgtttttctgcaaagtgtagaaaaaatgggagtcacaaaagggatgtcagggccccatgaagtctcaaaaaagctttttccttcttccatgtgtaaaaaatgaataaataaataaataaattgtataccttattttaattatttcattttaatatattattacttggttagaaatggcccccacataatgaaaaatgaatagaagaaactcatcatagaccaagctgaaaatatattttgaatgattgaattgacaaccaaacataccaccacacttagggaattttcatcaatcttgattcatttttatttatttatttataaataattttcattcatttcttatgtagttgaaaattgaaatagtttatatgactaaaattttcatgagtttcaaaacaactctcactttaactcaagttccaaagagcttacctttatcatctttttctatattatttattggttttgatttgattttttcaattgaatcaaagagaatcacatgattttcaagacaaatgggtaagtgtaagtataaagactcaacctttattattattattattattggattatttaatagtatcttcatagaatttagcatttgtgaatatatgtttcttttttccttcttctttgattgatctacaaaaccccttttgatttatctggatttttagatcaaatttcattaattttcttaattatgtggtccaatgactaactttattcaactacttcagcataataaaactccaaaacccaatatcagatcttcattctgagtctcagatcaccaatggctaagaagaagagttggtttagtttagtgaaaagattcttctcttcagattcacaatcaaagcaagaaaaggttagaccttttatatctttcttcttcttattatctaaatctgatttttactatatttttttgattagaaggaaaagagaagaaaatggatatttggaaggcttaagatcaaaagattagcttcaataacagcaccaccacccccaccaattgaatcaacacaaaccgaaaccgaagaaagtgtagtacagagcggagaaaacaacaatttctccgctctgtctccacccaatgcagcctcgactgcatctgatgcagccgaggctgctaaactaaccgaaatagtggaaatcgaatctcgggaaatccaagaattcgctgccactaagattcaaactgctttcagaggttaccttgtaagttttttctttcaaattcttttagatctctgtgtaagtggtccaagattgaatttttatacataaagatttgatctttaacaatttataatgaacacattttttttataggccaaaaaggctttaagggca

SEQ ID NO: 28359 - DNA, 1468 bp, Cannabis sativa
taacattgttaaaaagtcttttggcatcctttatttatttatttttttcacattttacactctacatatattaataatatttaaggttatatcattaatttttggcatcctttattttttttttccttcaatactatttttttggttttgtgaattgattaaaaataatacacatcaattaataatgcctttttgttatttatattacaaacactacaagaaatgtcacttttagtaaattctattttactagtataatactaaatttttgctaacataaaaatgtgctggcaaaaataatatttattgtagtgaaataaatgtgtatcacccatcaattaaaaccttccatgttatatatataatctttcaaataactaatcaatatagtgaataattttgggtttttattttttgggtaaatgatatatataatatagatatttatacaatatatgattatattgatgagtacaattagtcaattaattaagtaggtgtgcagtggacaaggtcattgtctctctgaattaggtccccttttggatcgtattgaatgtgtcacctaattatttattttttatatatattatgttcaattcaatttaattcaggataaggagcaagtaattaatggagtattgatcatccctaacatttatacatgtagttgaaaagtgagctctatctatctctcaaatatatatatatatatatatatatatataagtattattaagataatgtgaaattaatatatatgtaaaactaaaaacatataagaaatcaaattaatgtaattattagtttattactcctgaaaatcatataatatttatagttaattttttttacaaatatagtaggaaatacttcaccaaaggtacaataataatgtatataaataggacatctctggaatttattaggggtggcaatttgtcgttggtcgtgtttgtatcgtatcgagactcatgtataacaggtacatacttgatccgaacacgatccgtttaataatcgtgtcaaaaaataaaacccgaatacaatccgtttataaacggattgacatgacacaacccatgtaatccttttataagcatatttatttaaacattaaagtactaaaataacccctaacatgatattgacctgttaatgacctatttaaagttattttagtactttaacgtatcataaatgggttataaacgtgttgatccgaacacgacctgtttattaaaggggttagacgagtcaacctgaacatgatctgaacccatgtaaggcaaacccaaacccgctaactctcgtgcgggtttcaagtcatcttatcgtgtctgacccgttttgccggtcctaaattttatttacaaatattcttttttcaaagtttaaaactctataatatatactagtgtaatgcatatttagttatattcttaatttttattttgtgtatatatat

SEQ ID NO: 28360 - DNA, 2264 bp, Cannabis sativa
  modified_base (583)..(586): a, c, t, g, unknown or other
caaaaaaatcactaagaaattgatttcttgatcaagaaacgggttcttcatcaagaaacggtttcttcatcaagaaactggtttcttcatcccgaaacggtttcttcatcaagaaattggtttcttgatcacgaaacaggtttcttcatcaagaaaccagtttttttggtaatttttctggtaatttttctggagataatgccgattctgacgacattttcggcagcgatagcaactctaacgacttttccgacgacgacagctactctggtgacttttctgacgccgacagcaaactccggtaattttttcgacaccagtgacaaataaaaacattaaatatgggctttaaaagcttaatttacatatatataacatatcaaataccatagacatacctaaaaacaaaaaaataccatataaattcatcaaacttaaaaataccatacttaagtaaagactaattaggattttttccccctaaattttaacatgtactaaatcatatcccctgaacttttttggccgttaaaaattccccttaaactattgagattcttagatttaaggacttttgtctaannnnattcaattttactatttcagtgattgtttatgtactaaactatgctctccaaattttgatatccatcatgcccctcgactttgacatgtactaattcattcttcctgaactttcttccatgttagacttttttttttttactaaaattggacaaaaatccttagatcaaacaatcttaataattcaaaggtatttttaataactgtaaaagttcaggggacatgatttggtacaagtcaaagttcaaaaggcaaaaatcctaattaggctcgagtaaataactgttaaaattctataataatgagagtaattttttttaaaagaaaatagaaactaaaatttgtttttaattataatttgtgtttgaattgaggtattaatatgatcaatattaaattgcatccattaatacttataatacccttgccaattctctataatatatcatatcccatcgagcatcacatcacatctaaacacttttaagagttttaactttacttcattatttttaaaaaataatatttccaaaaatggtatacttctttagtttatgttagttaaagttacaagtactagagtttacgttttcatatctctcaacttgcaactacatttaatttacacatattatttttcattttaatatttaatacccaaaaaggggttattatttgaaaggtcaattaggattagtagagagccatatataataaaactgtccatgtggattcagaatggaaataaagatatatatcaaaatatagcatattatatagctgcaagtcatcacataaaccctctatgcaagaatatactcaaatataagctagaaacatgtgatatgtggggtccatattaggtgacatgttagttgaatatgagtccatgcaagcatatggtcgataaaaagatgctaacttcttgacctaggatttgataaggaagaatctttaataatatcatcacaattattattattatttttttaccagacatgatgaatattccaattggcaaaacaaaaccttagacagtgccccccttacagtctttattccccatatgtgactattttttaaatgggggccatttctcttcaataatacttggagaatccacatcctaaccccattatagagcaacaaatagccctgtcttttgaatttttgaatattctttttatgaaattgatattttcaagtagcaaatttatacaatgctcttgctagctagaaaccttaatttaatcattaaaatttttaaaaaaaaactcctcatgttttaactgaaattatacaaggcaacttttgatgtagatcacactggctaagctactttgttttaagtaatatgagagatattttcctatctaaacgttttggtcatacatatatcttgaaaaaagttttggtcccaccataaagtcccctttctatttaggagtttttacactatatattaaaattttatttttttattgtgtactgtgttaaatttttcacagttatttttagttgtttcaatgttgttttacaattattttataaaaaaacaatatttttataaaaaattcggtctgacagtaaaattataaacttttgaacaaaatccagtatatttgtaatccaccataaagtatactttctatttaagggtttttacaccatatactaaa

SEQ ID NO: 28361 - DNA, 3224 bp, Cannabis sativa
  modified_base (1248)..(1249): a, c, t, g, unknown or other
tcatcagcttgggctaccttcttcctggatctcttgtcagcttggggaggagttttgaacatgctctcaaaatctacgtccattcttgcgaagacaaaggtataagatcagtgagcaacagcgacattgggtaaaaacatttgttttgctaatggagtaaaaaaaagggtgagttcaaaccagaccgcagttcgcgaagaacgatgcttacgttcagaaatctcttgtaagattttcctatacagaatgacagtttcttcttggtttgatttaatcagatgatcttcaatcctggaatcattcacttccaattcgtattaaggtttagaattttcgggtgtatatatggaggacatatgtttggtatatttcggtgctgcaaattttcgaagataaatttctgaaatagaatgggacatctccacagaagaaggacaatcccaatttttgaatgaaatttaccaaaccagaggtctatggaatatagctaacataaaatatgcctaataaaaaatatatatgaaccttagatattgaaccgaatgaagtaatgaagtacaaggcagatcatcaccaaagtgaaatcaaagaaagaatgaggtacttactgtgtgaagattgaaaggctagacaataaaaaactctgcgaatgaagatgtgatagccagcaaaatgagttttatcaaacaccaggagtcgagggttcacaggaagaatatcaaagttggaaatgaaggagagtagattcttaccattttatactttgagcccagtaacggtaaggccaaaagatggaagatctaatgactaggaacgaagaagaagtggaaagggtgggtcattaatgctaataatgaccctcgaaaccatggagctgctaaatccaaggacatgcgtgattttaaaaaggagattatgataaaaattccctttatcatcatttaaaaaatactttttattcaaaagaactttttaagaggcaattgttatacccgaaattcggctatcggttcaaaggaggatacatgtcgaactgggaagaatacaaatcaacaattgtaatgataattatatttgaaaatggaataattcattaatgcagaattgacagagtatatatacaacttgctgactataaggtcttacacaagataaagaaacaccaactgttgcctcgttcattaacgagaaaccatacgacttctgatgtacaaggcgaggcgtcaacctcgctacgcattaggagannagacatggtgactggtaagacacttagtgtataatacaccttatatacactaagtataacagtcgggtaaatcaaaacaactaatagtgaggcctccatcttgctataggaaggcgcgttcatgataccttcactaattagctccagatacctttcaatggggttcatggccctgtcgagtcagctctctcagatagaagctaacatacaaataatgttgactgctgaggtccaccttgtcacccagaactgcaattttcagatgaagcattatgtcatcaagcccaagaacgacaagacttacattatccacctcagaaagatatgggaaaagctccaactcgctaccaaggttattgttgttgtgttccaagcgagacatcccagaacattacgatttacaacatatttaatacacgtttacattgaccaggtaagagcgaacccatcacagctgtgtgattttcaaatattaaccacatttattttacgtggtatataatcaaaccccacgatttcaggggataattgttgtaggatatcagtcaactatgtaattaactgccctattatgtaattataaataggagcaagttatactgaagaaggaacgaaaaaatcattagagaaaaggcctgagagctgtaccagaaatctaataagattgactcgtggactatgcacaatttcaactgcaaaatcacgtgaaaacctttgtgttcttatattttctttgccgtttgtaatttctgtgcaagtttatcactacttaggctcaaatatagttaacgaaaatctgtgttaataattttaattgcatctactttatatggtttaatataatttaattctacatttccaattttcatgtgatagtagatttactaaagaaatttatattcgtgcgaggacatatacatctcaacccatattcaaattttctactctcgtgataaatttaaacacataggatgcattaagcataaaaattctaaatgctacattgaccatataggtactctcgttttatatcgaaatctatatctatttcaatatagcacaatcaacacccacttctcatatttttttattgagatcattaaacaattaattggtgatcaggcaattaaaaataattaagtacgaatgaaataaatagacataaaaaattatgaaagaactaaatcatattaaaatcaaaataaagtgtcaaacaatctctattaacagctttataaaaagtctagctattcatgattattgaaaatatctgataacaattaagaacataagaaaaatagaagaaatcaagaactcttcaaaaaataaatgttgaaagtctttagagtcgcttctcgtttctaattttcgtactccaaaagtcgtatgctgaaaagttatgaaaaagggtctttatatagataaaagaagataaaaaaacctaatttttcacagataagaataggtgggccaaaacactaccttgtagtactgtagcgcttgaagcttgatatttggcagtgagcttcccggtgtgatgactgataatattatggccacaacactttcaatattacttgaaatttgacgattcaagatgttttggaaataaaaaagagagatctagaacttttattaacaatagttttcctcaaagtcaacatatcatagtcaaaaattagattgaagcattagacttaatttttgatcaaaaactgagcgtgtggagcatctaaaacatagaattttttaccacttatatcctagaactccaaaatgataaatcatcgtattcatctcatttaacatattttttcttattattaattcacattacaaattttactattgaaacctgaaacaaatataaaataagcgtgcttttgcacaaaataaatatgatcaattgaaacacacctctaagaaactttataaaatacacctaaaactagcctatcaaactcccctcgagaaa

SEQ ID NO: 28362 - DNA, 7648 bp, Cannabis sativa
ggaaatttttaacgacttgaaaatggagcatgatttggtacatgtcaaagttcaagggacaaaaatataattagcctaaaatgtaaaaactcataatcttgtttattctctcaggggagggaaaaaaataaacttaaaatttttccttttgtggtcttctctttactattctccatttccatcccaagagatgcgaagccattgtttctttctaaaaagttcatacgaaaaccctaaattctatatctgccgccgctctattgggtcctccggccaacccacttcgtctgttcattgatatcaggtaccttatatgatttatatgatattagttacattttattgttcgtttggatatatgtatatttttcttacaaatatatatatattttcggaatgtagtattactgaattatggttagattccattcttgtcagtgaaagaaaaatttactcaattttggtacagttagaactcattcaagatcatcccctaacaagggaagtgaaacaattatggatcaaagtcaccaagtcagtgctaatcttccaactgatcatacacctatcaaaaaacacaatgctgagaagaagaagaggccttgcaagatcatcggtggtggtctaagacagttcagtactataggtattttccctttttgttttctcaattcaatcaaatttaggaatcacattactgtcgatatgcttttcattgtatgtttgtttgaaaatgtttttgatttcctgattgtactcagtttgtaagaagttggaggctaaaggaagagccacctatggtgaggtatggggtgtcgttacctttttaagttttgtttagatgaaaattgaaaagagtataaaactataaatattattcatgtcaaatcttgaatttaactttcccattacattttgctcttggggttcaggttgctgatgaaattattgcagagtttggtggagctgttaaggaatcaccggtgtctttagatgaggttatatttttctcaataatttgttgaaatttacttttcatgtgctaaattcataatttgaattatcagtttgatgagaagaatataaggcggcgtgtgtatgatgctctaaatgttcttatggcactggatatcatcactagagacaaaaaagaaattcagtggaaggggcttccaagccaagatgttaaggcactggaagagctcaaggtccttattaactttcttcactcttcattacatgcatgaatgctacaataattttataggttatttctctgtaagcatactaagatggtaacatttcgaactagattaatctgactggccccatgttctttttcatttctgcaggcaacacgaatgaaactggtgaatagaatcggaaagaaaacggcctatttgaatgatttaaaagatcaagtaaggttatttctcatctgatgtttttccttgtggtcttagatttgactgacatattctttaaatgcagacactgttaatagatagcaggccagaacctgtccatgacacatgtcaactttgtgccctttagtttttgcattctttcaagcaatgagaaaccatagtctcattgagttttctcagcttagcttaatctaggtgtttctgacatgataatgttgtgcattattctgatgattgtaggttttcaattagacaaattatgagagtggttcagtgtgttggttgtaaaggccaatcacaatgaggaataacctcttacataaaaggactaatgtagctgagaacaattcaatatctattcaatatttaatgatcatgaatctatcttttttcactttgggtttctaatgtttgagatgatttggatgacacatgctgatttctgattgtgctatagctactggaaaatgaaacatgctctgctgtaaatttcatctcaaaaaattgatgaataggtagaataaattgatggttcttcgctaagaggtttttagcttactttttgttgctttagtaaatggttgtatagcattactattagcttgttgtaaaatattctcctacttttttggaaggttgaaggttttcaacatttgatatcgcgaaataagcagttgctcaaccgggagagttctcctctggaagcattttcattgccatttttactggttcaagtatgtcacttttgattgtcttgttctatatgttttgcattacaagtattttttactttctaatcaaagattgaaaaagaatatctttctgtttccttactttgcattttgatgtcatggagcatgtacatttagaaatgccatcactaagaaaaattcacctaaaaaatttgataacacgttttcggctatgtggtgagggaccaatattatatcatattacatcaaggaatagttgatgttgctgtacaatcagttttagcacagttagtctatgtatttttccttttgatttgcaacatagtcaaggccactaatatgaccctttaccaacatagtcaagaccaataatttttttggtcactattaggacaagttgggatctagatataccatgttaccgaaaatcctcttaatttcctctgtgatgtttgtctagacaagctcccatgcgacggttgagattgagatttcagaagacatgcaattggtccactttgactttaacaggtatgaaagtattttagattcactaccaagagacactaatgtttacgtactaagataccaacatatcatcaaaaccatatttttgtctttggcacagtacacccttctccttgcacgacgatgcttacattctaaagttgctaagacgccaccaactgccagcagaaagcagagacatttcaagttcatcatcggctgtctcgtcttcaagctctgctcttgcatgtggaggcaccaagccattttattggaactctgaagcgcacacacaaagatgaaagcatacccatcaacaatgtatgtatacgagagcataattttgatgtagtaataggatatataagaaaatatccatcattcatacatacatgtatagattatgttccttaagtaacgatgtattcaatcatgtaatacatagttgattagtactactactattgatactcgttaattaatcaacaaggggacacacaacacagtgactgatacaacgactattgatttttgagactcatccactttagattattttcttgttttcaccttaattaagttttggtggtaacctgattagctttttgattaatatagtgaaagttcatttgtagttttgcgttggatttgacagcatcaatcatcaaacatggcccattatctctatttattttcattttctttgtgggcaaggagaattttcctagtgtgtgcatgcatggcgttaaaataaaaattgttctaaccataaattgaaaactatttctctctcaaacatctttttcgattgataaagaataccactctcatactatagcctgatggatagtttttggtatccacgtaacatcgcatttgcgcggtgtctttagtatgtaattaacagtcagttgtttgtttgaattgaaatatttgaactttatttatttatttttattttttttttaaaaaaaactagttttatttattttgtttctcatttgtcttgattgtctagttttgtttcactatgtttttttttttcttttaaaagaaacactttagaccaactataatattctcctttaccacaatcattaatattttatatttattaaggcgaactattatttgactatgttacctaattaggctaattagacctttgttccttttttttttttttaatatatattattattaataaataattttatttgaggtaagcctaaagcttgaaaagggttatgttgatgttctctacataaaaagagaagagaattagaaaagggttaattgtagtgattcatttttcaaacatagatacaattgtaacagcaatttatttataacaaaatatatatttgaatcataaagaaaagaaaaaaaaagtggtacatcataaaatgtgatcttttctattgactagagacaaatcctaaatcaacatagggatgcaataagatttatggatagataccgttaattagtgttagtcttttttttttttgagagaattactgttagtcttagtattactacaactacaagtactattataccactaagtatttgctatattactaatgtaaaatatatttttcaggatgacataattgatggttcggctcattatatactaaactatttttttgttttttaaattcatttatacaatatacttgagaattttatattattggagaaaataaaaatattcaaatttgttaactataaaggacaccaacattagggttgcatgggtccaaatgccacccatttgtgcttcatttgctaatccacaaatatataaaagaaaagtattgttattgagtatcagtgatgtccaatattttttatatgtggcgccttacgattagttagtaatattgtctaacaattattttcttaaattatatttgactcaatacttaattgcactaataacaatatgatatcaaaaagcttattaaacactaataatatattttagcaattctcataaaacaaagcgtaggatagaatatttgacaaaattaattaatttattttgtgattgatgatcaattatattgaaacatctttatagaaaaaggaaaatgtccaagcgcgtgggtcctaaacactgaaaagcgcgtgggtccaaccaaacagttttccttcactggtcagtcctattatataatactcatgcaaaatattaataattttaatatttaatgaagatcgagctgagcaaccttatattttttatgcaagaattatgcctttttcttttgcattgtttaaaattaccaaaatcattttgatatattaattaatagtactataagatcagcaagatattgtgaattggcctttaattataataattaattatttgtaccaaactgaatgaataatataatatagttaagctggtctgcactgatattagtgatattcataatataataatataaatatatatatatgtatacataactttttcaatgaagaagaggtgagccacttataatctccttttttgtttttggcacagctccccatataagagagggtatcgtaaagaagcttatgggttaagaaactgagaaaacatcgccttctcagaaccctaaaaagcaataaaacaaaaagagtgagagagagagagagagagagagagagagatagagtcttactgtgttagttagctagctctatagtgtaagtgttagaagtataaacaacaacagcaacaaccatagctaagttattagtatataaatacacaaaaggaccctcttttctttttgatctctatcattcatcatcctccatccacacacacctctctctttctttctatctatatctataatatactagtgaaacctattatatgatccttctctttcactctctctttctatctctatctttgtttttgatgtgattctccactattattatctccaaaaacccatcaaccttttacaaaagatcagaaagaaagaaagaattaaagagagaaagcataatatagagagaatacaatggttttttcttctcttccagcttatcatgatccagccaactggcaacaggtaattcattcatttataattaataattagggttttcttgttcatgaattaattactttctttctttctcttcaaaaaagcaaataatattttcccaaaagccaaatattccaacatctctttactttaatttctttttgtgttctatctaatccatctatcccttgaatataccaaatatttgatctttcttttcttttgatttcttatttacagcaaccaaatcatccaaatataattcccagcagtagtagtgctggcatgagcagtggttctcatcaacttctaccaccaccagctgcgcctacttcgctaccactgccaccgccaccaccacccttgcagcctcatggaggaggaggtggggccgggtcgatcagacctggttcaatggctgatcgagcaaggatggccaacattccaatgccggaaaccgcattaaaatgccctcgctgcgaatctgccaacacaaagttttgctattttaacaactacagtctctctcagccgagacacttttgcaagacctgcaggaggtactggaccagaggtggcgccttgagaaacgtccccgtaggaggtggttgccggaggaacaagcgcacgaaagggagtagtggcggcggaggaggctcctccaagtccccagtaagcagctccgataataatcgacacactggaggaagtatgactacctccggttcttctggtgcagtaccctctggtaataatgatatattaggcttggcccaccaagtccctccggggctccgtttcatgacccctttacatcatcagctcactcatcatcatgacttcgtcgccgccgccagcagtgatcataatttgggtttcaactacggaggcctcaactacggcgctatgtcaggaccaatgggaggaggagcagacttgaattttcatatcggcagctcagctttaagcgggccgagtaataattcgctcttaactggattcgaacaatggcgtatgcaacaacctccgcagtttccgttcttggcctccgggttggatccagcttctgcgggtttgttcgagagtgacgggtcgggttatcagccacggccaaagcaatcgagttccggaattactcatcagatggcttcggtaaaaatggaagacaataaccatcatcatcagcagcagcatgagcttaatttgtcaaggcagttaatgggaagcgatcagtactggagtggcggaggtgggggtggtgctaattctggtaacaatgcttggacgacggatccttctggatttagttcgtcttccacaactagcaatcaactgtgaagactactgtagctactgatcaattaatctctcttatataacctttcaatatgtggtgatcgatattgaagcttcatcattcaaatttcataggtgattaatttgaacaaaagaaaatattgtacgagatatagctcagctgaacgttactgatccataacataaattatcttttacagccagatcttgacccagatcgatgatgatcatgtgatcatgaaacaatcatcgtggccctctttcataaaccctagctagacatatggtaggttcttttttatttttagtttttaccatttttttttttttatatatgggtttaattgcaagagtgtaggattttccccccctcttcttgttaatttctttgtttctttagcttaaaaaagaatgaaattaatgtattttcagtttgtttctcgacaatgagtgtaagaatatttcttaatttggttgtagttttgagttaaaagatattaatgatattaatgatcatcaaattagctgtactataccattactatatacatgtgtatctatcaaagtttattctatatgttattgcatgggtatttatatttgatcaggttttttggta

SEQ ID NO: 28363 - DNA, 2355 bp, Cannabis sativa
tcaatcaacctttattgtatattccttaattaatgtaatttattcacttgtaaccctattaaatagtggatcattctcactattcaagcatcgaaattttagcctttcacaagagttctcacgctgccaagagattgaaggatcacttgaagatgaagacgagctatatgcacaaaagggttgagttattttcgaacagtactccaagcagctcgtcaaaaatttgatgttcacctcctcaaaattaaacagggttcatctacgaaataggaaggacagagaggtgaaacactgaactgtgtggaaggtgccttctcaagaaaaacacttccaatacttcgaccaactaaaaatgaagatttagctacaagactttcatctctttgagggaattttgaaaaataaggatatttggattttggggaaacctatatttctaaaaaatcaaagttcagtgcagaataataaagaaagaaaatcacagaaatacttataccaactcaatccctaataaatgacaaaacaattgttgatcatcgcaatatgtctctagattcaaaagaacaatgatactacacacattccaacaaatgaaattcatacaaataaagaaattaaaacatgtaaaaattggtgcaaagaaaagggaagaaagacttactcactgtttgttttgaagttttgaagaagatagcctcctggggtgcgtacaagaagcaatctgaggaaaactttgggaatcagagaatatgaaattttcttgctctggaaatttgaaggtttagaaagatttaaaagaagtatgaggagatatttacaaggaaaaaggcagagtggaaaatattttttgaggaaataaatttgaaatgattgcttttcccacattttactagaaccatctcgaaaaatgcataatcgtcgaacacattacccgactcccgacttctaaggtaaatggtcattatggttggagacttaaaaagatttgagaagatttgatgcaagtaggtatgagcccttagggttcggatcacatgggggaggacacttgtaacttagttgtctaaggaaatgacaagtccacgtatgaccagatgatcctatgaggacttgggggcaaatgttattccaaaattacctgagtgacgtggcattgataatatgacacgtggcggtgagaaaggaggttggatgacacatgtcaagttcttaaaagtcgaataaagacaaaggatttgaggaatatagagatgtcacacgatgtattacccaagtatctgaccaatgcacttggctggtcggaaggagtaagtcaattatatcaagagagcaaatgttatatcctggaccaccgaggatctgaccaaaaggattgcgaggaccaagtccagatccgtattaactacccaatctttgaacactaggtcattttggatgcctagagtaatgggattgagagaattgtgggattgactcaatcaacctttatagtatattcagtaattaatgtaatttattcacttataaccctattaaataatggatcattctcactatacaagcatgaattctagactttcacaagagctatcacgctaccaaaacactatttataattctttcaaaaaaaagtatcaaaaactcacttaacagattcttttgatcttgatatatctcaaacaaatactaaagggagtaggtcctaaatatagagtcaaacttctataatcattgtgtgtcgtttagtaccttcattaattattatttatcgagcatttttattatcgttctattagctttgcgttattgaataaatatgacgtcaactgatttttctttttttttttgtcatattatttatcttttatatttccaaaacagtcccttttaatactgatggttatgaataacaatccaatcataaacatccagccaaaaagtgacacgtgtaatctcatatctggaaagctaatccaggactcctcttgtccatcattcattcatgctcacccaaaacttttcttcacccactgtaaaccagcagagagagacagagagaatggctgctaaagccttgtttggctgcactgcaatatttgagaagaatgcttctttttctccccttctcatcaaatctatggctacccagaagcctattccagcagctagtaaaactgttagctccaagaaggtcagctcctcctcaaccatgcctctttttttctgctaaatattaaattataaaaactactttctccaattctacattttaatttgcaaatctctgtgaacaaaacaatgaaagatgagggatttgccttcaacaattgaattataatgaactagcattagttt

SEQ ID NO: 28364 - DNA, 5073 bp, Cannabis sativa
tcttatgatttagggtcatttgctatatttttttgaaatgaggacataaactaacatactcctatgatttgaggccatttactataatttctccaaaaaatttacttttggaaactgcaatctggttaattggagctccaggaaactgcaagttgttgcttgatcgagcattgagtcaaaatatcatgcattggcctcagcaacaactgaacttgtgtggataacatctttacttacagaactttgcatcacttttgcacaaacaacaacctactttaggttgtgataatcaaagtgctcaagctcttgctctaaattttgtttttcacacaagaactaaacatattgagttggatgtgcattacatcagagctcaaattgtataaaagaaactgcaagttcgctacattgcaactaaagatcaaatagctaacctattcaccaaacctctttcttcaccacgattctaatttttatgtaacaaactgtaactggagcattccaaatacagtttaagggagggtattagtaaatacgattaagcgttagtttgtatgttaagttagttatgctagctgtgcttgtaggatagagtttattacttttcatagttggccaatctattactcataaatgattcactcaattcatataaatacaattcattattcaactcaacaatttcactcaagctcacttcatctcattattgttcttaaccggtgatgtttggaaagtaaaattccaattgatagcaatgactggattaaaaaacaatatataagaaagaaatgagttaaatcatttatgagtaatagattataatttatgagaccaattaggttatttgtgagctgacagttttgttggggtaaaaatacataattttcttcataataaaagataaagataaaaattcataaaaagaggaaataaataatgacttttttcttttagttggaaaagtaaaaaacacaccattcaccaaatgggattaacttgattgagattagtaacacgctacaataacacttttaattttttattttaaattcaattaggaagtaggtgagtcataatggatcaaaaatgacataagaatataatttccttttattattggaaaggtgaagtacagataaagaaagttaagattgagcaaaacgtggtgtagaagaatttcatcaatcctccaattactagacatgtagggccaaaaggcaaaccctacaacacaacttagtaccttgattgctttcttttcacataacaaaggtgatgtctcagggcagcttttcttatgctatggctgcactgtgccataagattatttaatgtcttcagaataaaatattaatttaataaagaataaaagagaatttttgtgcaaaaacaatttcacaaataattgtgagttcaattttgttttgataacattgccatggtattataattctttaatgtactaacttggtacaatgtgaataaatttcaatactcaagtaatactatttgacaagctagagagagtgtctttgtctacaaagaacaaaaaatggggttaaattacagccaataaagtacaaaaacctcatttgaggtcttatcttaagctgacgatggtacagtactataaataataatagaaaaatgccataagcaagaactaataaagaaaaaaaaaagtcaaaatctaacgctggaaaatatattaaagaagaaaaaaaaaacatgaggtgtattgtctatgtacatgcatgtatgtgcatatgatgtgtagaactaaccagaaacagtgtagaagatcccattatcttaaatttgatcaattcaattattgacagtaccaactcaatgaatccaaaagccccacaacaaatagatcgatgagtcacttgtaatttttactatagaagaagccaagaattatattcctttgaaaatctcattccaatccgatcaaaacaaaaactgattctcacatcctttcaataagggtatttgcgtggcacacatcacaatcatataatcaattattcaaactggacgaaacttactaatcttagcacaactaaaaatcttcttcatgggtcatcaagcaaaaactccccttaatcatatctttgccattaaagctctacaagaacattccataatatttaatgtgaattgcagtggtaactgatcagaactcatattacatacattaaaagaatgtacaagataaaaaggaaaataaaattagtacaatgggaaaagaagaaaagaatcaactgtgcctaaataagtaacgaatactattgtttctattaacttatctctacacaaaaagaattgtgttgactataccaacaagtttctcaacaaagaaaagtttcagcaagaaacatccttagaaccatagctaattgctttgaggcttgtgtctgacatatttgtcatccattttcgaggaccctttgaatcatctaaaatattatatgcataggaaggccacctcaaatcttctttaccttcacaagagccttcaaatcccaatcttaacattttttgagttctctcaagagcaataagactggaaaatgtggaaaaactattgcccaaaaacacatcagctctcaaacaaacttcatagtcgattgcagactgaatcagatacggatacttcttgtaaatcccatcaaccccaagttttttcttctcaaaaggaagcagattttctctccaaccaaacagtagagatgaatcttcaagcagttcatctgcaacagctagataaacaacagttggtgttgttttcaagccaataacattgctaactctcttcataatctcttccttgctactacatatctgagttatgttcattttcttctctagattcttacagtgaatcatccaatctttctcaactctcatatgcacagcaacataaggaaaaggcttagccttgtctatgtcatttgcagggtcatctttccttcccatatctctaatcttcgacactactttatcagcttcagccataatctcatcaaccaaagctaagcactcaaagaccttagcatattccttaacagcccagtgatcatgccacagaaaagggttcttcccaactattctaataacttcataatcatcaattgggttctccaaactctgcttcagctgctctaaatctctctccattgtccaccttcttccacttccctttcggagctcgaaaaccccggtccggttcgaaacatcagaatacttactaatctgaacaaagcctctacagtgagaattaaacctgtccaactgaaaaactttgtcgaaggaaattggtttcaaaagctctacttctttgtagaacagagaagcacttaagcttggcatgagaagagtcctgtttagcattcttgctgtgagacaagatctggccaaagctatcttttgattatttagtccccacactatctgtggaacctccagaaacttgtcgtttctgattccaatattgtcgtttaaggacagagaaaggttggggatgaaaacgatgtcgtttggttccgctgaagagctaccgattattgtagtgactggaggaaagaaaactgctctgatcaccagcgccaatgcagctaagaaaacacatttggatgtaattgaattcaagtagcagctccataaattcaatgccttacatcccatttcaagaatttatcaaccaaatctgaaacatgcaaaaaataataacaattaattagtattacatacattcatgacatttggcaaaatatatataaacgttatataattatgtatctatgtgtacaacaaatattgtgtaccttaaaaatctctggtatttatgggcaagaattgttatacaaagagagtctgatgccaaagctttcataaacttttaaaatctgcataccccaaaaagaaaaaactcagaaaaaaatatatactgattttaaaaacctcgaatttatcgatagaattcacaaactgccagaacagtagccatgtcacatgtgtcttttaatactactcgtaatataattataataagaccctgtttttagaattagaacccataatcatgaactaaaaataaaatactagtagatgaaatagtgcaaaaatgattacaaggaataaaatacttactttgttctgagaaaattgaattaagaaaaagaaaagtaggattttgaaaacagaaatggtgtttgcaggaatctgaattgtgaattgtgagctgtgagttctgagaacagcctagagaagatcaaaagggagagagagaaagaggggagagagagaggtgtgtcacgtatatgaatcaaaaggaaaacggaaaagccaaaaatcccgcgttggaaaagcgaaccatacccgtctcactcatgactcatgacaactcagaatctcaatttcatacctttttattaacaaccacctcaattttttaataaatcaaaatcaaaactaaatcataaattaattttgtattaaaagaaaggaatattacttcaccaatagcctcttatgtttttcttgctaaattaggtatattattttatttttttttgtcaagtttagagtattattttttacttaggtatattaaaggtaagcacattgtattatatttcttgttttgttcttttttcttgttgagaaagtattatatttttatgataagtttaaccatatatttttattaactttgaattttcttatgcattgtcttattcaccaaagaagaagcaagaaagaaataaagaatctatcatgagtatttaggaatttgccaaaataaagtacagaagacagagtgctttaaagaacaaccaaatcatctaatcctgttgagatacacacatttatgaatcagagtgtttttttttttttttgctaaatgaacgagagactattctgtacaaataaaaaaagaaattaaataattttacatttagggtgtgttagaaaagtaattgtgtaattactaggtagggtaattattagggtggtaattacatatttagtaattaaactatattttaaaatgcaagatgt

SEQ ID NO: 28365 - DNA, 4030 bp, Cannabis sativa
aaaaagttcaggggtacatgtcaaaatatgtcaaaattcgtgtcaaaattcggggggaaattcggggggaaaaaattactaattagccttatttatagagtagaagagtacaaagctaaaggagggaagatagagctggaatccaaaaaaagctaaaacagaaaaataacagtattaacaactaattacagctgaaacaaaactgttaagacaactaattgttctcttctaacactaactgtatcctactcaatctaaaaatacatctaggagaagcactgtgtcatgagtcatcagttcaactctgccaatagatcaaaatcacttctagatagtcaattaactatctccttaccctatcagttacgtgcaaaagttccttaactttttttgccatctgaaaagattaaccaaaagttcaaaccccataatagccttagctatgacattgtttgttgcacaggcactcagttgttttcaattcaatgcagtaggtgcctaggtgatctttattcactatgccacagctttttcacttttgcaaagaaaagtttgcaattaataatgcaaagtgggaatagaaatttcgagtgttgtgtgtggtcatctccattctctattctctagggtcactcaagaagagtagtataaagctatctgcctttcgagaatattgacatatccctacccagcaaccaaaacactctggaagatggtctctgtcttttagagacgcatggggatgatgaggtattaagtgtatgaggagtagaaagtactgaggcactacaacatgtcgtctgcccgaaatacttgagtaactctagtgcaattgatttcaccttggagtttccatttactgatagatggactaaacactcaactatttcttcactcattacaagttgacaatattgaggtccatcatggcatagtgactgtagtatgttcaatacatgttcttgttcctttacaccttgctctagtagttttccaatggcagcaatgttatcagcaactccaaccctggcctcctctatgctacataacttctttataatttcaatgacatacaccgaaagaagtctgtcatctaagaatagaaccaattttgggatgtaatccaaatataccatgtggtaacctatgtccctgtctgtggatagattactcagtatcttcatagcaagaatgtgaaactctctagtgtgagtttgaaggacttttaacatggagggaagaacaccagaaaccaacatcatggaatgatagctctgttcatgagataaaatttctatgattgcaaggacttctccagtgatctctgaatctaagtaggatgtcaacacataaatggagtctcctaattgaaagggtggcatttcattcctgcaaggaacacccacgaagtttactatacttagatgtggcaatcacttatgcacctatagtaacacatagcatttaatttaacaaaacaaacaccaattattagttactgcattattatagaacaccaaagataaaaaggagcaagagcagaataagggtaagtacacgtaggtagtctagcttggcacataacggaatctgttggatggaaaaacaaatttgcaaacggaagttgagtttggcaggtttatccgccaataaaaaaaccgtttggggttagttgtaatcaaaagtaaaatttatggggtttagccgcaaattaccctttattattctaaaatcacttcaatcttagtttcatcatatagataaaattacctgttcttagtcaaaattgccaaaagcacttctgccccttctctttgtgcttttagattacacagttctcttgctttattcataaatttgatcaatggatttacgtaatcatccgaagttgtccaaagataaccttggtcactactatacaatttctcctttacatcctccactaccttgcactgtgattcccatgaaatttctgcaaacttgaagatcaaacctaatacatttccatggctacaatcagaagagtgagaattttgagattcagaattcatctgaataaccccgttcttgaagtcataatttccagcactgcctgataaatctgaaccgcaactattgctagaagagtgaattgacacattgctgatctgaagtttcaaatggcccatagaactgccaaagctgacaatagaactgtaacctgaaatctttaaccttgaaatcgaagcaggaaaaggttgtagacaaggattaggaataagaatttcatagatggaacaccattttgtgatgagtgccttcattgcacaatttggagtgactaacatgtgatcaagctttgtattagttatggggcaagtgtgattacactcatcaaaccacctctctatccaaattctctcaaatgtcttcccagaggcaataatcacaggatcatacatcaacctcccagagatgggacatttaaattcttgaggcggttcgggtgatgaaacacactgatcatcataatcaagaagctcttcagcagatgtggtactattgctttggcattgcaagatcacattcccatgtttccttagaagattcaaaagatagtgcaatatttttttccttgtttttgaactatcacctactttatcaatcagcctcttaatagaccttttctctatcaacactgccaaaggggatgtaattttaagctgtagagctgcaagtttaaaagcctcgagttcttttccggtggcggcagctacgtcctgctgcatcagtgctagtatagcatttccagcctctttgtctgcagaatcaaatagaaaatttgcattccttagatcatgaatgattcctgatacctgcataataatgaccatttttcttaattagtacaaaaaaaaaaaaaatgtttgtgagtttaattcccagtagtcaatgacttacttgacttcatcagataattaattaatactgatgtttactttaatttagagagtagaattcaactacgtacctttgcagccagcagtaatggaaccatattttgaatttggcttaaacaagaatccaaggttttacgtatcttttcacatcttgacagtatcgtttctccagtaattgcctgaacacatacacacatttattcaatgaaacataactaaagttcccagtcagaaatatatttatatatatatatgtaccaaataaagtttactagactcagagcagtgctgaattattgacttggctttatccattgaatcttgcaatgagcatagtgctggtattgcagacgagcctcgtggtcgagaagactcgatggctgaaaatatctgtgatattctatcaaggaatttcaggagctctacgcatattaatcgatgcacctaaaaaaaaaaaatcaaatagagatttagttttatattcacaacatattcttaagcagtggctctgtaattagcaaatagattagaatattaaaacactagtctatcaagccatgcccagcgacccttgtgcatatatatatatatatatatatatatagatatatctcaataaccgggccatccatatcaaaatctaatttgtaactcctagctaataaatatcattatcatgatatatggactcttatagcctaattaataaagcaaataatataatatagtcatttaaagaatctgaaaacagattcttgagaaagacaaaaaagggagagagagatgaagtgatagagaggaaatgtggaaaaggttttttttgctcaatctcaaactgattggcaaagcttttatttatactcaagaccatttacaaaccgattacaattgccaataacaaaattacagaaagagaaagctaacaataaacaaacaaaccgttacaactaattacagtaacaactttctgttattctatcaacactgtggaacaaattgagaactagtgatgatggttattcaaacaaaggaacatgagaaaggttacaataacctgctaaaatttactctgatatcagtacatgcacaat

SEQ ID NO: 28366 - DNA, 2453 bp, Cannabis sativa
agagaacaacttcaatcctttaagaaagagcatgattgacacaaagtcaccattgctgaacaccaataaatcatctgcaaagcacaaataatttagttttaagcttgagcatctatcatggaacttaaaactggccaaccaccaattctcttaaaaattcaagataggtattccatcattaatacaaagagaagacgagacatgggatccccttgtcttaatcctctctttgcattaagatccattgagtaaggagaattttgggattctaatgcagttcattatgaattgaataaactggtttggaaatccaaaggccaccaacatttcctcaataaaatctcattcattggtatcatatgcctttctaaggtcaattttaatcatgcaactcagtttgcaattctttctcccatataatctcaccaaatcttgacaaaataacacattatgagcaatgaaccttccatgcacaaatccaccctggttttcagcaattagatctagcagaatattcctcaatctattgcagatgacttttgttgcagtcttgtatattacgttgcagcaagatatgggcatgaaatctgcaacattctttggacatgtggtcttaggaatgagggtgatagtaatggtgttgatttcctttaagatttttcttgagtttaaaaagaataagatagcttcttcaacctcaggttcaatcagctgccaattatcctggaaaaaggcactaccaaacccatctggtcctggtgatttaataccaagaattgaaaacatagcttctttcacttcttgagcagtatattcagcattcaacacatttttgttataatcattaagcttaggcccaagatctaccactatctaattaactctcctcctatccttcaaagtagtccccaataatccatgatagtatttctttcaaggctcatcacaccagataccatgctcatcctcaatagaaaaaaaatcttattatggattcttctagctttaagagaagcaaggaacatagcaaaattgtcatccccaagtttaatccaagagactttagcttttagtgaaagaaaagagattaaacattgtgtacctctgtgtatttcttgcaagcctcttattctgcaatcatcttatctttattgagaggatcattgctcaattgtatctgtgctgcagccacttcagacttggctaacatatcaactttatgaatttaaaaaaacccttctttattaattcctttcagtacattcttcaatctcctcagcttagtaacaattctgaacatcttagagcccatgacctctttttttcaactttcagcaacaattttgcaccataacctggagccaacttccacatgttaaagtacctaaaaggttttttgccataacacctatcttggtaaatggacacaagaataggactatggtcaaaacaaccttcaggcaagaaaacagcttcagagtaggaaaaggaagtcatccaagaagagttgatcaaagcttggtcaatcttggaaaaaaaacttgtcctcaggtttttgcttgttgttccaggtaagaaaatttccataatatttcaggtcattcatgccacactgctccacacagtctttaaatctttgagaagggatacaaagagctttgttccctactctttcattggcatttaggatttcattgaagtctcccatcattaaccatgcctcatcaatgttcttagctaaattctccaggtctccccataatttctctcttcctttttcatcattaaattcatacaccagtgtaacttggaacttcccaggatgttgtttaaaatgaacaatacagtgaattaattgatttgtgcaaaagttgatgtctacagtgtaaacattaggctgccaagccaaaattattctccccttatccaaccatggattattattcaaaaaacaccacccttgaaacaaattagtatacaactttcccatatttttatcctaaaccttagtttctaacagactaacaaacccaacattcctggagtaaatcaattgcttgatttctttaagcttctgttggttgttaatccctctcacattcctacaaagaagtctatccattggaagtaaagggatctcccccctccaatggtatccatgatatcctactctgctgatgactcaaacatgttgttcactacagctccccctatttctttctcaatcacaactttcttccctttaaatactttttgaaacccatcttcatctcttttcttatcttcccctacctttttctactttggaacccagacctgcttcccctgttcctccttaccctcttttttcctacatgaattagtctcatgtccgatacccgagcaatgataacatactagaggaatccattcgaacttctgttgggttttgtgccctaaataaaacccattac

SEQ ID NO: 28367 - DNA, 3074 bp, Cannabis sativa
  modified_base (1079)..(1084): a, c, t, g, unknown or other
aacccggacctaggacctaggaaccagacccaaacccaagacataggacccaaacccagacccgagacccgagccccgagcccagatctaggacccacactcggacttggactcaagacccagacccgagactcaaacttggacccggacccggacctgcacccaagatcgaacccgaacctaaacccaggatcgactcgagacctgaacccaaacctagaccaagacccaaacttaggaccccatacatgaacccggacccagaccttggaccccggacgcggacacgaacatggactcgggacctaaacccagacccagacccaaactcgaacgaggacccggacccaaaccctggaccccggacgcggacacggacatgggcttaggacctgaacccgaacctagactcggactcggaccaagacttgaacctgggacttagactaggaccaaatccaaacccgagacccagacccaacccatagccgatattagagtcgagtttattgaaaatatattataactttacataatctattaatgtaagctaatactaagcataatattgtcttaaataatactaatacaatacaatgtaatacaatctaacacaatacaatacgacgtactaaacgagctcttataatgtcgaccaataataaaaaaatacttatgtaagaaatatcaaatttaatttagtagaaaaaaaatatgtcttacaaaagatgaacgttctaatattttttaaaagattgttactgttaaattgtacaatgtatacaatagattcaataccacatatttacttaccaaaataaaattcccacaatgagattttaatcaattaataattaaaggtaaataaaaaagaaaagttaataataaaaatttacataaaaaataaaattaaaaaaaatgtatgtatagattattaataggaataattacataaaacattaatttttgtaaaaaaattttatatttttatggttatttttattacatttttacaatattctataaaaaaaataacatgaaagtaacaaaaaaaataacataaaaaataatatacaaannnnnnaaaatcaacaacaaaataacaagactgtacaacataaaaatacaccaaattaaagaccgtgttttatgtaaataaaattttaaaaatcataaaaatattaaaaattataattttgtgttttatgaagctgctaagtactgtcaaattaatggtcgatgaaatacaaaccacattagacatgatattttcaagtcaaaactcaaacagcacgtacattattaatgggagttacttctggttataaaaaacagcaaggaacaggggccacaggccattattatatgagtagtaataataatggaaataaatatagatcataatagaagacagtgtgtacgtaagagaaaacaactatacatacacactcatttacctctcactcaccaacccaaaataagaaattatgaatttatgaggtctgggtatagtattgatttctctaacatctaatttcgcaaaaattagttgggggaacttcaatgctacatgatagggtaggtaaatcattttttcatttttatttatttcacactgctatatacaagtttcaaactctcgtgatcttttcaacttgatgatacacataatttttttttatttttgagtaataatattttagaaaattctaggatgtacttctaaaattaggttaaggatgcatcatcttctttgtatatagtaaatatttaaaacatcttgtaaatttttaaaaaatttaagataatataaaagtgttaaaattagagttcaaacaatatattatacgcgcttttattttattgtatacttttataaaatagatagattgaactcaatttttttttccagaaaattatattaaatttctcaagtatttacagtattgtatataacaataatgaacattattatattatataaaaaaaattaaaattaaaactatctaaataaaaaaaatatgaaagggtgtatcaatacattaatttttaaaactgcactgtattttagtgttgacaattggtgtaattgtattgtgtttcgggctagcaagatttcgccatgaggcgatgtataacacaaatatggttaaataacgtgttacaaaatgtatatgtaaatacgacataattctaatttgataatgacagatacaattaacataatatttaaagaagttcatattaatcgtatctaatcatgcttaacctattttgactcatatttgcttatgctaaacccaaactcactaatttcataccctttttaattaagtcgtgttatatagtatcatggtttatattatcaccctcaaataaaataatgttgtggcatgcttgatcaaatgctcatcatagccaaatgacattttgttttaaaaaaaattaattttttatgcatataattagccaataatctatatatttatctatagatattaactggcgttagttattggttcttggttcttggatctgggttcgtttgggtgtccatgacgtcgagtactagtagttatcagcaaatggaggtagcggagaaaatgacaggaatttttatgccgaaatggtaggtgcaacttgaaatagatgaatttgttgtaataaaagaagctttaagctggattgaccgtcatttgtgtggggacaattgattttgaaaactgatagccaaattacactttgtcatcctcttttggtctaatagttcatgatgttcgtactcttctcttatctttaaataatgttgagttgtgttttgtcaaacaatctgcaaacaagctggctcatgttttaatcagggattcatgtttctctccaggtcgtgtgcttcaattggtgaattgttttaacgaagtgcgttctattgttattaacgattgctagttaataaagttgctaagtttattaaaaaaaaatgtgttattttgtaattattttaaaaatatgtgattatttatataaaaaaaaagtaaatttttttaagaaaatttatgtaaataataaattaatat

SEQ ID NO: 28368 - DNA, 1558 bp, Cannabis sativa
ggtaaaatatttccaacacttacaacactgaagtctgaaccctaataaaagcccaagcagtgatggcatgtcagccatgttttatcagaattattagcatattgtgggttcaacggttgccgaagtcgttttaggtgtcttgaatgatggtcacagtatggatttgatcaacatgtcaattattacattaattccaaagatcaaatcactctatggtatgggtgatttccttccaattagcttgtgtaatgtaatctacaagctcatctcaaaaatggtggtgttaagattcaaggaagcacttccactagtaacctctgaaacacaaaacgccttcctctcaaacagactcataaagaacaacatccttgtagcctttgaaattgtgcaccacatccaacacaagacaatgggtgttaaaagttactcagctcgcaaatttgatatgagtaaagcatttgatcgagtagagtggtcttatctttgggtagtaatgaagaaaatgggctttgatagaaaatggatagctttgattcaacattgtttgtcatccacaaatttatctttctcacttaatggtgaagttacggattatgtcaaaccaacaagaggccttcggcaggggggatcccctttatctctttttgatttgcttagaagggcttttaagattactacaaaatgaggaagtgattggtaatcttcaaggtttacgtattacaagaagagcaccttcaatctcacacttattttttgctgatgatagcctgttattctatgaaaccacacatgcgtctattatggaaattcggagacctttggacatttatcaccgagcttaggccaaatacttaacaatcaaaaattagttatgtctttctctctatatactccagatgcagtgcaagacttctttcatcggactttaaagatgctaattagtcagtgccatgagcgttatcttggattgccttcctatttaggtcgagacaaaaaggagttattcagtaacatcaaagaacgtgtttggaaattgatgcatgcttgaaatgaaaaactgttctcgattggtggtaaagaggtgttacttaaagcggtagttcaatcaataccaacttttgctatgagttacttccgttgaacaaagaccttctgtcaacaattgaaaagtataatagaaaatttcagtataatgttcatttatgacatctcgtacacacatcatcataaaaggggaagatgtacaacaggcgttatgtgactttattggaagtaaagatatgttttttgggtatgagttattgttaaccctaaaaattagtacctctaactaaggttagtcgactaatagtcaaaggactaacaagagtgcatttgacaagcttactcactcggcatcatgcatatctcaaagtcactataactacttacgaaactcaaggaccaatcccgtggggatctacaaataagagatggaaaaaggcaaggatgtgaataagtgaagttacggatgggaaccagggttgcagatgcatgtgtgttgtgtgtgtgtgtgtgt

SEQ ID NO: 28369 - DNA, 2315 bp, Cannabis sativa
atttatatatgtactctctctagtcggcgcacgtcatcatcatcatcatcatcatcatcatgggatatataagcttacatttacatttacaatttctctaatattttatatataacattgagcacaaagatcgatatatttaccactatatatataatttcatagtgaattttttatagtttaattttgaggtaaacaatgattgattattttaatgtgagatgttgatgattgcacgagtatgtatggaatctctcctgtgttgggagagcaattttaataaatttcgtgcttgttgcaaatcaatacatatatatatatatattggccagtacaagttatgatatatataatccctaaattaaaagtagtaaggagtaaggcttttattttattattagaacttataaagattaaaagaagccaaaagggaaggtttgttaaagagaaaaaactgttgaaatttgggtatttctatgaaaaaaaatgtacaaaagtgatatttttcaaaaaaaaaaaataaagaaagcccattttggttggcctagtccaactcgaacttggcccttagcccatctgaacctgtcccacccgacccttacccacttgaactcgaaacctgaaaacatgaagcgaaaatgggtgtgggaagagtatgtacttctctggtacccgaaatccaaaaacccgaaaacatgttttgtgtgcagtcttagaaaaatgtaactagtcttatcataatacatctagatcagattatagttaagtttattttcacaaaaattaaccaagggtactaatttatactattttagaaaatacactctaatttgtcatttaataaaatagaaatccaatcaatataacttttacaaaatacaaaatctaaaataattataattataatttcttgtaatacatcaattatagacacatatatggaccatggtgaaaagaaaagatatatgataagtgatttggtattaccattagagagatatacataattataggctttaattgtaatttaatggttatatatatattgtagtagaactcacctcatccattgacattgtctttgtgaatggtgaccaatcaagccaattatatgtttggtcaaaatcctctaaattcttctctagctgaccctaccttaaaactctcttatctttcttttttttataaggaaatgatcctttcattaaaaatggaaattgattacatttgttaaaagtaaaaagatagatcttcctaatctatattaattaaaatgttattaagtcctatcatacaacaaatatatttagctaaattatgtgctaaaataaatattatttatacgaatgtaattcactatacatttatgaaaataaaatagtactattaattactctaataatttgaacgaaatcaactatgaaaattaatttttttcggggttacttaatatccaataaaagttttatttacaattagatcaaacataaatatatttatatattttttttataaatcaacttaacttttgtaatgtattattttaaattccatttgattaaacatggatattattatttaaaaaaaatattggttgatacaaagtacaaaccatttcttattggcatgggcacaattgcaatttttattaatataccgataaattgtgatttatttattggtaatatatagtagttaattacgtacaaatatccaataaaaaaagaaaagaaaaaatccagtgattgctgttttttattttttaaattttatttaacaaagatagtgttcggtaaccattaaaaaatcagttttctgtttaattaatcaaaaactaaaaacaaattataaaattttgttaaggtgaataaagaaaaacaaaaaacaaaatagttaccgaacaagcctaaaatgttggtagttttttcttttatagttttttattaattaattagaaaaatattttttataattgttgtcaaaattaaagttcaaataatttatacatgcatcatattgtacttgaatctattttgacgttgatcctaacttattttaaatttattaatttatgataaatctcgtgtatatatatatatatatatttactattaaaaaaatattatatatatacgtagaagacatacatataaaaacagaatggtggatatgtagtaattattattaattaacaagttaattagtatgaaattaattatgaggtcttcaaccatcgaagaagtgatgtctagtcttttgacttgtctctgaaagttttttgtcattgttgtatgattatttctgggtttgtctta

SEQ ID NO: 28370 - DNA, 1710 bp, Cannabis sativa
tgatatgtgtttatctaaaagtaacggtatgcaatttgaatgaaattggaaaccggtcaaatatgggtcctattattgtaatatattatctatttattaaaataatattttaaattggtatagcaaattaaagatttttgtgtcgattcaaattattcttcaattaaattagcgcaaggcatattattagttaaagtattgttattagatattttatagtggttaacattatttatgtatcacgttgttagtagttatttatttttttatataatttaataaacggtaaataatattttattttggatctcgtgttttgtaaaaattattaattgaaccttctattttattaaataacaaaatagatttatatttttcaaaatagtaaatgtaggaccctgagtttaatttttaataattttatttttttaatataaccaattttaaaacaatttataatataaacagattcagaaaatataaccagttttatcataatatctctagatcagattattattaagttttattaagtttttaaatattagaaaagatattttgtttaaattttttttgtcttttttcttaaatttttccacttttaaaaggattgaaatttgggtatttggatagagtctttctcctctcccttcttctcttcctctttccaaacaaagaatttaatcaatttctttatttctcttcctctttttttctctcccctctattaaatattgtattaaagatatgggaaaataaatttttggataaagacataaattttattcaagttggtaagatattcaaaattattatcattaaaagaaaatgtgttgtgttgaaccagtacataataagtgtgttgttttcttctcccttcttctcttgtttaaactttataagtttagttttggttggtttggttctgaaggtgaatttcttggtgttgtatttacaattacaagaggttacaattaatgaatttattgttattggcacagtaaaagaggtgatcaatatatttataaatttgtatgtgataatagatgacatttattccatgaagtttgtgcctcataattaagagtgaccaaatttgatcgaactcttattttattttgatcttcaaaatgacatggtaagatgagattaaataaattaagaaatatattaaaaaatttaggcactattttttattataaaaattataaataaattattaggatggcagaatgggctattttcgcgaatcaggtcggcccccaatccaacgaggcagccataacccgaatgttccaggtcactatcttggtttttggcccgacccaacctaactcaatatagttttttttcttttcaaatcagcgcttatttatttcgatttagatattaattaaaaaaatcaatttatattcttataaatatatatatattagacacaaaatatcgtaattttgctaggaaagtacatttagttttaatataattataatgtaataaataatttttttaaatgttagcttaaaacagagaaggttaattacaccacatactgaaatttttaattttttttacttttatactgttgggcgaaatttttttaaaaaatactttgcaagttttatactgtttactgtgttaagttttcactgttgttatactgttattttttagttgttccactgatgtttttagctgttctgttttgtg

SEQ ID NO: 28371 - DNA, 4577 bp, Cannabis sativa
  modified_base (44)..(66): a, c, t, g, unknown or other
ttttgtttttcaaaaataatttttttaaaaacaaaaattttacnnnnnnnnnnnnnnnnnnnnnnnaaaaaataaaaatattaccaaacagcacctaattttttttggatagattttaattaaattcatatagtattgtttcaattactaaaatcttattacggaattaagactccacagctatcacaaattactaatgtgggacaaaacacacgagcaaatggcacagatatcccaaccttttaattgttaataaaaaagacataaaatcttttaaaatattttgtaatattttatttataatttcatgtaatcgaactatgattattataaataaattagataaaatctgttagaaataattttatttcgtaaaatcttttagatattatcataaatatattagataaataaatttaaacatctttctgcattaggctagaactagatttctcattatctttgttctttctttgcgcccaatatttcccattatgtttcaaaaatatatattagtttaaatttttaatttgttgatttcctaattagaatataattaagagtcatcattttcataacctataaatatatcattcaataaaagatttacaatttccttctcattattcctgagtaagaaatttctagctagagtttttaagagagagcaacctacagtgcgtagtggtagtttcattccaaacaaaggaccaactgcctcacgtgcctcactcccccacgacctattttttcaaacccactttctaaaagtaatgacatcgttaataaataatacaatacataaataaataaataaacccaactaaactatctacagtttgtaggcgttttgtgtttgattgcttctctttattttttcatgtagtatcccaggaataagcttttgtcagctgaacaaaccccatatcagccatgttttacttctttatggggtggcgtaaagcttcaaagtggtaagaacataaaaactgttaaaatttattttactcgtggagattcaattcgagattgttcttgactagacttgttccttttttgacagtaagagactgatcaaacggttacagtgccggcttaagttggttaagaacaagagatatgccattgttagacaattacgtaatgacttggctcaacttattaagattggccatcaaaatactgcctttattcgggtatgcatgcatgtgtatatatgcatatattcttcttcttcttcttctgtttttcctatatataaaagcgtaaaaccactcttaatttgattgagatttctcatggttcattttgttaatgttctattaaactgaaattaagcagttatttcattaagattagtttactctgtacttacttttcgaatacaaatttcataccacttaataatatttgatctaattggattagttaaactgaaagtaatatcctctgtttcaatacaaatttggctacacaatttcattcatttcgaattagatgtattcaattattaacgaaaagtaataaatccaaacatgtaaattttttgtttttggggtttagtattaagagaaacaaatctttatctagctaagaactctgttattaggaataagaattcatttatgtgatctcagtgaaacatttgctaaatatcttttcagatttgagattaagtttccactgcacacattaatgatttgaacaactttctcttaattaggttgagcagttgatcaaagatgaagcagtaaatgcagcctatgaattgctggaaagtttttgtgaattcattctcgtccatttctcatacattcggaaaacaaagtaagtaccatcagtggatactgtctttcaattttgctggggtatatatatatatatatatatttatatatatattcttctaaatattaaaggttcttgttttctttggttcattcagagattgtccaaatgaaattaatgaagcaatttctagtctcatatttgcctctccaaggtgtggtgatctacctgagcttctgcagattcgaaggttctttacagaccgatatggtcagaattttgcaacagttgctcttgaattgtttcctgggaatcatgttaaccttcaggttctcatttgtcttatttcacataacaatgtttatttatttattttaaaagaaaaggactagttaagaaaatgtaatagtaattaacatagttgttaaaatcacaggttaaggaaaaactttccacactgtcaatttctgaggacatgaagcaaaaattagtaaatgaaattgttaaggagtattgcctcaaaccagatattttagcacttgattactattctgattgggaagaacagcaggtaccttaaatttttctgcttcatataaaatacaatgtgaaattctctctctctctctctactaaactaaaatttcatgtcttttgctccttaaatcaatagatgaagataaaaagtagtgaagaccaagcattgatggcagatgttccaacttcttatcatggcatatctgaggaaagatcagaattgcatagttcaatgcttgaaaaagtggaatttgttgatttaccaattcattcaaagccttggcaagatctcagtaaatatgcttctgctgttacttcagaacagaaggtggttccagccatttcagagtctcaggcagagaaagaagatacttctggtgaaggagattctcaacaagggaaaggaaatttttctgagacgaaaaaggagagaagtgttacagcatcttcttcagaaagcttgccaaaagttgatgatgaaatgttagtttatatggatgacattgaagagtttcagtcctcaactccaaaagatgaagattctcaggaccaaaggctgttcaaattcaaggagagttctcttaaagactctgatcaattggggaacaaaaaggttaattcaagcttaagagattttgagagaagtagcagtgtctctagtaaaagaagaacaaggaggagactggtgtttcgtgagaatcaaaccatagaagataatcaatgccttagttactatggtcaagactcatcaaataagcaaagatctaatcatgttcaccagcaaataaagcaacataggaaaacttcagttgattatgaatctgagaatagaccaaaccaattttacaactcagatatgggatttacatctttgtcaagaaaccgtagatgttatcccaaaagacctgaatgctgctgctgctgttgcaaccacaaaaccagacatagctgcagcggcttggaaagtccatgctattttgttgcagaagaagatattgacaatgatatttatgaagctccatcattcaggaagccaaacaatttgtccaggagtcattatagcagagaacatatgtactggaatggagaagaagaactgaatgaagaagtggaaagtatcactgtacctcagaaaccaaggagaagaagttatgacaacagtgcttctatggattatgatgttttcacatactcagatcaccaaattcaaagccagaacaacgtggtaaagaggtttggtccaagaggcagtcaaggaaaagatttagttccaccatatatcagaactgtgacaatgcctcaagaaaagcctaaggatatttccaatgaagactttcaaaggtgtaagactttccctattcaaactcccaagcatgtccatccaatgctgccagactatgatgatatagccgccaggttcatggctctcaagaaagagaggagctgccattgacctctgaattacaaacaaggatgcagcatttttttctctcattatcttttcttttgagggatatttaatactgataagctagtttatgttttgagtttataacattcattcattgtatctcataattgtgtacatacatatatataagggcaatttacactaatgtatacattatatgatctcattccgatggtcttgtcttttgacatggtgagaatgtttgtttagaatctcttagaaagtttgtctttgattatctttttcgattatggcgtcaagcagttattcggtgaatgagttggaagatctctatgctaatattgagattgaaggggaagatgacgttgccaatgtctttgagtttgaggaatccgaaactgaagtcaccaatacagagttatgcatagttggaagatttcttacagccagggcaatcgactatgacgttatgcgccatatgatggcatctctttggcaaccgggaaagggtatgtacgtgaagcaactagaatccaatcgattcttattccaattttaccatgaaattgatttgaatcgcgtcattgaaggaagtccatggactttcaaccgcatacaatttatcttttcaaaactgaagccaacagacgatcctcgaatagtacctctcaacaacctcgacatatgggtacaagtccatggtctccaatatggattcaaatctgagaatgttcttagaagagcgggcaattatataggaacatttgttgagtccgatcccaaaaatttcagaggcatttggagagactatatgcgggtt

SEQ ID NO: 28372 - DNA, 5257 bp, Cannabis sativa
  modified_base (5218)..(5218): a, c, t, g, unknown or other
ttattattatttattactgcattttttgtttttttggaaaatcaataaaattgtattgcacaaagaaaattaaacaaattgttgagcacaaaaaatgcccagaactcagaaaaaaggcaactcaacctattacatcttaaacaacctatgtaaccacctcaaatcatttacattgactctactaagactataaaaaaaatgcttaattcttcgatctgtaaaatcaaccgcccatactcgattcttccaaaaagctaagttttgagcacgccaaattgagtaaaccaaagctgaaagaatagtcaagaagatacatttttagaacttgttaaatctgcttcttttaatccatttatagacacctaaaatagtacagacccgagcaaagaattcacacaaactgccctgaatctgcactcaaataagaggtgacagtgtgtttcctctgccataacacaaatactgtagctcaaatcaatgtctgaaccaaattggatcaaacagtcttttgtcttcaatctctagaggaggctaagccacataaaattaaacacataagagtttagaaaaccttacattgatggtagtagaataatatgactcatttcgctcaaatctctaacccttgttcctttctatcgtagagtaataacaagatctgagcctggatctctttctctcattcgggttggttaccaccgtcttctacactatgattgagtacttgacttgatatgtacgtgtgggtatgttactctatcactatggctcgaattggtgaagaagaatgaatgagatgcaaaatcactatagaaaggagtctctcatttactagttgtcagagaataaaacctaggtttagtttggtagaagtaggttgttagatgagatgaaagcattatgatccttttatagtatttcaactagagtttaggatttaattatatggataaaaaaagaataaaataatgggcaaatatggttgctttggatcaagtttagggatgcaagaaagaaaactaccacgtgaaattatggagaggtgttactaaaaggtcaaaatttgttggcgtagtacagaagttgattgtgtggtccatactgtatgcctggtacactaggccgagtttgtctaagtgacgttataagcaacaagaggcacttttattgaaaatgaagcttgttgtcatgggtgtggaagtatggtaggggccatcagacgcttgttagtcatgagagaagtcgagagttgatgatcaagatggttcaaattgggatagacatggaatgcttcaattattgtgtgtgcgtgccaagagggcatcacatggagaccaagggggcagatgctgcaattgtaagaggacggtcatacttggaggtgtttgcgtgtgatttttatttgatccagactggaagtgccaagatagtctattaaggagtgtttccttgtagaaactccaatgggcataaatcacacaaaggcatcaatagagatgctgagttatggattgaatgcattaaaaaagccaacaaggccaagaagactaagcataagtgttgagatggcactagagttttaatggaggcgagaaggctatgccagtgagacttaatggtcatgtgagcttgtgaaggtcaaggggggtgcttagagtttgcatgaaggccagaaggttgcatcattggaacttaatactttaggggaggccataggggcgtgatgctagtgcaactcagttggatggttaggtggacaatgtacgcatataggaattgacaggggtgttatatgaggtagctgactcaagagtcacattctacaggatgcatttttagattgcatggtgtgcatgaagagttgggtggtcagacattcatgtgtgggcatgttgtcgaggacaccaatagatgaagtggaggagagaccttcacagttcaattagcagaccaaatgcttgttacaagcatcggtgagtatcatggagatgaattgtagttcagaatgtaaagtcaagtagacttggaacacatgtagtgccagttatctagggtgaaagtcaacatgactcaagtactaagataacaccatggcaatgtttgcctaaggtgaaagtcagcaggactcaggtactaaggcaacatagaaatgtcgaggggcgaagagtcaatataaatgcgacatcatttcaacatcttcatcaaagtgatatttgttttggagggattgcatgtgagtgtgtggttagcttgcgagctttacctcgagaggtatgtctctaagagagaagtttttcaaagttgaaatgggggatcccactaattcatatatttgaagaatcagagtacttgttcaaattttggtgtgtgaatcgagagaaaaacactataaaagattggttgttcagagcaaagacatgcacgattgctgtaagttacagatagacaatatgcataggcgtaagatgagatcaagattgaactagtttgcgacatgttatggacatgctttgtgtttatgggaacattggtgttgtatgagacaatgtaagttgaatggttcagaaagcatatgtcgatgggagacagcggattgagatgacttcaagccttaagagtaagacatcgtgttatcatgtttgtcaaaaattcaacgagttgtcagaggatgtatgatttattttgggggatggacttgtgacacaatgttagagagtcgacattagcagaagccagtgggcgaatatgtggtttcgaatggttataagatcattggccacattttagaagcttagaggagtaattttgcattgggtcatagggatctttttcatgaagtcgtgggtatgtggtagggttgatggaccagtattgagtactttgaggaggttttgggtgaaagagtgcacttggtgctgcattgggtgcagttggcttgcgagcctcgttcaggatagacgccttaaaattttgacatgcgacaagagtaaggtggtcgattaccatcaataggatagcatgcaatggagtgcgcgtgtgaagtttctagatggacttatcttaagagacttgcttcagtggaggcatgttctgttggtgtcattgggtacggtgtgtttgcaaacctcaccgtgaggggtgcaccatacttagtccttgtcaaaaggaggatgcattggacagttggtgagtgagatactaccagaggatgtgtaagcttcaaagtcaatgttgcaagggatacttggttgacttgaggggcattgtgatggacatggaggagttcatgttagaggaagtattcgagtacagtggcactgtttcatgggtgattttgaatagcaacaatggcaaagattttttgatcaagttcaagagtgggcatgggagatcgtcacctaaagggtggttctacgaaagtaaagggactagtgtagatttaggattcagttgaagcttgaagtaagcttaggcgtcgagatcaaataaatttctctatggtccgtcgatgagggcatcaacatgcaaaactgggggagaatttagtgtgtcgaccaagatggcacggtactaggtgatgtccacgaggtggtcaactggtggccaagtggtggcacatgctggtgtgcacattagtggcatgatgttgcctaatttgtacggtagtgacatttttataaatatcttcaatattatttggatcaggatgagacttggtattcaccatttatttgggcttaggattacaatggcgtaattagatttgagaaattctgagaattagtgtatgttgatgaccatatgtctacagagtaaaaatcatatatgttcctattagaaggctgaaagcttagggtggtccttaaggggagaacttggtgtcagctctccaccaccctctagcaccttggtgctaagtgagctactactagtcagcgggactagtagggcgggcatatgaggaccatgagggaactcatatgtctccatgaattggagtactcatggacattatcgggccgacccggtaatgcatctagagatgttgctagatgtcagctgttacatttcatttagcttgtcggtatgtcgtttgcatggaacatggcctaaacctgcaagagatgttgtggtgcaccttggccatgggtctcaaaataaggtcagatgggtagtcattcatgagctagtttgcatacacacatgggatggattcaccatgctagaaaaagatagaggtttggcgtatgctactagttggtgacttatctcgatgagctattgacatatgtgaaggtatggtgccttgagaattggaccataaacgtatgggaggccttgggccaagagggagactatttgaacagtatcaattaggacatgactaaagttgttggcacgtcaacttggtgttagcatcttgccacacatgctaccttggtcatgagtgactaggtgagcgaaggtgttgtgatttgctttactatagtaagaatttatggacagtgtgcatatcttggctagagagcctccatgcatggatgcattcatagatgcttgcgagcacgactcgacatgagttgttcaagggaccaaagggtgcatgaggcacacggtcgcgagaaaaatgagctcattattactcagatggttgtaaagctgaccttgcctgaaaaggtgagcccgtgacacattgcactgtatagtattatttaatgtaatattatatttggtattgacttgtattattagtttgtgtaaaattatactatctttatgataaatctagaccttgaccccgaacctcgactcaaacccccaacttagacccaaaatcgaacatgaacttggactccagactctggatctcggatcccaaaccccggaccacggatcttagactccggagcctggtcccaactcaaacctcagccctcaaccccagatccgtactcaaactctggactggacccgacctcggcctctaattatttctaaatattataatacaagctaatacatatcatttcttttgtattaaaataaaaagatttgtattgtattaaaatttatggttgttataattaatacaatagaaagttttatacagatatagtattccttatcagggttggcccaagcatttaagggccttgtgcaaattgggccctttactaaaaaaattgaggaaattgcactctataccctttttatattntcctcttttatttttaccctcttttttaaagtctatcat

SEQ ID NO: 28373 - DNA, 2604 bp, Cannabis sativa
tatgggtggaagaatttctcgacttgcaaagaagttttttccgaaaaatcaagtaaggatagtcatggtgggtcttgatgcttctggaaaaacaagtattctctacaagctaaaactgggagatgttgttacaacaattcccacaataggtatctaatttatgaacacttaatcccagaaagtttgtggcttctgggtcttaagggagagagagaggttgtagtgtataagcaaaatcactaggcaaagattttctataagcaaattcactagtttataagatttcaagttatttgtcaaatttagaaaggtggttattgattctttttgtttttgctttcttttggaataggttttaatgtggagaccatagagtacaaaaacattaacttcacagtctgggatgtgggaggacaagataaggtaaggtggtaagcttgaattcattttcctttactattcacagtacattttctgatcaagaaaatgcaaagcctagccttgtgatgatcttccttgtaaaacagataaggcccttgtggaagcactactttcagaacacactaggtctcatttttgtaatcgacagcaacgaccaagaaaggatctcagaagcccgtcatgagttgcatcgtattttaactgaggtaagtttggataaaggattgaaacaatctatggagttatcattataattgtttacttgtcttctgtagaactagatttctcccatttattatggtttaaggcaggctccttttttgtttcttcttttagcatgaactgagcaatgccacactattggtctttgccaacaaaaaggaccttccaaatgctatgcctgtgtctgagataaccaatcaactcagcctgcactcgctcagtcatcgtcgctggtactcactgcctttatcttacgaaaactatagacaattgactaaattgaatgtaaaacttggttttaatcttttccttcattggtatatggcatagatgttttgattggttttggtaaaaaaaatttgtacaggttggtccaacatacttctgcaacttccggtgagggactctacgaaggtcttgactggctagctaacaatatttctaacaaatctaacaatagttttaataaagctgcctaatatttagattaaactacagttctttatgcttacacttacacacactagagattcaagtcttttgtgtaacattcaatacaagtctaataaaactattgttccaaaagggcagttttgttctgtttgattctgaagtttgaaccttttgtaatttacatgttccctacttcaactatagattgatgtaaagtaaaatgttggtaggtaacatctaacaaaattagttagaaatagcaaaacttacaatcaaacaaatttgataatttgtttttgactcataagcacaatgctggtcctgcaaagtggtcagttaacatattcacagattcaggtcctgttgaagactttgatttcttattctttttcttcctcccttcattcttgttcttgttcgttttctttaacttctcttctataaccggctgcgtgctctccaagtgttgagcgagagcagccaggggatcagattggagtgcaggattgctaagaactgtactcatttcctttgcttccttcaatctgagagccaaatgaaacaaccacccaataagcacaattaaaaagaaaattacattatgaaaggaaaagtaaattcttcaaaaacatttaaaactaacattagtttttgcctagatttacagttcagcttgaactcggctagatttacaaactcatttgtaaataatatttttttaaatataaattatattaataatatggtgttttatcgcgaaataagtgatatgattgatgataattgataagtagatgcaaattaattacttttcacatttattttacattaatgattaaaaactaaaactaaaaatatgaattgatataaaaaaaaattattttattattcattgacataaaaatagtaaaaagtatataatttgtattcatttatcaactatcatttactatgtcactcatttcgtaaaaaaaattaaatagagtgtgatggaaggatcacgttaatataatatttatattttgaagagtattatttacaaatcatatatcctaaggggcataacttagaaatgaaaaaaaatactaattatttttatttatatgataattgctaaaagatatgtcagttctcattgggtgttcattggatcacatccaatatttttaagtccatccagatccgatctaattatatattggatgttagattttaccatccgatccgatctaattgatctcagtcatccaatcgattcaacatccattggatgttggattggattgtttctatccattggatatatttcatacatatttattggttcaatttgaatttattcaatattttagactagtatttctagatcgaatcggatctatccaatatttttaggtccaatatgtactagattagattggatccatgcaatccaagaaaaaaagagtaaaattttaatgttaatttttatgtatacatatatatttt

SEQ ID NO: 28374 - DNA, 1832 bp, Cannabis sativa
ctcctcctatgccaccaccctttctgatgcctccaccaactccaccaccctttccaatgcctccaccaacaccaccaccaccaccttttccaaaaccacctccaactcctactccacccccttttccaatgccgccaccaactccaccacctccacctccaccggcaccaccgctagcacctccaccaccaccaattcccccacctttaccaaaaccacctccagctccaactccaccaccttttccaatgccaccaccagctccaccacctccacctccaccagcaccaccgccagcacctccaccaccaccaattcccccacctttaccaaaaccacctccaactccaactccaccacccttaccaaaacctccaccagctcctccaccaccaccagcacctccacctccacctccaccagcaccgccaccaaatcctcccccagacccacctccaaagccactaccaccaccagcaccacctccgaatcctccaccactaccaccaccaccaccagctccacctccacctccaaaaccaccactagaaccgccaccaaatccagcaccaaaccctcctcccttcccaagacctaagaacttcttctcttcaacatcatccttcctaagagaaacaacattcctcccactcacactcactagaaaaacattaaaacaaagcaatgataacaatgcaacatttctccaccactccccacgagccataactttcttggactatagagatagttggtcaatcgatgaagaggaccataaaaattaacttgtatatttatactactaaagaaaaaagcaaataaataataaaaaaagtttatttatgagttttgtcattaaatagtagttcaactactacccgttggccacattgattacataaatggacgcccacaataatcagctgatattcatatccatttgcatgaagctatagctagctgtctttgttcttcttcttcttcttactatttattttgtactataaaaataaaagccttaaatgaaaagaaaagctaaattacttgagaacaatggtcattgttttgggagggacagttcgatctctttacaactattgcccaatcacgtgcatggtttcttgttcaaagttttataggcttcaactatatttcacgcatttaatgcacgcgcctttattaatactatataatgatattacatacagatatacaaagagcattgtggatgttactttttataagttgtattgtgtatgacaccgaggagaatgctaggcaccagtaatgctttttaacaatttttaaatataaattataatcagcattcttattgggtctcaatggttcctagtatttttttataggtgatgatctacgattggttagcaatattttctaaaaactatatattttcttaagttatatgggactcaatacttaattacactaatagcggtatgatactgaggagggtcaccaatgatgcttgcaattctcaaatataaaatgtgacaaatcacttttgataaatgtgactcttcttaaatagggatgattgttgcaattacttatcatataagtgtgtgtcaagttttgctattacttaattattaatttaaataataaaaaaaattaatcaaatacaatttaattatatttttttaaaatatataaattttattctaattttaaatttatttatataaaatatatctaattaattttattgaaaaatggaataagtaaataagtttagtcattttaaagaatatcacttgttataaagtatgattaattaattaaattaacgtcgaatttaaatttaaatt

SEQ ID NO: 28375 - DNA, 1557 bp, Cannabis sativa
tagtaggcttgtctcgtcagtaaagttaactcttcagcatcttgggttgtgtcgcagaaatgtgcaggaccacgtggaaatgttgtatgagtgggtcggaaagcaaaaccttctttgttttgagggtggttaatttggggtgcactaaaggtgggacagtggaaaagtaaaattactagctttatctgggtcgagggaaatgatcgactgaattgcgctatctccaaatgccatgaaggatatttacttattatgggagtttgagtctcagggtcatgaattggacatcatgatctaagatacatctcagttaatgtttacaagagaaattgtgatgaatctacctatgtagtaaaagcagatgagcgtgaacaaatggccggttagggcgcagtatgtcaaagagtgagcatgccaccaagtttgctgtttggacttagttgtctttaatggagtgactacagaagccttaaggaatgcaagtttttaatagaggtttagaagagcatgaagttaattatgtgattgtgatgattaatcttaggggttatatgattgtatgtttatgtagtcgcgagttgacactttacgtataagggagagaggatcaattataacaagggaagtaataacattagaagagattctcgaaagccactaattagtaccgattagggttagggttggacctataatgatcgaaagagggcatttaagtaaattttagatatgggttttagcaagttggtgatcaagattattgttgggcaggaatgagtagtggcaaatttatttgagatgtccaaattgcatgagaacatcactcgaggaaagttgagtttgattcgatgctataatggaatagttgatcaggtgacgtgtcattaagtggtatggtacgtagaggactagttgttttcactagatgagattaatttccttatgagtatataccaggcgttataattattaccatataaatgatacaactattactctataaactcattgtagggttaatatagttttcttaattattagacaataggagataatggattacttaattaagtaacagtgattattgattacaccttatttaggtgaatagagtttgaattgtcttattataggcgacaagttataactaagtgtgatattgagaatagaattggttagataagtatgcaattactagtgactacaagaagaaaatatagagatgttataccagaaggatgaaactttagttgtctttttaggaaaggtgtatggatttcaaaaatccaatgttattcccgcttaagctaggtgaaaaatttactacaagacgaacatattggttaagcagttagtgttggatgttacaaagaaaatacaaatagaatccgaggttggacatatatgatatgcaaaggtcagaacaattcaataagaagttctaaacctactaaacgactcagaacataaaaacatattcatagaactaaattataccattgaagatcaagctttgagcttaaaaactcacactttgattcaaaccaattttaattg

SEQ ID NO: 28376 - DNA, 1311 bp, Cannabis sativa
attgtggattgctgctttgtttaatcatgtgtgattttgatcaccgcgtcaaaaaaatatatatataatttattatttattgtcactgcggaaagatttttccaagtggactccctgtcgtacaaaaaagtagtcgactcagctattcactaacttagaatacatgaggtaggattttgtggtagcgacctttctaatgcaaccgagtggccttcgtatgtgtctctattttcatttattttattatttacttttaaaaaaaaaatctaacttaagttcatactttttgtttattttatgcattatatcaatttgtaagtgtaaaaaaccagattgaaaaagaagtagaggaagagcttcatatcatacagaaattcaagtgagccactcactctacttctatatattttgttgtatgaagaaacaagtttagtactttagttttgcttataaactgattaaaagcttagtttgataattcatagcagagatggtaagatttcgtgatttgccaagtgaagttgaggaaaaaatcatgttgtgtggggacttgtaatagagcttgctcatggtcctactcctttctcaagataccctctaatgaaggtgtatattttgctcaatctgctagactataatcactttaattacgatgctagaactggtttttcttcgcacgtttatgagctgtcaatatttttcttgcgtaattaaggtattataaaaaggaccgactactatgatctattgtagattcttaactacaatgatattttgttattattaaatcatgttgttattcttttcatagtgagtgttgctcattttatttctcaggatcggatcatggaacaatggaaaaagaattactaaatgcatgatgttgatgtcctattatgatcttggtaatgttgattagaatttagtgcaattattagttattaaatgcatgattttgatgtcctattgattctaaataaaacaaaatacttctgttacttgctaaaaataacataaacattgaccataatgatttcggaatgtgacactgaattaaaagtttgagaatttaaatactaaaacaaattacgatcatgcaacattgaccattgttgattattcaactttaactaaaccaagcactttaagttctacatctatatggcaagtgtcacccaccacatagccattttctatatctttgaatttagtttgtgtcatgaactcacggaatccccgtggagaagaatcgaacagtcccatatctgaattaggaaaaaaaataaactcagacaaaagctaaaagttaat

SEQ ID NO: 28377 - DNA, 6098 bp, Cannabis sativa
  modified_base (6018)..(6018): a, c, t, g, unknown or other
ttgagtacttatgttgctatttattctaatatttaaaatttagttttttggtttatatatataaagttatatatatttgagaagaaaaattccaagaaggataatcaagttactacacattgctaataacctctgacaatgcatatttagccaaagaaaaaaaaaataggcaaacaaccttaatagatctagaatagaatgaaaactcagtgaaattcaaaaaaactgtcttaaatctacaaaaatcaaacctggttattaaatttcaaaaccacatttaaataatcagtttcaaatatcatattctgaaaactcaattaacgacattagctggcaatactttttaaagctaaatcttccgccattttaggaaaaaaaggttcccaaaatgtgccaaacagcaaaaaccataacctcacctataaagtcacgaaccactatatccaaaccacatttgttaatggaagcgtcgagagcaacatcaagaattgatcatccctgtccccctaccagacaacacccaaacagaactagaagatgcatttgtagaggactgcaagctcccaaccgagagagaagcactaggagagttgtcgaaaatcacgacactaaaccaaattcgcaataatcaccaaaatcaactctaaagaggccacaagtaaaggatcaaaaaacttatgaatgaaatcatacaaaacgtgacaaatagcaagaggatccccaaagaaatatctcaaactttatgacattcaactagataagggcacccccataaggcatggtgggtagtttctaactgagatttaacatacaccatttgtcaataaccgtgctttgtaaagttgcatttagtaagaatccagttagaagaaatatgccaagtgaatgccttcatcttgggaggaagattaagagaacaaatttttttcccccaaccagagaacccaattgaggaggatgcacgacctacaccgaagttgcgtataacaagccaataaccacttttaacagaatagaagtcagaattatcatactcccagattaatctatctcgagtcagtaagaaaggccaaggaacagatataattgtcgtagcttcatcaagagcaaaaagaccattgatcaattcaagtagtcccaatgggacaccgtaattccctcaccgaataggttaggtgacaacacaataaaattcgaagacatcggaacctaaatgacttcataaactttgatatcattaccatcgccaactttccagatagacctgatttaaaatattcttccaaacgaaaagaactttttttagatttaaccaaggaaccaaaaggcttatgcctatgatacaaacctttcaaaatcctagtagcaagggaatttagatatcatagaggcgtcaagcttgttttaataacataattaaaaaggtgtaagtccctaaagcatcatcaccatcccactaaaatctagcacatgtacatggatgctattcacaaagccttagaataacatgttgagcccatacgacattatttgacattatcatcatctcaatcaaatcatgttgaatctaatttgtgctaaaaaggacaataaagatattcttgagaaaaattccttactccctctctttcattaatttatttatttttaactttattgattataatgaattatattcaggagtggccaaatgaagaagataaggaacaattcagtcccgtctctgtgttggattgtccattcgaagacgatgatcaagatgagactaactctccattcaatagcaaagtcactcacttggaaggtaatattgtactctatacatacatatgtgtgcaagttgattaattaagaaaaacttaccgaaaatcttgaatttgcaggaaagaaacagaatcttcagcacaagattcgaaggctcgagaacctcactcaactggaaccagtcgatctggaaaagagaataatcgcaatgtcagatatcaaagacgattacgatcgagttaagattaaaaaatcaagcgacgatgaaatcgaagatcaaaaagcgcgggaactggttacgaaactcaccaaaaacatcggtactacgacatggtcgactgcgaccgaaaaattaatgttcgaattcttcagagagcgaatggcggaggagagagcatcgacaaagggctttgcggaggcaatggcggtgaaatcagcagtggattggacggtgggagctccgacgagagaagttttggtgggatgggaggttaaggagggaagaaaggcttacaccagggatatggaaagaaatggaaaatggagaaatttggatgaggaaatgggagagattgatttggagttggaagatctggtttgggattctttaatggaggaagtcttacttgatctgttgtgagttatagaaatatttcacttgtttttttttatttggcgcttttttttttcttttattagggttttgttgcaaatactgaaacagctcagggtcgttccgatgcaggcattaacgtcttggctagtcattcggcttaatgactaaagccaccttgagtatctcgtagattctttattttttttatgaaaataattttgggaaacttacccaaaaaaaaaatatatattaaaatttgggttaatttttataaaaagactgtttttataaaattaaaagtggaaaacaaaatagaacaactaaaaacaagtaaaataaaagtaaaaatttaacacagtacacagtgttattgaaaaaaaaaatacaatatttttggaaaaaatttcgaaaaaaaaatatagtatttttgaaaaaaaaaatccgctctacagtaaaaatataaaaaaaaataaaaattttagtatgtggtgtaaataatctaataattttttcactaatcaataacaaaccttattaactctcaaaatctagatcaatacaatttttatttatatacaagtaaatgtatgatattataaacttagacctatagatgaattaatctagatgaattcattgaagatgaattagacctatagaacctgccactaaatttttcaaacttaaatgttttaccaagctgccactaaaaaactcatttttctttcttttgtcaagatgaatcaacaagccttttcaaaaaaaaaaccaacaagccaagcttattcaatcaaaaagatccttacaaaataaaaccatcaaatttcaagtttcaaaacttaaatgaaaaatgaagtaaacacctaatcgaattgacaaaccaacaagtgaattattatcagttggtagagttgctcagataaaagattgaaacctagactagaaagatactagtaaaaaaaaattcttgaaacccacttcctgggcatttgaaaagtgaaacattcaaacagagttggagcttccttcttctcgctctgatctcagatcgagcttccttccagcccaagctcgcaaatttggagcagaactagagcactaggtgaacgaggccgatatgggtcgatcgacgggtgaatcccatggacgcctattgaggtgatcgagagagtgaggctcggggctgagacatttgggagttggagaagctagaagtggcctccgtttgggttgtcaatggccgaagagagcccaaggctgatcagaagttgggcgagagggaagtcgagaaggaaaagattgaagagacggagaagagagagaagaaagaaagaaaaaaatattttatttatttatttttcattttaaaattattttaataatttttaatgataatatataccaattgaaaatcgacatgtcgcattcttggaggacttaacagaactattaaaatgagtactaacagaaataatagaaattgaggttttaagtacttttgtcgtcattttcaaattttggatatttaatagcaactttgggtatttaatagcaataaattgaacaaaataattatttatgtcgtaaattttcctatttgttatgataatgtttgggatgatatgttttttttttttttttgaatggaaaatcatactttattaaccattaaattctgccaccaaagaaggtagcaaatcaattgggacagaccccaaattgaaactgcaatcaggataagataaggaagctctagaaaagttatgagctaccctattagttgatcgcctaacaaaaaagacagagacatgttgaagttcttacaataaaaccttacaatcattaaccacttgaccaaacatgaaaatcatttcaattgaactacgcaatgcttgaataaacactaagcaatcggtttcaaggacagcttggtaagatcgatttcgcttaatccaacttagagctttcttaaccaccaatgcttccacaaattctggtgtagccgatccctgaaaaagcttggtaactccttcaataagcagcccttgtgtattacgaaccacaaagccaaccccaaactgattcgtgtcagcaaatatagcgtcgtcgacattaaccttaatgctactttcaagtggtggctaccactactcagccccgtcgcctagcacaaaaccaggagtcgggtagattacattagaactatgagcagcaagccattgattaaggtaagtttttgccgaataaactatactttctgcacttgacaatttgttgttccaaaccttgtcattccttgcattccatattgaccaataaagagcaaccaatctttttttatgatcttaatcaagcaccagaaaattggagatgcaccagtccaaaaaaactgcattatattgcagccccgtacctattccctctctgttccagcagagttgtgcagctggacaatcaacaagtgcatgataaattgattcctcatgactattacaaactggacagattgttgacacattcacccgttttgttcttagttgaatcagagttgagagacatccttgacaagctcccacaccagatttttcatttttggggggagtttcaatgcccaaaatttcttccaaaaaacttcgagtgctgctgcatcttgattattctctccattcgtctcttgcatcattctatatgcactttttaccgtaaagagacctgaaacctcaccaatccaagtgattttatcttgactgtgaccatattgcatagggatttgtaagatgagtctttgatcccattgttcgaacaagtcaaccacaacttcttcatcccaacccgatccatttaatgacagtaggttgcatactcttgcactagaaagagcagggtgttgagatgaaacaaacggattctgaacatgaggaagccaaggttcacccaagactgggatagaggtgccatctcccacagtccaacgaacacctttaagcactaaaggacgagcttcaagaacactacgccagacataactggtgttgttaccaatatcaattgtgaaaaatgaacctcgaggataataccttgccttaaaatttcttgaaacaagcgtatcaagttttgtaagaagcctccaaccttgctttcccaacaaagccaagttaaaacttcttaagttacgaaaacccatacctcctttagacttatgattgcagagttttttccacaacatccaatgaatacctttaggagagttgctcgtggattgccaccaaaactttgacatcaagccttcaatatctcttgtaacctcttgaggaattaaggaaacactcatagcatggcttggaagtgcttgcgccaccgtttttattaatatctccttgcccgcccttgatagaaactttgtaccatagccaagaagtctatttttcacattgtttttcaagaaaccaaaagcagctgatttattccttctcattgaactaggcagtcccaaatataaactatcttcagcagccgtgaccatacccaagatagcgctgattctatcttgcatggaactcagtgtattggcagtaaaaaagatagaggatttggagaaattcactttttgagtaatactgtaacaccctaactagcanaggcgtattacgtgatttttgaacgtactgtccagctcattgctaatcaacgaggtttatgaaaatcgtgattaattaaa

SEQ ID NO: 28378 - DNA, 2251 bp, Cannabis sativa
cagtatcgtcaaatgcttgtttttaatttctgttagtgtgacttaggggcaaatatcgtctatggcccatgtaacacattttacatccatttgacaaccgacgagctcatgtattagtacaacaaataggataaccttaatagccttttgtcctcaatcctgatagattaccacatgcagggaaatcattcacagtccacaacagcacaaccttcaaattgaaaacttctttcttaaaagtattgtatgcatcgacaccatcttcgtacaactcttttaagtcgtcaactactagtgccaaataaacatcgatatcgtgtctcggctgtttaggccctataattattagtgatagcatcgtaaatttccctttcataaccaaccaaggtggaagattgtacataacaaggaacacaggttatgaactatgttggctgctaagagatctatgtggatctactaaatcgacagatagaccaaggcgtagatatcttggttcaactacgaatttccaattgaaaaaaatttactttttccaagcttgtcaattagcaggatgtcagagtttaccatctttcactcaccatttcttgtgccataatatgttttctgaagtttctgcactttgatagaaccgcttgagtcactgaatcaaaggaaagtaccacaagactttatttggaataagtttttggatttccttgctcttgttgggcttgtaccgtggcaaaccacattcctgacaagtgtctatgtgggcatactctttacgatacaaagtataatcatttggacatgcatgaatcttcttatacttcaaccctatcaaacttaaggttttcttcacctcatatgttgactctggaaaaaagttttccatcgacaaaatctctttaaaagcatatagaaattgactaaaacacttatcgcttactccattctctgcctttatgttataaaatttcaccatggttgatagtcattgtttttcacagtcactaaataacgacctatctgcatctctaaccatgcgatcaaattttttaggatcatgaataaactcttcttgagcatcatcaagcaatttcgtaggatgttcatcacaatcattactttcaaaatgatcatctacccctcgcccgcctaatggatatgggtcacccttcatcgattcaccatgccaataccatttagtataattttaatcaattctacgacaaactacatgattattttacatggtaatgtttccttttgatatattacaacattcgatacaaaacaccgattttttttcatcattactatatttctttaggtaaaactgtaaataaaatttgaatccttcttaaaattgtgaggtttctctcttctattccatccgtggtttatctatttcaaaaatgaaaataaaatttctaacacacaagattgaaaagaaccacacttaaaagttgctagaaaaatcttaagcacaattagtaattaaatattaaaaatattttcattaagaatcctaaaaaaagggacaaattttctcttatttctacaatatttttcaatttaataactatctaacaatgcaacaaataacacaattaaatcgggtaacaagacagaataattagaaaagcatttaacaatataataattgtcacccatctgaccgtagtatattcatatcgcagaacctacttcactacggatgaatatctaacatattcaaacttcatataattagtaaaagattgttagttaataatgtacctctagctagcaatcaatgatcaccgatattttgatttattttccaataataataatctacaacctacaatatttaatgcaatttaaaaaagtttaaattaaaatcaaatgagaatagtaacatgtaactaataaatatataactagtaactacgtacttatataattatacattatttagcactataattaatttatacatactataaattcttattacattaccttactattcctattatcatttctataacattacgatgaaccaaacacctaattaataattttagttcatgaaagtttcttactaagtattaaaagtttcaaactaaaactatataactcattacattcaattacattacattatattactagctattttattactattttattgtcaagacaattaaatttactatataactcaaatgttccaaactaagtatatatataactttttttttttgtcatagcaacaatt

SEQ ID NO: 28379 - DNA, 2248 bp, Cannabis sativa
  modified_base (317)..(319): a, c, t, g, unknown or other
atggtatataagttttattgtatagtgtatcattttattttagatcatgcatgtttaatttttatattattatatataaaagtgatatttaattttgtatgtatggtataattattttatggttgtatataattttgttaatatggtatatacaattttttataataatattgtattattctaatttatttttttattgtaggtatatataatttgttgtatggtatatagtttttgttgtgtataatatatcaattatttaagataatatttaatttttattttattatatataaattttttggtatgtatacatnnnttaatagtggtatatataattttttttacataatatatattttttgtattcatttagtattgttataatttctttgtagtatataattttattactacggtatattacttttgagtgatacgatatatgaaatactgctgtatatatttaatgaactaatatatttattcgtttttattataatataataatatacaatactaacttagtttccaaatttgcatttcaaccctttagctttttttttttcttttttcttccttttgcatcgtttataaattgatgctaattgttagtgtcgattataaatcaatgccaatagctctttctattaaagagtctctcaattttatttctctcaattttattactgtcgatcacgaaaaaactgatattttgatcaacacgaatgcccaattttttagtattgtcattggaccccctttcccctaaacccactccatctaaccctgtctttttccagcagtttccatcattctccattagtgttcaaacttttcttcttcttcaattaataaagattgaatgacattctaaacattcataagccaaaaatttcatacaatttccttcaatatttaaaacctaaatttcataataaacatcaagttaaaaatttcaacctacaattaccaatttagaaattcctcccccataatacatattggacaaaaaaaatcaaatcagatatacaaaaaagaaaaaaaaactcacaacctgtgatctttcttagggttcttcgacatagtacagatcgtcgtaaagcctttttcttctcaccatcctatcgtttctgcttcaccgaaatattttgatttggctttagctgcagcatttggagaatcacatcattcaaatgatgctaatgcagacattttctttgtgtttgccttgggaacaatttttctcttaactgtgcaggaattttaacaaagcacgtgcgtccaaacactcacgcctataggatggtgctgccccaataagaagtttgtacccccaacaaaaggagagatgctatttttatttaattaaagaaaagtatattttatatattgtgttatcaaatattaagtttattttaaaatattttttgaataaaaaataaaaagtattaagacctaataatatgttgacacgcatatatcttatgtaaaagaattaattgacttaagtacacttaacaactaaaatgtacaactgcaacaaaattgtaacaaaatgtattattatcacaatttttgttgcggtcatgggtaacaaatcaaaaagtgaagggagcttcaccataatttaccttaacaatgttaccctatcttgcatattttaggtggaccttgaaaaaacactccaaaaatcaacaaatatacttataagaaaacaacaaaagaattccaaatcatagaaaataatgaaggggaagagaacataattgtcgaagataaatatcaacgtatataagcagttataaactaaagaggattcaaatgagctaatgaatgaatgtggttaactaagctatctaaatatttataggaagtaccaccttgtttcaagcaacttattgccatgtccttcagttttgatactctgcatcttatctcctctccttctttctccctcatcaattttgtaatcattccctctatatctcctctttccaaaatctcattctccaacttaactcccactttccatacatggctcacatatcttgaattcacattttgatcaatgaaacttggcttacagatcattggaaccccttcacaaatactctccatcgttgaattccacccactgtgagtccaaaatgctccaacggctaagtgagccagcacttgttgttgtggagcccatttcactatgtgcccacgtccccccacgtccctgaggaggccttagtctcac

SEQ ID NO: 28380 - DNA, 1226 bp, Cannabis sativa
gtgagattcaatattaatttatactaataataataaattacctcttgtacgattattgggaccataaaattaaaatgttgcttaagtagtatatgtttaaaaatctaattttttcgataaattttcaagtgacaaatgcatcaagtcaacttatatattttatggttattattactgttaggacattttagggtccaaataattcgatttaaaattaataaaattataatatacttatatgtcaagtttaaaaatctagtttaaattaatgttaaaaactaagatatgagataaacattaattaaatcaatattaaaaatatcaaactgtcatcaaatacaaaaaaaaaaaatattataatatagtctaaattctaaatttaactttaattctcaaatagaataaaatcaaaatcaataactttaaaatctaaaaatcaaataaaacaccattaatcgtaaattttaaataaaaaataatttaatcattaagcataatttatgtaattttctttaaaataaatgtaaactgatttatttggattattttgagatggttggaataatatttaatccgcttattatatatgtcatttttgcattttttttttcaagaataaacttcattaagaagagcaatcatttaaaaatatagagacaaacttaataggaagattattcatattaaaaaaagtgatctggccattcaaaaaaaaaaaagtgatctggaaaaaagaaagaggttttaaaaactttattaaccactctattagcataacaataaacaacaaagagacactactctaaatatcaagcaaatgtttaccatttcatatatattaattgtgtattagatttttattaggttatttagattaaaattttcgttaatgtaatcaatttagttagaggttaaaaaaaattggaaatccacaaagtataaagtataaaagtatctttaaaaaagtgctataaatatggtgtatatatacatttcaagctatgtttataaaattaaactaatagtggagtataatgtagctgtcaaatttaacataaatattatggcataaaataaattttatattttaataaataatttgacacatgttaaaatttgtgtgagaagaatgatagtatttttaataaataattattaaaaaaataagtaaataaaaaaaaataaccttaaatataaacacagagataatgacatatattaaaaaa

SEQ ID NO: 28381 - DNA, 1465 bp, Cannabis sativa
ttatgggggctattctactattttggtttataattattaaattgaaaattttacatttaatttttcaaaaggcagtatttttgttagtgggggctattattgtgaatgggtccctccctggtagcaatagtcttgagccacccgattatgcgatattttataattggttagtgatattttttaaaatttatttttttaaattatttaaaaatctgatacttaataactcaacacctcttttaataattctcttataataatatatataagtttagctcccaagttcctcaaatgaaaacttcgtttaaatttcccatgcaaaccaaaagtcactttttaaaaaaagatcatataaaaacttatctcttttcacaattacgaagacaagagacattataactacgacgtcgtttttaaatataaccaataaatacattaaaaaaactacaacctttcacctaattcctttgctctcatcaaaaacaccacaaaattatatgagcaaatatttacatatatataaagccctttcctccctccaaacatattaattattatgtattgaatcatcatcatcatcatcatcataaccctagctaataatctcaaagaaaacaaaaaaaaaaatgaaaaaacaaggcctcatctccctttccttcatttccatcttcttctccatagccctagctcaatctccaacccaagctccaacccaaaccctagcccaagcaccaattacatcaccaacaccatccgaagcgccactagtccaaccgccggccctggcaaaccctacaaacgccaccgagatcctcgaaaaagtcgggggattcagtgtcttcgtccacctcctcaaaacaacatcagagaatattcaaatcgaaaaccaactcaaatacatctcaaacagcttgacaatcttagccccatcaaacaaagcattttccaatctcaaaccaaacactctaaactcactcaccacaaaagaaaaactccaactcatacaaaaccacatcattccttccttcataccaatccaaaatttccaaaccctaacaaaccctgtacggacacaagcaaattattctcttaatattttggtcgaaggtagttgggttaacatatccactggagttgttaatgcaacaattaatgcaacaatttatgaggataatcagttggctatttacaaggtcgataaggttcttcttcctcttagaattttcggtgtaaaaccgcgaaaaaaggcggtgggtgcaccggcaccggctcccatatcaagtatggttgttaagcctgatgagtttccaacatcttcgttgattgctcctgctttggctgctttgcttaaagatgcttctgctgtaagtggtgccctttgtcttagtggaaatgggattttgagctttggaattgctgtggtttacgtggtactactttctcttttttaggttttgtatatata

SEQ ID NO: 28382 - DNA, 2177 bp, Cannabis sativa
cctggtaaaataattccaataggtgtgtggtccccagttgcaagagtgtaactgcagtgtaccctcagtcgggttctcataccttgcaggtgtgttgcctccactactcatacctccttgctttcagagtttgtagaaggtgtggttgtacgtttctccattgcacgccttgtccttcgattcccctctaacggtatcctctttgatgtgaattcaaattccaccatcacttctcttcacacaaacaacatactcagcacttcgtaacgttttcacactaataggcttgcatgcacatacgtacatgcatggacgctcgcagaaatttgcacacatgcatgcttccatgtgagcccctgtctcatagctgtgttgcatcgcacttgcacacactcacccgctcgcatgcaagcctctcatgggctctcatgcaagcacttgtcttgctaccgtgttgcttcgctgcatcgcatacacttataccctcgcgtgcgagtctctcatgggctctcatgcgagccgttattcgttgccttgttgcttcgctgtgtcccacacactcacccgcttgcatgtgatcctctcatgggctctcatgcgagcccttatttgctgccgtggttcttttctatgtcgtacacactcacccgctttcatgcgagcccttattcgttgctatgttgctttgctgcgtcgcacacactcaccctctcacatgcaagtctctcatgggctctcatacgagcccttatcttgatgttgtgttgcttcgctgcatcgcacacaccacacactatgcgagctcttgtcttcctaccatgttgcttcactgcatctcacacaatcacccgctcgcatgtgagcctttgtctcattgtcgtgttgctttactgtgtcacacccactcaccttctcgcttgtgagcctctcatgggctctcatgcgagcccttgtctcattgtcgtgctgttttgctttgtcacatggtatgcccttgcacggatgttaccatggcttgcacggatgctctaccgtgactcaaatgaatgcttcaccacagctcacactcatgttttaccacttgcgtaaacgctccacagctcacacaaacgctctacgacccacccgaatgctcctcggctcatcaaacagcgcatgggctcacacaatagctcatgggctcgcgtaatagctcatgggctcatacactagcacatggcctcacacacctagttgtcacaattcaccagtcttagtatttaagatataactctctcgatatatgttagaatcggatgattcaagatgcgttggaaagatgagaaagggatctgtggatcttatgtttattaaaaattctaactctgaaagaatcattatgaaagtcctctaacatttgtaacatagtaaattgatcttactaactctactgtgagttgttacgggatgaccttcgagttgcatggatataccctgagacttgcaagaattgattctcgaggttaatgagccatgggccatacacgtttatatagtcactccttgaccgactcttacagtcaacgtctctcaaccttcgagactaattgttgactattctcaaaagcaactctgtcaattttcagggttagcatatactcaggatttagactgatgtactaatgatcatcgttgtgatatgaataactctttcatggtaaacgacacattaatgaaagatgtttattacatatcggttcagtcatgcataatcaaattatacacatcacctttattacatgtctatccacatatgtgatctgaatcaaaatcatacacactagaagtatagtgtatagaaaatcgtacttagtagttccatattaaagattctcattactttaatacgctaccgacttgttttattcatatcgtataatcttaattctcttgtacgttcttacaagattataccttctccatatgaataaagaatttttagatatttgataattatactattataattaatgtatcatttatcttataattgtatttcatatattctttaatatattttcctttaattactttcttttagtgtataaatcccaataacatgcatactaaacatgtattcatatatgcaaccattatactaatcttaccttaactccgaatgcaagtatgacggtaac

SEQ ID NO: 28383 - DNA, 3151 bp, Cannabis sativa
  modified_base (1840)..(1853): a, c, t, g, unknown or other
  modified_base (1933)..(1938): a, c, t, g, unknown or other
  modified_base (3080)..(3081): a, c, t, g, unknown or other
atgaatattttatttttattgaatttgaataaaattaattacgtgatattatatatatggtcagattttgatatttattatccaatttattttctaaattaattgtcaaaatattgtaataattaatatggcgcagatactgatagagtatctcacctacaagtatagattttcggtccccgagctcttccctcattctatgcaaacaaaaaaattctatcgaaggagagttgagagagcgaggaagagcccgaattcccatactgaagctattgcagggggtttgaagctcaaacttaatggttggaggtcacatatacgatttcgatatgtctgtagttattccactttacatgtatcgttcatgtatactttattttcatattatattatagtgtaacagttgatatcagaacagttattatttctgtcttgtttatatttttaagtttcgtttatatatatgtcattcatatttatataatcccaatcatatatataattttatattcacgtttatatatatatgttcatagatattaaatatatatgtttatttttctcatatatacgtatatatatatttttcaatatatatttatattatactcattcattcattgatttctataatattattataattgtatatattataatatttttatataatataattattatatacgagtatatatacataaaaaaaattggtttgtcgtggtctattgtagaattttaaatttttcatttttccgtatttatttcgaattctatatgcatcaccacatttatgtgtcattggagaatgatctatgcatgataacttgaaaatgtggaaaattctctgtaaaactcttttcggacccgtttaagttttgtaatcttaaagttcacattttacgtgtttttattacataaaatctatgtggatgtttttattaatgtatttagtacgttttagatttaaaaatatataattttttcgttataattaatttttccggtcgggtttggtgttgagtccgtcggacccacattggaaaagttgagtcaaatctaacccggatggaggttgaaggtgaatataaacaacgtgtcgttttctatgtttattctgcaaacctcccctatgcaaaatgatgtatcatttctttctatatcaaacaacaacatgtcgttagtggcagtaaattattcaaaaaaaaaggaaaaaaattcaaaaaaattttataaaaattttatttatttggaatatcaattattttcctcatttgtattaatttagtcaataaattatatttactcaatttttttgtttaatacatatatttatatttagaattgatatattatttaatataaattaaaagtagatttttctttttattttgggtaatttataacatgatttatctaggtatgtaataattatgctaattttttttatatagttatacatttaattctttattaccaaatttatgtaaattattgtttaaataaattttgagaaatttgttattaattacatatttagtaattttcatttaattagttatcatacaataattgcattaatttgtatttattttgcgaatttattatgagtgtagttaattaggatttatatgatttaaatgctatacataaatttcatgtatagtgctagatatattttaaaaatattttaagggtaaatactattttggaccctgtattttgcaaaagttactgattggaccttctattttgttaaatgacaaaatagactctatattttctgaaatgataaaaataggaaccttaattagcataattttcaacaattttatttttnnnnnnnnnnnnnnttaagacaatttctaacacgaatggatatagaaaatgtaaccagttttgtcatgatatctttagattagattattattannnnnnattttaacaaaaaattagttcatggtcctatttatagaattttttaaaatataaggtccatttcgtcaattaaaaaatagagggcgcaatttgtaacttttacaaaacacatggacaaaaatggtatttacccaatattcaaactttaagataggttgaatattttatttagcacaataagcttcttaatacttcataaaactattcataaaatatttctaaaatgaataaaaatatgaataaaacataagtaattttgttgtttgacataagaaaatatgaaacaatgacaaatgctgatatctagaatgatttttactgatattcgaatgaccacattagaagtactaatctcagtgattgtctattatattaacaacgaaattactgaaaagtagagctcaatacctaatgactaagcgaaaatataattttaaataattagggagtagccacaacatctttaattaaaaattatatattaattaatattcaccttaatagatataatatgaaattaataatataggtataataattttaccccacagggattttattatatggatattattaattaagataatatattaaattaaattctcttaattaaccccacaagaagctatggaaatttaatttaatagtgttatcacaaattttaattaagagatatttttattcctcattttcctaaattaaatattttattaaatctatcataaagttcatataatcttattagatttaaaattttgtccacatgcaattttagatttagtataattttcatcttcatcatgtttctacattggtaaaacatgaatttattaaagcctcatttttttaacatctacattttaaatcctattcttcaagctatttctttcacatttaaatacgctgaaatcaataatgaaatacctaagcttaggagtgacaatttcaaaatctggaaggaatgagttattcttcaccttgcttgcacatatatggactatgcaataaggaaagaagaaccagctgctgtcattgaaactagcactgctgctgagattgcgctacgtgaaaagtgggagccatatccaatcatctatgcatcatgttcatcatgtctagaatgttggattttatgccctaannaaaactccatttcaatgtaatctggattattcaatatcaataaagaaacagaagaattttttcattcatt

SEQ ID NO: 28384 - DNA, 2025 bp, Cannabis sativa
  modified_base (1995)..(1999): a, c, t, g, unknown or other
aatatctcttgtaacctcttgcggaatcaagaatacactcatagcatagcttggaagtgcttgcgccgccgtttttatcaaaatctccttgcccacccttgatagaaactttgtaccataaccaagaagtctattcttcactttgtttttcaagaaacccaaagcaactgatttatttctccccattgaactaggtaatcccaaatacaaactaccttcagcacccgtgaccatgcccaaaatagagttgattctatctttcatggaactcaacgtgttagatctaaaaaatatagatgatttggaaaaattcactttttgacccgaggcaagttcaaatttgagtaacacttcttggatccgaagggcctcatcttctgtggccttacagtaaagataactatcatcagcgaatagcatgtgagagactctaagagcaccgttggcctctttgcatccatgaagccaccctttttgttcatactttcgaagcaaggttgtgaaacattcagcacaaagaataaagaggtacagtgatagagggtcaccctgtcttatacctctagttggaatgattgggccaacttcattattaccatgagtaacacagtatcttgcagacttagcacacttcataataagctgaatctaattttcaacaaagcctaactcccgtaacattgcctcaagaaagtcccattcaatacgatcatacactttgcttatatccagttttaaagccataaagccatccatacccttacgcttcctcctaaggtaatacaaaacctcaaaagaaataagaatgttgtcagagatcaacctattcaccatgacttttgttgtaatcttgaacaagatgttacacaaggcaataggaggaagatcagacatacgctctgggtttctcatcttaggattaagcaccacgttagcatccccacaaccatcggcaagtaacccatcttcaaaaaaacagcgaacatttttaacagcttcatctcccataatcagccagcatttttgaaagaaagcaggagtcatcccgtcaggtctcgggctcttatcatgatgcatttgaaaaactaattttcaaacctcttcatcctcgattggttgataaagtttcgaattcaccaaatcagtcacagcactaggaacacaatcaataacttcatcacacacactacccgaagctttgaattattcgtggaagtagtttgacacaaccattggcaaacacggctcccatgaaacccaattgccatgttcatttctcagttgagtaagttggttgtttttttcctactactagcagccttatggaaatagctgctattttgatcaccctctctcaactaaaattgttaagcttgtttccaaaaaatctcccgttgatcaattgcatcataaagtttctttttggtttcagcatatctctgaactgaaattgcatcccttaaaccatgaagtttcttcaaatcatccttataggtcttgatacggtggtttagggtgccagttaactcctcccccaactggataacctctcggcacacaggttaattttattagagatgatgttattttgctcctaggaccaaacatcacgaataattttgaaacatggaggctgcttcaactaataattttcaaatcgaaatctacgtctaggagcaaagttattaatcacaacaggtttgagaaacaacggagagtggtccgaagtggcaaaacccaaattagaaagaatagccgaattaaatagttgattccaagttgtggaaattagagctctgttaaggcatacctcaatccatgaattcgtggcgcttcctttttccaagtgtattgatgaccttgcagctcaagatcttccaacccacaatgcagcaaggtttgttggaatccagttaatagccattgaggatatggacgcccacctctcttgtcttcttgacgagcaatgttgttaatgttgttgggttttatgcnnnnnataaaactctttacaatctgattagt

SEQ ID NO: 28385 - DNA, 1846 bp, Cannabis sativa
tgttagcaggagaagaaactttgattttactgagatgggagtgatgtgtaggaaaaggtttgggttttcatctactgcatttaatctctctctctcaaagttgagatttttaggcttttgggattggtattcatgaaaaagtgtttgttcttctccagtttgtgtgcaagaacaatgtttctctcaatcactgtggtttgattaagcctaactgactttttgcattagaatagattagttttacaagaattcaaaattgattgccatctccttctgcttttgcattgtttttggttaatttgttagtgtttaattggatgattgaatgtatataccagatgttttaaaggaatcatttggctcaacttagccaattgagatcaatgatgatgattattagacaaagaaaagccttcccaaaatctctccttctcaacttcattcgcctctcaacaaccgaatcaactcgcccactaccacttgctaagactagtccgtccccagttaacccagctcacctccttcgagtctgcaccatcctctaccaacaacaagactcgcccgagtcacgcctccactctaacctatctgcctcagagttccaactcacccacgagttcttccttcaggtctgcaacaagttcccttactcatggagacctgtttacaggttctttgagtttactcaaaccgatccacttttcaaacattcatcggtctccttcaacaagatgctggatgtcattggtcattcccggaacattgatctcttttgggaagtccttcatgagatgggacgtcgtaggttggtgaatgacaagactttcaggattgcattgaagaccttagctggggcgagagagttgaagaaatgtgtcgagttttttcatgttatgaatgattatgggtttgagtatagtgtggggactttgaacaaagtggtggagactctttgtgggagtaagctcgttgatgaagctaaattattggttttcaagttgaaagattggattaagcctgatggagttacctacaagagtttgattgagggtttttgtgatgtgggtaatttgatagaggcttcaaagatgtggaacttgatggtggatgaaggattcgagccagaaattgatgcggttgagaaaatgatggagaccttttttaaggcaaatcaatttgatgaagcgtttaagcttttccaggcaatgaggtctaagaggatgggagatttggggctctcaacttataggcttgtgatacattggatgtgcaaaagggacaaggtttctcaagcctatgcaatgtttgaagagatgcttgaacgagggattcaagttgataactcaactttgggatcactagtatgtgggcttttagctagaggcagagtgagtatggcttataagattgtggaagcgattgagagaccggatatcagtgtgtaccacggtttgattaaggggtttttgagattgaaaagagcaagtgaagccactcaagtatttagattaatgataaatagaggttgtgagccaattatgcatacttatataatgttattgcagggacatttgggaaagagaggaaggaaaggattggatccccttgtgaatttcgatacgatttttgttggcggtttggttaaggccggaaagttattggaagctacaaaatatgttgagagaacaatgaagagaggattagaggtacctagatttgattataataagtttttgcagtattattccaatgaggatgggattgtaatgtttgaagaggtggggaagaagttgagagaggttggtttggttgatttggctgatatttttcagagatatggggagaa

SEQ ID NO: 28386 - DNA, 2422 bp, Cannabis sativa
taaaaataaaaatacaaaatatcatgtcaatacaaaattttggttatctgattctcctcaaaattaaataataattcaagtgatcatctctaaacttatgcaagtgtgacattaaaaatgagttttcttctaaaacccaaagtgactaaaagtctaaactaattgcgctgtgttcagtaaattaatttatacccaaaatttccaaaatattcaaatatatctcatacaagtggcttgaccattattaagttcacacttctaaaaaattatcacaaatatttaatatcaccataaaaaaaatgaaaatatattactttaattaaacataaggattgcattttatatatgtttcacataattattaattttaatattcataatgtaaaatttttttgctttaacagttttgaaaagaaattaaacgaaaagagaaattttttaagtaaaacattttatatatatatatataaaaattgtggggcattaatattttaggagaatttacatatactataaaattgtgaaaagtgaggcacaataggagaacgactgtgagggagaatgactgtggtgcctttttagcatttctaattagtttattatatagttgatgattttttttttctttttctcggaaaaagtctcaactgcaccatttaatcaccaagtgtagagatactaaaaaggtgggacaagataattatgaatacaatttggataattccaccatcaaaagaattactacaagatgtagttgaagtgtatttagttaagctctatgactagaacattaaaatattttgaacaaatgcaaaaaacaaatatctttaaaattattataaagactaccaatttcatttaatacaatacaaaaatgttcacctatgattgaattgtgttaatttactcattccacgtacacatatatttttatatgtatatatatatcacttcatacgaaatttaaaaatgacactaatttttaggtgataattaaaataatataacttaatttgatgaacacaactaaacatgactaatctttatatttatttatttttgaaaaggaatatgaacatgcactatacgatgaagagtgataatttaattctctttaaaaaggtgatcatcaattagaaatgatcgtggaaaaagtcagcatgcatgtatataagaaaggaaagttaaatgctaaaggattttataattatataaatagatatctaggacatgtatatatatatatatatatatatatatattatagattgcagatacaatagattaatcacccaacccctttattatcaagcaaacttttacatatatatataataggaaggaaaacacgctcaaaatataactgattattacacatggtaaagcatatataacgtagtaaacacatatattatatattagctaggttggggtaggtagaacgtacgtacgaacttagtattatttttgtttattaggccattactaaagcaaccgaatcattatcatcattacggccagaagaagtagtgtcgtgatgtactgaggcagtcttccgcaacttaatattattggaagtttcataatttgtatgatagatgaagagagaaatgagaaagattatagtatggaccacaccgatgatagcgagcaacccaatccacatcttaaacgacgtgtcgtagatcctatttatggtatgtgcaatatgataaggagtcactatgtacatacccttgagaaaagtaagagccataaacgtgaaagtggcacacatggccatagttaagagccaaacgcaagtcttgctctttagagggagtcctccaattaacaaaagtataacgcttagcgaagctataaaagccgagctgttatatctaatgaattggagatagtgagattcccaggcatgagccagcaccgacgttccagctatacatatatttacgtcgcagtcaaagtaaacatacccatcgaacgccacgtggctgtttgaggtctcttgccagacgccacctggtgggttggtggccgtttgaaacgtcatcgttgctataacggtggccaccaccatgattgatcccctcatctcttttagccattctcctttgtagtcgtccaggcgctcaagaatccatcgatacgtaaatcgcttacttttcgtaatacccattgccttttcgattttctttctattctcggtcattggaaggcgatttacaagatccgacgctctctcatttttgcgatttaacgtacctttctctactcccccaagcgaaattaagtagtctacagtctgcatgtgcatgaataattaataatatattagctcatattaattatattgatcaatcccatgtataattcttccccataattcttattgttaaggaacatgcatgatttagtgttttgc

SEQ ID NO: 28387 - DNA, 2616 bp, Cannabis sativa
cgaaaactagatggacgatcaaaatgacatctgattcggataagcaaaatccaacaaacaaggccatttgttgacctggacgttgtgccccttaaactgagctcctagggttctatttttaataattcataggcttctcaacttgagggaagggaatcgtccaccatttctgaccattctgaattcaatagttgaatcagatttgacatttgagaaattgaaggtagcatcgtaggtttattgtcagcctgagcgctaggcctatcaccatgtctgcttaggcgttgggccttgtttctagggacttgggtttgtgattttctctctgagtttcattcaatcttcgttattttttatgacagtaaaaattctcggaaaagtttttgctaaattgaattggaaataaccaggttgacaaaatgtcaacctaggcgttgggcccaacctaagtgtcaacctgggcgctaggcctagcctcatgtgtcaacctcagcgttgggtcccagtttttccccttcaaaaattctatttggtgcccaaaaatagttgaaccttaatattttttgtagatgaagagatttccaaaaagtattcctgaaaaactctattttttgtggcctaggttttgaaattttcaacctatgcgttgggccttgtattttgtgcccaagaatcattatttttcctttaaaaggacccttttccccttttttgatgaagatatattaaatgaaaaagtagagtatttgattgaacacttggaaggagccaagattaataaattatcaacctattcgcctggtgcttgggaccttgggggcattgggtgctcagaaatcaacttattttgattttgattctgatgcctcaaatatatctgtggtatgtctagttgatgtgccaattttcattttcaccaatatgcactaagacggccctagaaattgaaatcctagggtgaatgtcaacttgggcgctaggtgaaaccctaggtgctcaggttggcttctaggttgtagcttcatgtaatttcatctctcgaggattggattaggtttctccatgtcttcatggtacagaatattgaaagatagtcagttggattcatgttatggatgtctaaaattccatccaagaattcttgaagtcatcttggccgtagggctagggactcctcccaggtcgacttgttatgaatcgggtctacttaactctgagatgtcatctttcttgtcacgtgtgaaaaaattatgtccatgtcatcaaggatacttttggtgtaagcacataccaccctcttcttttggacaaaacaatcattgccaaggactccaatgcatccttttcttttttgaggaggacgcccactagaaagtcattgcaagagtttgtatttctttaagagcacccttaaggagccaaaaataactcattacgtaacaagaaagatcctgaataattgctttaagaagaatctcaaggccagcttgcgagaaaagactagctctccaaccttaaagcatggaccacactgtgtcaggaaagttagcaaaaacctcttctttattatgccccataaaagctggcagtcccaggttcttagaatgtttttccacaaacttcacccccgtctcagtggccaaatgcatgcctaactcatcagagatacgacacccgacactaggcttagacttgaccaagttaatactttgccctgaaagaaaggaattaattcccatcaactctttcaaaatcgtcccctcctcttctatataattaaagaataccaagccatcgtctgcaacaaaaaaaatagatgatatatggacagccccatgcgcctaaagagaatgtcattaagattgtttcttattttttcctcgtgtatcaagcaagaaaatccttcagtgcaaataagaaataaataaggcaagagcatatctccttgttgtatcccttttctttaaatgatatgacttcttttttttttcctatttagtaaaatagaaaaggagaacgatttaacacagtgcataatcttttgaatccattccccctcatacccaaggcacaccatcatgactcttaaaaagtgttatttcatcctgtcataagccgtagacatatcaactttgagagccatcttttggccatttacaaacttcccttttttcatacaatgaagaactcaaagcctaacatatctttatcatggatttatctccttcggataaaggtgctctaatatttcaagataaccatactaggacacaccttaatcctactagaaggacatttcgaaatggccctataagctacatgaaaaagacctagtgggaaaaaattcaagaccaaagctggtttctcttttttcaagataaggcacatgtattattcatgactacagttcgtgccatcattaaaacctccatgcaggccttggtcacctctgaacgcaccaaatctcaatgattttgataaaaaccccaaggaagaccatctttctgttaggttttgtgtcctaaataaaacatataccaatataattagtttaactaattaataaatgatcagaaatcgttttatgttgcatggttcacatatttatttcatgat

SEQ ID NO: 28388 - DNA, 6521 bp, Cannabis sativa
  modified_base (1973)..(1977): a, c, t, g, unknown or other
tttaacatagtattatataaaaatatgatctattatctaattcaatataatacaatacaacctaatacaacattccaaacgagccaaataataataaaatttcacgctgctagatacctttaagttttgagaaatgttaaaggtggtggaccataagaactgatatacttatatttcgtgtaatttaatattaaatcccatatattttgatatggggtatgtttagaaataattgtgtaattacaataatatattaattacattatattttttaaaaaatattattattatatcaatattaccttacactttctataagtagtgccttaccattagttagccatattttctaaaatactattttcttatgttatataagacttaatatttaattataccaataactctacgacactaagaaggtcttaaacaacagaaatgcctattagcaattcttattttaaaatacaagatgtattaaaatatgatgtgataattacatatgaattcttaatctcttatttgacgaatgataatttttattacttaatatttaaaataaaaaaattttagtaattagaatgtaactaaggtctctcaattacctccaattacatgtaattacacaaatacataaatgtaattactttcaattacacttaatttcaattcgaagaatgctaaatggtactttacggtatcaagcaccataagaagtggtatgttattattggtgcaaattaatatcggatcccacataatttaatttaataaataatataagaaactattaactaatcgcaacacgctatatcagtatggttttcacatcatattatgcttagtaacaatacttttcgatttctttttagctttccaaacacatctgttataaataatatgaaaaactgctaactattggctctatacaaaatttcttattaaaaaaaattctattcaaagctattatgtccaaagtctaatatttgactttgtccgatataatatcataaacaatgctccttaacttttaggtgaggctggtttttggctgtttgattagttcttaagattctcgtgtgtaggagtttcagattctggtcaccattacaactaagagtatttgtttgcacaatttattctccgttactatagaagcagaagcagcccactcatttcatcatttggtataactagttgctcatttaagaacgaaattcgtatgaatttaacatagcaaatcttattcttaccaaaaaaaaaaaaaaaacatagcaaatcttttagtacactactaattaaattattacatcataaataaattaaaattaagaatatatgtttgcttttttaaggtggggtcgacaacaagagcctcacatttgttgttgtaacccaaagactgacagatacaataataattatttatatatataaaaaaaaacctcaccttcttagccgccgacccatttttttttttccaatgttcagctgagatagctctcccctttgtttattatgcctctctggtaattctttccctccctttaaaatttgcatctgttattttactcgaattatttttactgttaatatgtcaatgaaattcatttaactcccattttaaacttttgtttctgctaagaagttagctccacgtgctgcaaaatattacaagaatttttaatcagatatttcttctctacaaaaagaactgaaaaaaattcatactttgctttgcattctgtttcttgaagttgttataagtcaagtcagtttgtagaattcccaatatgttattcctttttatgttatgttctttgaaaagcaaagcatggggtttttcttttggtagtgctgatttcaggttctgggtgtttttcttatttatttattgaaaacaaaggtcttattttgtatagattgttttattgtggtttgttatttctgcgtgtaatatatatatatatatnnnnntatttatatatatatatttatattgtatggctgtgtataatatgtttataatcaaagaactcaacttaagcttcttcattgacacaattgaagatcaaatttatatcttaaaattttatatgttgaatttgatgtagtggttctttcttttatgatagactgaacttacttcaagacaattatgtgattgtttgttttaatttacaaaaaataagaacaatccaaaatttccattcatttactggataaacttgatagaaatcctcagcttgagaaagcttttaaaatgtagacttatatctccattaaaaaacttccttagcatttgataaaaccattgattgttagtaatgcaactaatttactattactgatctactttcattttaagtggttggcaaatgggtatattggtcaatctaattgtttaatttgcatattaagcaattagaaatagattggttacccagatatgatttttcctttgaataaaattggcaattattaccttacaaaaaaaaaaaatggcaattattagaatcttatagttaattgtagtaagttttgaaagttaagtgatttagtattaaagtaatgtttactttttctcattaattttgattatgtgcagctgtttatattgaagctaacaactttctttttgtattctttctgggaagatatataagatatgtaattcatattttctgcacttctatgaaaatcatggtctagtagtctacctgaatttctgtttttctatgaactgtctgtttcattgcccctcttgaagtaactacaagaaatcattttttcttttgtagtactctaataatgaacaaaactggaaaggacactttaacaccaatcgatacttcatttgcaaagctccctgatcaccttttggtagaaattttcattcgaattccagtcactgagtgggcacaaatatgttgtgtaaaaaagcagtgggcaaaccttttccggggagaatgcttgtggcgagctgctcttgacaagagttatccttctgctagtcaagctaaaaggtggcctggacctataccacgagggttgagccaaaggtaaaattacatgactcctcactatttttcgtaatagtctcttttcttttcgtaataatattatatgtcttcatggttttccagatttcaattctgagctaacatcttattatatattcttttcttttaactttgtatggattctttttggtgcttataaatattactatagcttttttcttctttctttcagagaaaataactactatagcttacaaaaccttgaaccattattcttcatagcctaaactcttcccatggattgaattattagtatacccaaatttattgctattgttcatattgacttgtttgcttgaatttaattgagctatagttgtgctttgcctttgacaatctaatggtggactggtgatctttcaccttagtcatgtgtgtgtgcactcatatcttaatcatttaatgagaggtagtggattgaagaagcattcttttgatgtatgagttccccttcaaaatcacttggtggtcttttattcaaatgcagggttattgtgtataacaatatggcaaattctaaggttcttgcgaattcacttaaatctaagctcgtgtttttatttaaattgatattgacaagtcttacatgaagttgtgttcaataaagatgaacgtgacaagttcaccacattgctactctatgctgtttattaaagaaagtatagaatatgcaaaacaatgaatcataaaattgtctcctcttttgtaactctgtattttgtaattcatgttgactctattctactgaggttgtgtcaaatatatgcattttttttttctcaacaaatatatgcatttttgtgtggtattgtacacacttatgctgctaaacacctaatatattttaaacattatgtaaattgaactctttgacgatattaatttgtcgaggcagcaagattctaacctccacccaattttctccaggagatatgcagctctgtatgttagcagacacatattttctcttgaaggagaaattgatgagattgtgggacatacttatttgtatttaaaagagcagcttgagcgttcaaccgtttcacctccttctggaatacttcatggaaccataattggtgtgttttgtaatttcagtttcaattttcttattcgatgcttttaattttataattgaaaatttcaaccaatttcttgcattttgcatctttttaggcaccctttcccccatctgatgtgtactcctattgaaaattatgatatcttttaattgtatgttatgcgtatgtacagaaatttaatagatttacctatcttgatttatgtctcatctaatctaattcattatgctgatattttagatacatgtgagaatacttatattactccattatgtctgtgcatgcccatctaatgggaaagaaaaacttggctacaaaatggtgaaattacacagttttcaattcagaatggcagttatcatttagattgtggttgcttttgcagatcagtttcttgcttgtggtaaatcaagggatatggctcatgagcttgcttctcaaatctggctggccgttgttgacaatttagaagaaaatgaacatacatttctgatacttaaacgtcttgcacaagaagccgatgtaagtcacctatagaaaagcttccatgaactgagcatattacataaatagaaatatcattattctttttctataaaatttttagaatggttaacaattttaaaatatgggatgcacatgatcctacattttgctacatgggccatggccgagtgccactgtggtgctaaatatcctgcagtgttcttcaacaattaaaaaatgaagatttataggaacttttctgtaactatttgtcattatcaatctagctgttaaatcctccctcatcgctatgtttcagcaggttttccttccatatccatattcaagatcgatgaaggtccaatggagggtgtttgagaagctcctcacagatttccgtgattgtttcactcatgtagattactatgatgtattgacttgtgcgaagagcaagtttcagccaataccgtcgacttggttaggttactagttcatctcagataattatccacttgacttgacttccaattgtaattgttacattgtagatatcaatatgcaacacctcttgtctctgctcatttatcaagtgaaaagaagcttgaaattcccataccatgcctgtgatggatcaggacttaggagcacaaagaactgtatattttaaactgttaatagttgtgtatgattttcaaaagtgtacaattgtaagaaactaattacttgatttcaatgttgtgacagtgttagaactgctgaaagaggcagcagtagagaaattttgattaaatgtcttccagtacaactacttggttgatagagaaattctattaataaataatttataacactcttgatttctctggataatgctttatggacaaaactaatctaaattggtaataagaagccacaaatctgggtgacaaataaacaaaaactaagatggacttgggttgttttgtagcacactatggggcatgtttggtaattgagatagtcacatgtttaaacaaaatttgaacttacgatggataataatgttccatgatcaattttatttgtttatatggagatttttattgattgatttattagatattaaatttgagtgaaagaatgattttagaaaagccctatgaatataccacctaaaaaaagacttcatgatagtaattatggccctcaatactcatcaatgatcgacagtttttggctcatcgttattctcgattgtgaagatgttattgactatgaaccaatattaggcttacaccaaggaatggaaaagcattgtggaaactcaaacaattatacaatatcttccccatgtaacttgttgagatttttagctactatgttcactgaagtaatagttataaatggatcagaattgttgcaaaatattcaagtacctataagaactagctacattagaataattatgttggagtttgcaagtagggattaaagataacccaatccaatctaatacttaccaaaccaaccctcttaggttaaatctgaaaaagtctagttcgtttgtggcagacaagttgagacaagctcaactgaccaagaatagatacttgacccaacctagtcccacatatatataaagacaagctatgttatggcctcaggaccttttttcttttttaaggggatttgaggacatggtcaacttatgatgaaactccactgaaatccaatataaatctgcaaaagttctagaaattttgctattaggaatagaaacctcgaggagtgctaatcacaacttaatttacaatctcttgtcattttttaaacaatgttgatttatacttaatatctagttattgttataaatattaataattatgtggat

SEQ ID NO: 28389 - DNA, 1936 bp, Cannabis sativa
ttataataatatttagctcctaatactcatatattttaggagaattattctatatattattttttactttttttttaaaatttacgatttgtgttgttttggtagttgctcaagtggtttttatataagttgttatgtgaatttcggttacaatttatgttgctctattggttgttatgtaaatttctatgaaatttgtgtaaaaatacctaaaaaaaaaaaatattttaaggtataaaaataaaaaaagaaaatctatattttaatgtacaacctttaatatatctattaaaatgagtacataaccctcttgtattaatgaaagaagacaagaacaacaacaccactactgactatatagaattatataaatcttataagaaaaaagagatgaatattgaatagatatacatagatggatatatatatatatagaatatatcaatatcatctgagaaatattacctgctgctgctatatatatagctgtttttttttttttcattgctagctgtcctatcaaatctagatctctaccataatcatcttctttaattttatactccatattcgtcaactgcacacatcagtcacaaaaaaaaacccttctgatattgctgatgtatgagatagtgatcatcatcatatattttattttattaatttcagtatatatatatatttatattatagcttttccttttttcctggtgagtggtctcgtgtgtttgtagttatatggttttttaatatttaaattttaacatcgatcagttggatcagttcagttcaatcagttcagttcaacctcaaatatttatatatatatatatatacacaatatatgatcatcgaggcacgcgtaatttgatggttgacgttcttcaacttaattatatgtacacacattataacataaatatataatacaataagtctgaacatatatattatagtaatatcagctcaatattgagttgagctttttgttttgtgttttgtttttagcaatatatattgataaatataatgacttaattaaattatttatttgtatattaatattgctatattacgatatatatagtaggttaatttgtacgtacgtacgtaggtattatattattctactatataatatctcataatataatctacgtattctttatataaataatatatttaatcatcaaacattatatattgattcgattcaaagtattcattttaatataacaactatataatatacatacaaaaaaaagggttaactaattattgtaaagtacttaatcttatatttgtgcttaattatttaaaccagttactaaaatttcttgtttcctctttttgaggttgtctactatatagatagacgtaaaatattggtcggaatattttatcttaattagagaaataaacaaatgaataagtataacttccaaagaatataataaataattaaggtttttattgtccatagcttgaattgttgaatataaagtaatgttaagataaggtggataagggttttatctcaaaattaattgagaaatatcctattcatcttatatatgatattattttttcacatatatacattagcgatttgaaaccgattctattacattgactgaaaaatctcaaatggagattaaaggttgagaagtgaaagctttttattaactgctgtgatatattatatatgttggaatttaagataatgtatatgttgtatttcaaaactaattaacaatgaaaatagtagcaattatattatttttttacaacaatgtgagactaattaatatatatgtgtttatatatttctctaaacacaaaattataatgtgactgctatatactacttaaactgcataattataattaattaagatataaaatgatgagaagagaaaatgtagatatatatata

SEQ ID NO: 28390 - DNA, 2096 bp, Cannabis sativa
atcacttgcccgcgagggatatggttctggtaccatgttagaatttgggataagatgaatgaggttctatctcaaaaccaattgggcaatgtgaggagtagctcattcctcttatatattctattacctttccacacattagcgatgtgggactatctaacatcccccctcaagatggtggctattttatatgctcaccatcttggacaactcgatcataaacgactcttttttggctcactatccctgatcacaagtagctcttttgctctactttttggattggtatttttggattatttttggttgctcctctttttttttttcgctcactatcccccaatcacaagtggcattttttttacttttgcctcttggatgcctcttggatcagttttggatcagtttttttttggatttttggtggctctttttttttggttctatttcaatcaggtttttttttgggttggatagtcgctagagatttttttttttgtttttgctctgataccatgttgaaaatcatgaggttccatctcaaacccaattggtaataggaggagtagcccatgttcttatatatggctcaatactttaccatttatttcatgtgggacaatgtccacaataatctcagagttcacctaacaatggctacgtctccgtcaagctacctcatagtagtctggtcttcatttctaacaaatccaggtattacaatgtttagattcaccacagataccaaatcacaagttgattggttatgtttttcgttttctctctttgttttcttttgattttctctctgtatgacttcctctctttctttttttctatacatgcaccaatgaaactcttgaatggacttctctctctctctctctctgctttctactctctcactagaccagctctgagatttggaaaatcatttgaagcttcaagtggcctttctgatcttagctttggtcttttatacatttgtctagaggcgatacattaattttggactggccaatgttgacccaaactcttaagtctccttattttaatgattaacaaatatattattattattattatttgtcactaatgagttgatgattttgtaacaaaaattaaagataattaagctttttaaggcaaaattaattccaagggcaaaatggtaattttactaaaattcttgaaagtggcccgaagtggattctaagactcaaggaactcaagacaagactccatgaacattgttcacctttcatagtctcgtacagtgatttacatgtcaacacttaacattttttaagtataaatttggctcactaatttgtgcgacaagttatttcataaaaatgatatataaattttttaaattgatttttaagatcacatttcattaaaataagataatgtaattagactttttgcaattggataaacgagaaaaaaaatatgcaaaaaatggaaaatttgcccctataagccttctggaattctggttgtaaccactctagaatttcgattcccatccggtattttggatcacgatagattacacctagaaaattgtgctaacagctataagcgattatatttcactccaacactatataaactcatttttcactcaaaagttgaggttgattgagcatttaatccatataccaaacatatttaagtaattttacaggctcccatgtttaaaatccaacaaaacatttttcacacactttgagccaaaatttgtatttattttatctaagtgtgcttgctaatcactctaggctcttcacttttgtagagtgagttggcttctaattaaaaacacacatttatattattattgaggtgaagttggcacctatattgtaaataaatcggttagagtgagattggaactttaacaattcgagattgaggttgttagtccttggcggtgtaaaactattgtaagaggtttagaaataccttggtgaaaatttctcggttgtaagggttagtcaagcccgttaacttgactcgatagtggaattcaaagtgttgctccaaaattcgcccaaaatacgtggaccagtcaagaggggacacgtgga

SEQ ID NO: 28391 - DNA, 3243 bp, Cannabis sativa
  modified_base (1919)..(1920): a, c, t, g, unknown or other
  modified_base (2045)..(2045): a, c, t, g, unknown or other
  modified_base (2092)..(2095): a, c, t, g, unknown or other
  modified_base (2353)..(2359): a, c, t, g, unknown or other
aacttaaagtgtcattgagaatcttaatgtcattctatcaggaaatgtcaaggatttatttcgtgctactcaatttagtaaacatgtagatattctttcgtataaattctaccctcaagcggttcatggtattcttttaagagaggtgcaacagtccaatgcgaagaaattttgggcgaacattcttagtcgttacattcgttttagagttgaaaggttcactttgattatcagtttggatagtatgggggatagtaataaaataaatttgactcaagattcaaaccaaactattgacacttatgtttcgcggtgttaaatagatcactcaaaaatctatattatgagaattttactatatttgtttgagacattgtattatatgatatttttaatttttacttatgcttttatacatattgttggaattataacaaaatctgcaactttaattccaacacaacttcaaagacaatacaatagtgcaaaagtgatatttttcaaattctattattttatgcatccacaaaataatatagtattattaaaagctcacacaattgtaaatttactttcatcccaaccaacaagagttacaaactctttctattctttttaaaggttcaacccaacaagcaaaaccaacccaagaagaacatcaatacaaaccctaattctatacctagtatataatggcaagtatcagatattattctcaaaccctaaatatctcttcctactgcagttgcacaaatagaaaaaattagggttagggttttggatttctttctcttcttcttcttacagtcacagtaggatttcgggttctaatagattcttgggttttctaagtttctcttgttctcttctaaatggcagctagggttcttatagattttgatttcttcaaactttttctcctcttgttctacccgaaataataaacccagaaaaccctcacgcctctcagccagagactcaccacaccaaactcaaaaaaaccaagaacaaaaaaacccacacaaatacaaatatcagaaaattaagagggagattagagaatacaaacagtgatgaaagtaaaaagaaaatgccagaactttgatcttggagttcacccaatgttaccggctacttctccgtcaagctacctcagagcctgactccattcatcaacaacagattacaaaattaagtttgatcttttacaactttgatttttatcctcttattttctctctttgaaactaacagatctctctcttttgtttttctttacatgaacatacaaatatgcaaactctctaggaggaactctctcaactgaaacactctttcaaaatggctatctatgttaccaaattaaaggaaaaaagtattttttaaatagactaggttctgtgaaaaaatactgatctagggcagagccctagtgacttatgttgtaactcaatttgttgtaactgtctattctatgatcttgatcttgtgtttctattgtaagttgtagttgcaagtagtgggtaaagttgtagttttggaacacagtgaatagtaatcagaagctttgggtatataagggaaactattccaaccaattccacccagattcttatgtactcaaggatagtaaatttagatcttggtaaaatattcccaacacggtaaatttgtccctacgcgatgtaaatcatctatagagaatctttgattatttagataaaaataatggatatttaatagtgtatctatatttggagcatatagagtgttctatataattaagtgtgcaaatctgaatctatagtagagttaggaggaattaataagttaggaaatttacttcataaattctaaactacttattagaagcttgattatataggctcatggtcctcacactagttgagataatattnncttgtagactcggttaattggtttaaattaaccaattaaaattctaaattagactacatcttatttataaattttcactaaacaagggtttaattgagaagaaaagaggttttagggtttatttnttaattaagagactttgtaaggtcaaattaataaataagttaaatgnnnnttttatttgataattaattattaatgtaaagacctaaaattaaaatatggtatttgtaagagaaaagataagttgttaaaataaaatgacaaaattgaaactagtggggcccattatatggccagccacttaaggagttttttatagccatttttatcttttttaattccatataatttaaaccctaaccctagaagaaatcctacaaatagaatatgagagaaattgaaaagagaagcttctctctctctctctctnnnnnnntctctctctctctctctttaaaatttgaagttcttatagtgttagagtaccttgtccactcatataaagttagtactcaattatagcgtggaagattgtgaagaattccaacacctaaaggagatctaggttcagattttgttattactctgtgacagaaaggaacaagagttaaagatctgaacggaagatccataatattctgtttttatcgatgtaaggttttttagaactttatatgtgtttaattcattattttagggaattcatatttaggatgtattagattataaaatataatcaaagatatatgttggtaaatctagatcatgataaaacaacttccaacaggtccatagttcccaaattgccaccttgaaacactgtccagggtagggataaagagttgtataaagaatttgaagaaaatctattttgaattggcaaaatagtaattatttattttttgtaatcaataaataattttttaaattaattaaatagggaaaaagataatagttgttgagacaaaatttgttgagactagatttattaggacaaaagttgtcaaaataaaagatacaaaccttgttctaaagacatcgtaggcgcctaggcttagtcttgtcccttattgatttatctttttgtaataattaatttgaaaagtggttaaagatatttcaaggttgttgagatattctctcataaatatcagtaaccgaattcgattatagatagttatttattcaaataattaaataataatttaattaaaggaatttaacttataacgtcctcgcttcaagcctccattaggcccttacacccatggaataatggctcttattgttgcaaaaattattaattactacgcaagtgca

SEQ ID NO: 28392 - DNA, 1541 bp, Cannabis sativa
caatcttattagatttctgataactttcaaggacctttttcttatgattttttcgtctctttttttaatctaacttgcccctatttataatcacatagtaggcattaattacaaagttgactgtaatctttacaacatttattccctaaaattgtggggtttgattacatatcatgtagtataaatgctgttattatttgaatatcacacagttgtgatttacctgcttttactaggtcaaaaataatcgtgtattcaaacacattttaattcttggcgctctgggatgtgtcgacgagaactcaataccaaagaccttgatagcgagctggagcttttcccttatctctccgaggtcgacaatgtacgcctctttccttctttgtttgaaggcataacacttcatttttgacagtcacagttcttattaacagagagtacttcaacagttacttgaatgttaatttttgacttgctgagactataaatctcaccgaaagatgtctgaagttgattggtgaaagttacagggatgcaccttcctatagcgagataggtgccttgcttattaagtcttgagtcgatctaatcattatacttaatttgtacattgtacgctaagtgtttttacagtcaatatgcattgctttcgtcctcccaggtgcaatgaagttgatgtcttgccttatgcattcaatgctgtatggtttctcgttaatacacaaggcaacaacttttatgactttacctcgcataagaccttatagtcagtgagttgcaagtatactctgttatatacgcaattaatgagttattccattaaaagtgatttcatcgatccatatttcccttaacttgacatgtatcctctattgagatggtagctgaaattcgggtgtaacaattgccccttaaaatgttcttttgaataaaaagtgctttttaataattacagagggcattttcatcataattcctttttttttttggaaaaacacgtcctttgattttggcagttgtacggtttcaagggtcaatatgaacagtcttttcatctcctatctcactctcagtcgttagatttcccaacctttggcctttccgtttattgggttctgagtataaaatggtggcctaggcttgccatgttccagacggtcctagttttcgatgagtttcatcttaaaattggattgttattctcttgttaagatgtcccatccaagttcagaaacttatcctcgaaattcgtaccacaagaatgcaccaacaactttcctctgtgtacgttcccacgaacttcaaacctcaatttaaatttgaaacgaaagattccaaggctgaggatcttctgatcaatccaaaccaacgagatgccattgattgttacaggcgatcctcacaagagatttttgagggtaagtatcatccctcgtgtatggtggtttgacttgggttatattttttttatctccgtctccataggaatggacatagattttgagagccagtttagaggtcctcctcaggctgacaaggaa

SEQ ID NO: 28393 - DNA, 2289 bp, Cannabis sativa
  modified_base (2229)..(2242): a, c, t, g, unknown or other
tagagaccatctagtcactttggtgaagaaaccatatcgaccaccttggtgaagttaccatctcagacaccttcgtgaagagaccatctcgacaaccttggtgagtgaccatctcagccagcttcagttaagtgaccatctcggtgatgtgatgtaaccaacacttagtgaaagttctctaagaggggaaggaaaggattgtatgaagaatgaaaaggacaaggcaaggatgcgatcgagtacacatcatggttcagctatgccacttgtaagaccttgaacaagaaaacaattgtgagagagggtacgagtagtgaagaggcctcacctacatgccctaacgcattataaggggtatactgcaagcactacttttacatgatgggaccacataacacccaaaaacctccacttgaaagaagaccacctcctgcatcctaccacctgtaagagtacaacgtcctacttgtgcctttggggaccacttgtgtatattaggccattagagcatataaaaaaactccattcgcagtttgagaagggggttagaaaatcattgtaatcacaagcatatgtgagcaatacaaaactcattttttttctccattattgctctgaaaatatttcctcaagctttcttactttcattattattctagatttgctatcttgactttaatttttggccttaaattcgtagatgagcagatccaaccattaatatcttactgccatctatgggaagaacaagcttacaaaacattcttctctaactcaactaggactctaagcatgccaaagcaagctgaaaggataaagacaatgtccaataataatctagcaaagtacctagagaaaagcttcagcctcctcgtgacaagaaggtttgccatggtaaactatggtaaaccatggtccccaccacagcaaaggcgacttcaagggaacaccagaagggtgaccccatgggacatataacaaagggaaaccttggaccattttggagaaagtccacctaaattctactaaaccaaatattggggcaatctcctacatcgaaaaaaaagatcttatgttcttgttcaataaacagtaaaatgcctgaaagaagaggtacaaaatgcaagggtggtcaaattggctcagtacctcccaggaaggacacttgaatatggtatcaaatgataacaaagttaccttccagctcaagaaacaaacgtccacatgtcctacgagagacatacgacgactcttactcagaaaattcccctcgtaattgggatctcactatgtccaagggagaacccctagtaatactcaccccatggtggcaaaggcaaggatagtgcacccatgatttttaaaagggcatgtgggcaaaaaaaatatccctttcctaagaaattcgacctcaaatgaccaaaatggtttccagcaaaaagaagcccctgaccttgtttgtaagaaaaagctatctacgcgccaaggttccactcattggagctacctccagtgaagatgaataaacaaccgtgcaagctcattttgccacatgcaaaaagcctaaagatggaatgtaatacacgaatatagttgggtctacacagatcaccgcgatgggcatgcccaaagtatgagatccatgattaataaaataactttctggcttggtagacaagtgttcacgtgactagccaacgacatacaaaaacccctactcagaagacgctcaacgcacaaggaactatatagaaaccaagggaagaccctcgataaaactcaccccacgagggcagaggtggggatatctttctcagtgtaatgaacacatatttaaattatggattagttaaggcaattagcattaattattgatattttatgaatttatatttattgtcggccccattttcataaatgggcattgttgttgtaatttctcattttcagagattttattaaactctaagtgtactatttagaaatctattaaaaatgggcattggagttactactccgacatccattaaaaatggacttttcgaaataggattgaaagcagggggcaatcgactatcaccaatgtgttgtacttgaatgatgatactacattgcttctgggtgttgggtttcatgccctaaataaaacctatttcaatataatcaaatttactaattaataaaagaccataaattattttatattgtatggttcacatgatttatttnnnnnnnnnnnnnnatgtgtaaattctattaagtccagaacatatataaacatgtatatat

SEQ ID NO: 28394 - DNA, 1394 bp, Cannabis sativa
ttattattattattattaaaggctaagaaatgaaatgtatcctttaatttaaaaaatggcaacaagttcagcttctcccaacacatgcccttctattgcctccaacagcttgtccttcgtaacctaattaataaccataatgataatacacaaaacaaaaaacattcaatctcttcactcataaattaaaaccagtaaccaaatcaattaaatcctaattttttttaattaaactgatgtaattataatagggcgcttacacatttttcaaattttttgaatatataatttcaaaaaaaaaaaaaaaaatctactttataaataaaaaacaaacatgaacatatatatttctttattatacatctaatttaactaattaataaaagtgtactgctcattgagaaattatacacatatatttctctattttacaaccgaaaacttaaaaccaatttctaaagctggatagacaaaaatttaaattatctgcttattattaacaaatattaaaatcagctctattttgtattattttaaaaaattaaattgggaacttttaaaaaaaaaaacatacagtatttacccaaattttcataatttaaaataaacaccctaacacttgcaataagatcacttaccaaatatgaaatacgaaaaaaggatcacctaccaaaactctaaaacaataaatatatatttataacttatattgatatatatattgtatataaaatatgacatctaatatttttaagtctaattatatattaaattatagtcatccaactaaataaagtatttctagtatatttattgatttaatttaaatttatctttgttcccaaaaaaaaaaattgaatttatctaatattcaaactcagtatgtatgggatcagattgtaattaaattaaatccattaacctgatgtaatgaaattttaagtttaatcgcattttttttatttaactttaaaagtatattattaattaactgaatattctttatacacacaactcatcaattgaaaatgcaacgattgagtaccatatctcacttaaaaaaaaattcaaaagaacaaaattttaaaccccatttcaaaaaaaaaaaacaaaaaatacataacataaactagttatatatttatataaaaatatatataaatatataagtatatgtttatatgaggaatatatatgtataccttgttgccaagatgaactagatcatccaaagcataaagcttaaactcaaagcgatgagcatcactatgaggcaccttaggtccacgccacccaggaagtttggaatcgttataaccctcttgaaccgacgcatagtcttctccggcttccccttccttaccggagaacccctcggggaggcccttgagggt

SEQ ID NO: 28395 - DNA, 2669 bp, Cannabis sativa
tcaatatttgtctcacattaattgttaaaatattttgataattattttaagaaattaaatcgggtagtaaaatatttggtaaatcaaaattagatcataattataatattttaaattaattattaaatatttttttgccaaaccatgtactgttaatgtaagcgagcaaaacataggttagacgatgagctatctttgttcgaagagattcttgtgctctcctgaatccatgagcgattctaatcactaagccaaaaaaaattatcaaataattaattatatattttataaatgaaaattaaatatttaacttaccaattataaaatattctaataagaaatacgtttgagtctacattatcaaattaaggctacttgtctaaggatattcaaaataaataaaaaataataactaaccacaatcaaaagtatatttatgaaaaattaatactacaaaaaaaaaaaactaaaaaatattctaagtaaaagcttatctttaaaaacttaaaccaaaaagtaaacgggtaaactggatttcgggttcgcgagtttctggttcaaaaaattgtacccggacccgacccgtaaaatggtttgagttcacaagtttcgggctcgcgggtttgcgagtttgggttgaatgggttggccgggtcaacgagttgaccctatcaactcgataattttaaaaaaaaattatatgattttttttctatatattaaattaagcatataagttataaacttataacaccataatctatatttattatattaaataaaattaaaaaaaatgcattaatttcaaatttaaaatacaaaaagtcaagttccaaactatttataatatattatatattgttatttttaatatattatctatgtaataaaaaaatgagtagattttagattttttttttatttatgaaaaaaaaattaaaaaaaaaaggtgaccgggttagcaggcaggtttgggttcaacccgaaacttggtgactataaaaaaccaacctgtgaacgtccaatggtgtatcgagttgaacccgatcttcccaaacagaacagattttttagaatttttgatttgagtgggtcgggtctgaacggattgacccaaacccgatcaaaatgttcattcttatcaaaaagtactgagatgaattgaaaaaatgttataagatgagccatgaaacataacaggcctacattataaaagtctcaaaaactacaagacaaattgtcaaacatggcacaaaacaaatatgcaaaagtctttttttttttaaaaaaaataatcgtctattaataagaaaattagacctcgtggtcactacaaaataagtctttcagaatgtgagaaataggtaagcaaccaaatcgattgtgggtgaaggtccacttagccacattataggcaataaaattacaggttcttagaatacacaaaaacaagtaacaatcaaaatatctagaaagctctaaacaacaataagagtcgttctcaatctcccaataagacaaaacacagttgagagagttgatcacgatcctagagtcactccccatgatgacgaacttgtggccgttgagctttgcgatatctagggctaagcaacaagtcgctgcctcaccacagagagcatccgcataatctagtctagccgaatgaacccagaccacctcacccaaatggtttctagcaaccatagtaatacaggaactacccaaaccaactcttacatcacagttaagcttcagccaatcctagggaggatggtgccagtattccgtctaggtcggggtcacagcgggtaataaagtacctttcaaatttacaaaaacacaaagggtagagtcaatacgattgtccaagttaagaaagcaattattgtggatcttttcattcctagcatgccatatagtatccactacaactaatgcataaataaatacttcctcagcatttaaacctatagaactgagcctccacaagaacttgacccaatcccagacacaaataccagaccagtaacaggataaatcccccaggggacaatctccaaaagtgaaacgcaaagttacaagaaaggaacaaatgctccgcagattcctcttcccctccacataaagggtagttcacttcctcaatatgaaatcttttcttaatgatggctctaagagggagggcattcgatagaatgcaccaccaaatgactttgtgtctctccatgattttactgttccaaagtctgttccaagaagaaggggcaacatcacaactaggaactctttgtaaaatctgaacaagataggccaacttgcacgagaaccttccattaccatccttggcccaaatccacttatcagaaccagaaagatatgaaacattcacaaatagttgtcctttatctacggatcttggttgatgtcaaaaacaagcaacattaattttataaattaattttactctaattaaatgatatttgtgcttctgttttatacgtagaatttttttataataatgtatattttagttataataaatttataaattttttagaaaaacttaaataatttatagttttaaaaatatagttcaaaataattaattctattcattagggtgtgcataaattgatccaatccaatgagaactgaccgatccaatt

SEQ ID NO: 28396 - DNA, 1914 bp, Cannabis sativa
  modified_base (439)..(445): a, c, t, g, unknown or other
ccaaaaagcaaaagttccatctggaccgaatccgcgaaccccaccaagctttcatcttaattaactatttgtaatctttattattctttaattactacgaataaaaataaagaaataaatttgattatatttatttactttgttttctttttctttttcaaattatgttttttttttattcttttatgctcattagaatatatttatttttggtataatttcaaaaaaaaaaatgcaaaaacaacaaaaaaaattacaaaaatacagtatgtacgaaattttcaatatttttttaagttttttagattttatttacataaaatacggtattttactatattttttggttgtactcttattattttgttattgattttttgttatatgtatattattttgttgttatcttaatattattttttttgtatttttataaaannnnnnnaaaatataaaaaaaaaaattaaacgtaaaaatataaaaagtttacaaatattaatatttttatgtaattatctttttatttttcggcaagcttttcattaattttagctcgtgaaatgtatatgaggaacaatggtttgaagtccatttttattttatttttcattatatatgtatgtatatatatatattttttttgttattagttaagagacaaaatatatatacaataacatccatttaacttaaatgaaccaatcgcatttgaaaattactactataatccatttacatactcaaatcaaacttaaaaatacaataatcaatatatattaaattaattaattttagattatagatttcatactattaattatgtaaaaccagataatttttctcatcaaatactattttttttctttttctaattattaataaatatttttttattgttgttaaaacaatgtgtcacattatttcaaattcaaagatggtacttgcagccactagatcaaaatggaatgattaatcaattgttaagggatgaatatgaagcacaattgtactaaaaatttaaacaataaattgtttattatataaataaaaacagaaatgtatacttcgagcattttgaatccaaaaaaatctcctaagcaatgttgttagtaatctataattaatagactaaatatatgtgtgtaaagtttagttgaagcagaattataaacttttttaattaattggagtttttcttttaaaaatcatattttgaatttttaacaatttcgaaagcataaaaagaaggttaataattaaaaaaataaaaagactaagaaacataatcaaactttattccattataacttttacatcataatatagaagaattaaattacacgaaccaaatcttaattatttaaggttgagaatttggtgaagtatcatcatgatgtgtagggtttgaccatttggaacagttgacttttggttccatcttcactaagaatttggtagaacatcactggtgatgttttgggtctggaccgctcggaacaggatgtttttggctccatttcaaccaagaatttggtggggttccaccatggtgtttaggatctggaccacttggaacagtatgtttttggctccatttggaccaagaacttggtggggttccaccatggtgtttaggatctggaccactcggaacagtatgtttttggttccatttggaccaagaacttggtggggttccaccatggtgtttaggatctggaccgctcggaacagtatgtttttggctccattttgaccaagaacttggtggaggtccaccatggtgtttaggatctggaccgcttggactagtatgtttttggctccattttgaccaagaacttggtggaggtccaccatggtgtctaggatctggaccgcttggaccactatgtttttggctccattttgacc

SEQ ID NO: 28397 - DNA, 7624 bp, Cannabis sativa
  modified_base (7219)..(7228): a, c, t, g, unknown or other
ttgtttttcaaaaataaattttttaaaaataaaaattttaatttcattttgtgattaaaaagttaaaaaacaaaagtgttaccaaacagcacattaattaaaggattgtgacgagaaatggatgcaaaattatattttagaaattcatgtatattttttttttgataaaaaattgaggatataaatttgtaaagaattagaaaattataaataaaacactatataattattattatatatatatatttttttttttgaaaataatagggtcaataatggcccttttctaaaagaatttattttgaaaatatatttttaagagggtgcaaattaatgatgaatacatttttattataaaaatgttaccaataaggaaaaaccaaaaagctaaaaggagattacatttatgaagcaaacaaagcttaattaagaactaaaaacaattgataaatattatccttaacctaaaagcaattgctatttagattataacaatatgagttttggtagtatttacttttagattttagtaagacttgttgttacttttatttttcatggtttggtatttgtaaagagaatatagtatttcaaaacttaaaataatagtaaagaatctaagaaagtagacatgaatgacaacataaactatcctttaagtacctaatgctataaaagtagacttaaatctctaaaatgattccatagctacataatgaaaaaatatagtaaactcactaagttttatcttgttcacttttaataatagaatttcttattttatcaaaaaattatttcaatcaatgtatatatgtttttataattttaaaaaccctttagtaaaccatccaaacaacaacactatttagtatgctagggtgttcacaaaaaacctcagctgatagtcttatttcttgttttcggcccggcttgccgatcctctccgggcttgggtgtggttctggtcatgtttcttaatcggcacgtaggggtgagtggatggttcacatcaatttcatttctctttgttctcctagtctctttctcttttctcggtggttcttgtgtgttctccggcctcatatgctatggggtggtggtgatcggtccaaacttgaccttgtggacttctggtggaatctctttgtggcttgttcagatctagtgtgtggggcttcggggtgaggagggatccttaggagattgaagttaatttgcatattggtgtctttagtttgccttttatggtgtctcttttaactttcttattgttatttcttgcttgttttatttttataataattttttcgtcgtcatactaaattagtagggattaatattggtctggtacaagatgcaagtgttgtctcttattagtttatgggtgtctcatcgataattccaaatcattttggtgagaacattttggtctctccttagtcgctagattttggggatctctagatctttattgaccatttgttatgtgttccaatcttttacgattaagcatcataatatagttagtcgtgttatttttcttatttatgatttaaataatgagattattatgtcttaattattattagctgatagtcattaataggtgaattttgtcatatattcatttggtttagaaactatatatcatacttcgttgatgcttgatcggtggtagcttattgataccttacttaagttgttgttaacttaaggttgttgttagaactttcttccattacaataaatgttattgtaagtggcttgatatgcctattttttatgactttatcttctcttgtaatttagttgtagttactatttaaattattccaaaatttaattttcaaaaaatttataaataattttaaataactataataaatatactcataaaataaatttacacaaaaaaaaaactctagtatatgctaaaaacagataaaaaatttatggaacaccccatccactccataaatgtatatatatttatattatatatatatttatatagttagggcacatgatagtggtgatgaaatgatagatgttgagagttaacaaaattcaacataatacgccactttttgaccagatgccaaatgttttaagaggtcattcctctttagaaggaaagcttttagaggtagaattttgttgcattattaagtcggtgcgatctaatactaaaattctcaaattaaactttcctaaccaacattaatttattaataatacaaaaccttaaaataaaatgtaagaaatagatcatactattatttaaatgagaattcaattataattcaatgaaccattcaattcaatagtacatagtagcacatataactttacccaaatgagaatttaaaatataactttcaatggaataagtgtatgatattttttttaatcaaatgtctctctacctatatatttattttcggtaaatatcattttggattatgtattttgcaaaagttactaattagatcttctattttgttaaatgataatatgaaccttatattttaaaatagtaaaaataaaaccatgaacctaattttcaataatttattttttaatataacaacttttagataatttttaacacgaatagacacagaaaatgtaaccaattttgtcataacatctctaaatcagattatattagtgtcctatttatacaattttagaaaatacatagtctattctattttgccataaacaaaacagaaagtccaataaataatttttgcaaaatacagaatccatactaacatttatctatttattttacatcattttcaaatgatcctactcaatttttcaacaaataaaattgcaacatatgacacaccattcttcttcttctttttatttttcttcaaatggaaagaaaagtcaatttcaaaggttcaaaatcaaaagaagatgtgaatgttcttcaaaggaaactattatatcttgattatctatctatcaatttatatatgcttcttttactaaattaagtttttttattttatattataattttctcttatttttgctaaataaaatactagaccacctagatttagatcaaggaatgattattggtggtgtctaattattccttttgtcagatctaaaactcatattgccaagctaggcctatactacctctacaaaaattagctaacaaataaaacaaggttttatttcataacaacttaaaaatttggaaatataattccataaaactaaattaaaaaaaaaaaaaaactataaatttaagtaaaatcataatttctccatatttatcaaacttttttaaaaaatctatattcctcttaaaataattttctccattatagtttttgaaatataagtttgtaaaaataaatttttttctcaaaaaattattttatggaaagattttataaaaaaaaaaaaaaaaaagagcataggtatcttcaaactcgaacaaataaaaaaaatgttgtcaaaagtctttttttcttttttttttttaaaaaaaaaaaacaaataataaatttagacttattctagatattaaaaccccaaatttaagttgtggcatcttttactttgtccactaacatatatgtttatacacaataaataataaggatactcaaatttgtgtcaacttcgaacttttatctcaaaaacatttttttttttcaatatataaacatatacatacaaaacaatattgatgacatattaattaatcatgaatgtatagattaattaatcaaatattaatgacaagtccatcactaaatggagaaaggaacaaaagacttttctttggttcataagagcaaaaatactataaaacaaaaatgattagaatttttcccaaattaatggccttaataatgcacacaaaacaaaagttacacctatgtatttacaactatttgtttgaattctttacttaaaatcaaaattgtcaaacaaaataaatataaaaaagggttaagatgagattgagattgagagagcaataccaaaatcactcattttggcagagccataaaactcgaactcgagtcagtctcctcctgctgctttgtccgaaatctaacctatcgagactttgatttgatatctgcacaatcagctcattagatattaaatgttggaaggaaaaacttggaataggaggagatgttaagtgagcgatttgccagcccactctcgttctcgtcgtttttgctttgcttgcatcttattgaacttctcctttcctttctccaaaagtggatcaacaacaacatagtcattgacgtcttccttcctcgacatgtgatcctgcgaatgattcaatggacaaactctttacgagacaatgcagaagggaaatctgaataatcagctcaaattgtggcattcgagtgcctcttggacacatacatagcaatttcaaatgaacgagacagtcttattagcgaaatttttaatgacatgcagagtatgagtccccgttcttctctgcagtatctctaggcaaatgatcatgcagatgcaataaagatataccagaagcttaccttgctatcgggagcgaattttaaacgaacagctttccaatcagaaacgtcctcatcagtgccaccacttccagttttactacttggttctgcaggtttctgaattacgttcttccggaacttctctagtcttgctagaacctaaaggaaacataaccaaggtgtagaaaaattaatataaaataaccagagaagatattaattataaattcatttagcaaatgatgctaatatcaagagctatgcatctaattattttatatgtagtgatgaccaattcaaaacattacatatatacctcatcttcacgtccaccaagtctgcgcttcttctgcttttgcaattgccttcctctttcagcttcattcaatagttgtaagtctagattcgcattggccatacgctcagctctcacgtctgatcctattccttttttcttcatagagagcttctccattttaggttgttcatcatccgacctggtgatataaaaataactagcaacagtttatatattgcttttttatttgaaaaaaaggatcctttgaatgtaatgcaaatgactcagaaacctctcatactatatttaggagaaagtcccttcatatctaaacctaatgtgctgaaccagttcatcacaccgatgctccgaagaccattacagtaaagtgattgtattatgcagacaaacaaactttagatagatgtttttatagaatgtctagaatgccatacctagatggagatactgcacgtccctttggcttagaacctcctgcaaaagcaaatgatagaggcatagcaaagattaaggcaacagttaaaaaatgggataaggatatgtactacaatgaagagacatttcaaattactttctaatttagataacatacatgaatattcttttcaaggatttgaaattaaaaagctcgattctaactcgatgtttgcctaggtaagtagcacaagaaaacatgcgtgtgcaactattaaccgattccactttgttatgaatagaaaatactaaaaccagatgtaagttagtgagatgtttggttcaatatttgggaattatagtactggaaatgcactgttgactacataccatttcgcgattttggcttaggtggtaaatctcccaattcatttcttttctttattattttctgccgcatccgagcatcaaagtttgcctcatcttcatcttcatcatcatcatcatcatcgctaaaagatttaacttttgaatccttctgaaattcctctttctttgagtttagagcttctctaacagataactgcacaccccttcttacttgtttggcttcagaactctgcacgtgaaacattggttacgaaacttgtcctcttgatcattatttgcttacttaaagcaaggatattatacatacatatctgagattctgaattatttcatgatatgtagatgtaagcttgcaaattcttaaagtgtccatacatgtattatgtatgaatcacaccaagccaacacattttcatcttaaccatattaacagactttaaatgtaacattgtaagaaaataacagcaagtgcatcagtgacctatagaaagtagatagttaccaattcatcatttggaatagcatccttcagaagacgaggatcatcgagtacatcatgactgctcttgatttttttcttcacagctgctaattccttctcctcttcttcagcttcttctccaaatgaaagtaaattcaactttctgaaatgtgcatgtaaagagaccacatttagccaaataatttgcacaagacactctaaaaggggcggacacaaataaacacttacttaacagcttttttctttgtatccttattgtcagtatcgcttgttgaaagatccttagattttacacgttctcttggtacaatatcatcgaatggattccacaatacctagaatataagtatcgaaggagctcaatattcaaaaacacatacataaacgatcaaagggcaaaatgaacagatatagaactgtccctaaacttacctcaattgataatatctttgggggtggatccaatggacgatcatccttatcagtctcaacttctcctaacctcgttagattataaattgaatccccagtaatctagaaataacacaccaaacataagaaataacatcaaaacacttaattcacttctcaaagatgaaactttaaaggatttagcaatagaagtaagcatcaccttcccgaaaatggtgtgctttcggtcaagccaatcgcatcggtccaatgacatgaaaaactgactcccattggaattgggtgaaccctcattagcacaagcaactagtcctctatgcttaaatctcaaacgcgaatgaaactcatcaccaaaaacacctccatatatactctcaccacctacaaaaaaagaataataaaccacactaagaaaaaacctcaaaaccccttcaaccaattgctccaaatcgcgaaaccctaatcacggctacatcaagtcaaataagcatacgtattcatatatacagagccattttatccaaattgagtgtgcaaaaacctcaaaatctcttaaacccattacaaatcacaaaaccctaatcaccatcaagtaaacaaacacacacacacacacannnnnnnnnncacacacacacacacacatatattcatatcagagccactttatccaaattgagtgtgcaaaaacctaaaaaatcccttaaaccaattacaaatcacaaaaccccaatcaccaccatatcaaaagtaaacaagtacacacacacatataatatatattcatattcatatacagagtcatttatcaagtaaacaagtacacacacatatatttatattcatatacacaaatagcaaagccctaatcacaaccatatctaccatatcaagtaagcaaaacacacacacacacatatgtattcataattgatatacagagtcatttcatcaaaatccctaaaactaattacaaatcgcaaaaccctaaccaccaaacaagtacacacacatacacacaca

SEQ ID NO: 28398 - DNA, 2038 bp, Cannabis sativa
attttcggtatatcatcttaaaatatatattttatatttttttcttagttaacataagattttgttacattttttttggttataaattaatgattttttaggtaacacttcacataagattatttggtcttacaaattagatcacattgtacatgtagtaaaagcactctaatgaacaacactagaattgttatagtgcctatcaatgctctcattaacacaactatatttatagtttgcttgtctattttacaaattccttttcatgatcaaaagcacaaatagaataatttatttactaataaaacgcattcaaacaatccaagagcttcttaagcaacattaacatttgtatctgacatggggcatgacttttctcgtggggggcagagatttagaaattaataaaagattttgggaacaaacaaaaataaaggtagatggcgttactactagttaagggtcaaaactcaggcacaggcaaatcttcatcatcaggtgaagttaaaacccagtccccagtagcttgatcaagtaccatccctttattcttctcaacccaccaggaatctggaatcaagtaatcatccttgagaaacccagaagatttgttcacaagagccaagctcctctccactctcagctcaaactcctcatctttcccattccaaccggccaccacatgcaaaatcccctgcaagttgtgccagtctcctggcaccatcgacgccttcaagtactctgactttctagaatcaatccgcagctcggtcccaatatccacgtacccaagcagtggccctggatacaatgttatgaggtcaatggtgttccttgtgtggagaatcttaagattttgatgactttccaccctttctctaaactctctgttccccacttgagggcatccgaagacaaaagcagagactggaatttcctttggaacgacgccgttttcaactatatcaaatgcgcttataacagccagactggcccccagactatgcccggctataactacgctcagtttctcgtctctgtacttgtttatcaagctcttgattatggtcgaaagttgaactcgtgcgcttgttttcacgaatggggaatttggattgtccgatgtatatatggtaagccaacctctcatgacccgagcttgattcttttcatcatcttcatcttcactactcaacaaagtcttggcagactctggatcagctcccaacacgttgatccactcgtagtctctgattgtgccacgccatgccacgtagatttctctgcggccgagggctttgctgaccgtgtctgtcgttactgccacgtagcccatccaattggactctcggtcccatgattcgcgggagcgggaacggagtaagatggcctcagggactctaattctagctgtggcgtagaggtaggaaacgacgtcgtagtcggtgccgttttggagaaatactttgctgaacagagaggacttgccgtagcggcaagcaccgcagtacttggagttttggtcgctgttgaaggagtcgtaagtgacttggcagaagtcgccgcagcggaggaggagttgccggagtttgaggtttagagggttgagaatgccttcccagttgttgtgtccaaggagttcttcccatgttggttccgccattattagagtaagtattactaccaattcagaaactgaaggagaaaaagttgaaaatgcagatgaataagaataacagatagggataagattataaaggattaatggttgagtttaatagataaatatatatattgttaaatatatgtgtatttgtttgattttgtattctggcgaggtacgtatattatttttcttcaagaatatttttcacatgtgaaataaaagtaccatggtaccacttgatgtgtaaaagatgaaacgctagaagagaagagaaaggataatgggatgagatgggtggttgagttgaataggttttttatttatttattattattttttatgtatttgtttgtttttgtgtttttttttttt

SEQ ID NO: 28399 - DNA, 3203 bp, Cannabis sativa
ataagtaaatctgattataatgaaatgagttttatttagggcataaaacccaacaactcttgacttggacacatgtgataagtgcattcagaatatagaatccactccctgttcattgagatttgttgaattcttgttgctccttgtacttcttgcaaaatctttacaagtgtccagactttccacagaagtaacacttccttgtgtccttctctctggacttagatgattgaaagtgatggtgtttagtctttgaactcactttcttggttgatcttcctcttgccaaatacacttcttctttcttgcattccttctccaattttaattcaaatttttttgacttatgtgcggtaagaacatcttccaagacaatcacatctctgccatacttgatgggtgtcttgacttcttaatatgcagttggaagcgatcttcacagaatgatggcctgactttcttcattaaccttgtgatttatgttagccaaacctacaataatctcattaaatctatcaatattctcatataaagaaagggaagaaatcattctaaaatcgtataacctttctagcaatttaatcttgctagcaactgatggtttcaagtataattctttattgtattccaaactcctttagctatcttctctacgttgggtttcgttcgaacactgtttgatagatacatgatgattgtgtaatatgccatctgctctatttcttccttttcatctggtttcttttctgccaataacttctcatctccaagaactttgaagactttttggtgtactaggatttcttaaagactttctctccatagcgcaaagtctccagttccatcaaacttttccaattcgaatctcgccattgaaattcaaagcttcattaagaaatgcagtggaaagaatcttgattctgtgttcttgatcgattactaagctctaatttgttgggaaattacgacttatagtacagaatcaaaataagtaagctttacaattaaacaattagcaatgacaaggttaacaaatcataaacaataaatggatgaaaaaaagggacaaatagagtatcaaaaatcaaaacaataaatgcagaaaataagaaataaccaccaagatatatacatgttcaagtccgatagatcaatgtgatcttgggtctactctagttctggaacaccaccaaaatcctcattattgattgagcaagaataggtacaatgtagttgagatgagattctttgttgagttctcactaagtgtttcaaatctcatactaacaccgaagaatattcttcatcaacagaagagtcttcttacaatatcaaaacccaatctctctcttttctttgcacctctctctacctctcaatcttttctctctcaaactctcaatctcctcttaatagagttctaaatctcgtatatcaagataacaagtcaaggtggtatttatagccttaggatcaagaccctaaagtcgatggctataagaaacgagattgttaagttagttagacaataactaacttaactaaatcttttttaagcgaagtctctatgtcaattaaagtaccagagccttcagaaacatatatgagcttccggagtcacggaccaaggacacttgctgatgatgcttctggataggattgagcctgcttgagtcgactatctgaatctaccattccaggagggacaactagccaactgaaagtcctttcctaaggaaggctagctatcctgaagactgagcctagagtcgacatgatagaaattcgggaacacccttccaaactcgactatcattcgacaagactctttttgggactggctttcgtgagtgaacaactttctaggaatgacatttacagagacctttttatttggaggaactataccacaagtatttttataattttaaactttaaatacaatattttggtgaagtcggtacagtaaaatttcgtgtcacattatttttataaactttctccaattttatagtatttttgtaaattctccaaaaaagcatacatatcttgcagaatcaccattttttttgtatgctaggtttgcaatatctcatttttgtcttacaatttctaatcctatcatagtatgatttatatataccactatttttaaatttgtatacaaaggaggagatatagctttaaaaagaaagttcaaataagtgtgcgtatgaaaagtgtgtttacatcatcaaagaattaattaatttttatattagactaataaagatagaatatttttctggcatttatagagggagaaaaatatttgtgcttacttcatcactaacgttttaagattatttttggcgattgaagataaatgtgtttttttaggggaaaagataaaagtgttatatccataatttatatgcgttattactattccaatattctatttcagttaaattcaactagtaggatttttttaagagatatttatagaaaaatttatagataaataaaccgatcttaaaaatcacagctaaaaatataaattttagtaataacatgactaaatatcatttttagtctgaataaaaagttatttgtcactatataataatatttagatacatataattaatttaattttagtcaatcaattgttatttgtctgataagtatttttaactaatgactttttaataataacataaaaataataattaatatttaattataatttttttatttttagccaaaaaattttgttgcattaaagtaagattttttataataaatctttagcagaaaaagagaaaaaaaaagccaaacttaataaaatatcactgatgttttagctaaagttaattatgagaggaaattaaattagagtttaggcgaatgattaattagtacaatataaattttcttagcccatacattttcttattgacataattaaatccaaattgtttatattttaatcaaaagtaatgattcaactgcattatgtgacaatatcttcgaataataagtcttttagcattgaaaaagaaaattaaatttattatacaaatataaacacatgctttctatgaagagagaatataaattaaaacaaaatggtttatctacaagtgaaaaggataggcatatatatatatatatgtatatatggtgaagcctgcctaaaagataagacacaaaaagtatat

SEQ ID NO: 28400 - DNA, 1711 bp, Cannabis sativa
atttcaaatggctagcaccagggtggatcgaacgttggttgacaatgagagtttagtagatatcctatactttgtagccataaaaagagatgggattgggacctaaagacctaaaaccctgcgcctcactaatatgggttcaccagtgactcgattcaactggaagggatgatagagttagccttgatgattggtgaaaaacctcagagttccacattgatgttcaccttcttggtagtggattattcgatagcttacaattttgtgttaggaaggtcgtcagtcaactggttgaaagcaatcacattcgtatatcatctagctatgaaattcccaactcttgcaggcattgtcaccttgaacggatagcagaaagaagatagagaatgctacaacatgtcactcaggatcgccaccaaacctcgagagctaataacgatgacattccaccgaggatacaaccaagttagggaaactttatcagaactagaccccaagtttgtaaggaagtgcaaattgagtcggtgaaagaatttgaggaaataataatttttgagaagattgtaaaagggcttctcaaagtccttaaaatagaattgaggaagttctcagaaatgaatgtagacgtgtttgttaggggacatgaggacatggaagaaattgacccaaccgtaatgtgccaccatctcaatatagatctaaacgcaagcccagtaaggcaaaagcggagggctctaaattttgagaagtatgcatccttgaaaagggaagtggaccaacttgacatgatcaagtttattcgtgaagcattttatccagtttgagcatcaaacaccgtgttggttcccaaacccaactggaagtggagagtatcattgacttcactcatttgaataaggcttgcccaaaagatagctttccactatcgcacatagatcaaataatggaaacaacaacaaggcacgaattactttaatttatggatgcatactcggggtacaaaaaaatacccatgaatcttgcagacgaggagcccacgtcattcagtattgatcaagtcttatattgctattgggtcatgcctttcggtctcaaaaatgcgggggtgacatatcaaagacttgtcaacaagatgtttgccagaaaaatgagtcataacatggcagtctacatagacaatatgttggtaaaaataaagaaattggaaggtttgatcaaagatttagatgaaatatttactactctccccaagtatcaagtggagttgaatccattgaaatgtctatttggtgtgtcttccagaaagttcttaggattcatggtcaatgagagaggcatagaggcgaaccctgaaaagatcaaagctttaataaatatgaaatcacctaagaataggaaattggtgcaatgactgactgggcgagtagccgtgttgaataggttcattacgcggtccacagacaagtgtctcccattcttcaacaccctcaaaggaaacaaaaagtttacttgggatgaggaatgtgagaaagcttttacgagcttgaaagagcacttgggaaatccacctctattggccaagccaaaaaagggagagtatatgtatttggctctctctgaacatgccttgagtgttgccatagtaatagaggaaggaaagcaacattagcccatgtactacattagcaagtgtttcatggacgctcgaact

SEQ ID NO: 28401 - DNA, 2200 bp, Cannabis sativa
cccccccccccccccccccaaaaaaaaaaaaagggtccaatatatatattttttaatgtcttttaatgaaccaacctttttaagggactaacaacttgttgttggtcacttcatttcaatttttaaaactcatgtcatttcttattactgttttaagcaaaacaaaaatcaattatgttatttattattcttttcaaatttttcatattctttttttctattacatttttttttgttatattaaaatcaataataattttaataaaataatcagtaaaatatataaccgtatgataatatttaaaaatattattataaaatttaattttttttgtaggggcccaattttaaaaattacaacagagtctttaaaatatttatgatgaccagtaataatagcgatacatgattccacctaggagtgttcatataatctgcaatccctgattccaaaccccaaccaatttggaccaaactatttgagaccggaccaaatgaatccgatgtgaatgatttgatctccaaatcattttaaagtctctagttcggtcacgattttaaaaatctcggtagtggttcaaactaaagtaatctgtataattattttagggaaaaaacaggaaaatacaaaaaaagaaaagaaattacaaatatactatgagtcggcccattaaatatttatacaatccacatacaaatatttacaaaaataccacatgctctaaaccttcagccgcacggaacgaacgatgaagatgaacatacctcgatcgttcaaatcaacaacacaacaagaataaaaccaaaatgagagaaatacaaccattaattccggaaaaattaattggaaaagaagacctgcaatgatctaaatagaaaattacgaaaaaaaccagaaaaactgggaagaaactgaaattacacatttgttttcggttttactcgttcaaaacaacaactcctaatatagaaatccaaattcatgaaatgtagatatgtaacaaacagatctggagctccccccgaatcgaaaaaaaggtatgatgtgaaaatttttaaaagaacctcatgaataatagatctatgttatatacagttgtattttagttgattaccgatttccaatgtggaatatattttttaaaaaacacggtaagaagagcaaattcgaattaagaaacaacaagttacgtataagattgtttattttttattttggttgcattatagttgcattctcgttttatgatagtttatatattatgcaggtatttcaattgacaggtaccaagaaatagtagttatacatggtaagttttgtgcaaatagttgcatattagttttataatagttggaaaaaaagatctgattcaaataaaactgatgaaaagcacagggttcacaattagtaacaattgacttgaaataatgaaaagatcatgagctcccaatcaatccaaatcaggtataaccaatacatataagttatattcggttacatagtcatttttttatgatttcaaaatataatcaagcaacaactatgttaattggagttaagtttcatattttttcaagttgatttacaattgcatcatcatttcataatagttttattcaatattgcaagaatttatttttgacagagaaaaaagagaaaacacttggacaaatggttagtttgtgtaataaattttaaacatttcgtaatagttgcatttcagtttttttatagtttcataacattattaaaacaaaaaatgacaaaaacagggttcagaattagaaatacaagatatccattgtgtgtgaatgtcatcaacagcccaccaacaaccatcaatccatcgttcttagaaaatagtaactcattagttgcacagacaaacacatttgaaacgatggaatataatgcagcaacaaaagaagactcaacaaatcaacaacatacagttaaagatacaatactggaagatgggggagaaaatttcgacttcatggactatgcaaaacttgtggcagaggaaatggttgagcaactgacgaactactaataaaaaatttgcaacatcctgaaatagaagaagcacaaataaacaagaacaaagaaacactccaaagtgtgcttggtttctatgcaattagaaacaactttcaattcaaagtgaaaaagtcttgcgcaagaacatacaaaatttgt

SEQ ID NO: 28402 - DNA, 9963 bp, Cannabis sativa
  modified_base (1918)..(1926): a, c, t, g, unknown or other
  modified_base (9843)..(9865): a, c, t, g, unknown or other
gaatagtaatcctaagatgatgatatattaaagtaaaatctaatttagcggtcgtctaaataaaattaaaacaataatcataacgtagaagaatagaaacaatttgatatataatgaaaattaaaaattaacattcaataatagaattaagaattcatgtctcgggttttgaaataacctttactaaaatgaaattacttagaattagacattataacgataataataataaatagtaagagtttaaggagaagaaaagactatgatgaagaacaattcgaagtcgcgatctccatctcttccttgctctctctctaagtttatatctcaattttgtagctctaggattttgaaattcacagcctaaaatgttctataaatagtgtttgaaaagataaatgaatcctctagaattgtaggatttttttttgttttttttttaaaaaaataagtacggggctactgattagtattttggccataaattcttcaatacaactcggaattagacgattcaagatgttctgaaaactaagaacgagatctaaaacagctttcatgttgagctctaagtccagttctgcttctaaggttgtcaaaatttgtaattaagctccgccttgtaaaaccgagcttgccgacttccactatttatccctctaaatgactctaattgcatgattagtctttaaaatatcataaacaattaaaatcacactaatcaataacttaaaaaatcaatttaagactattaatacgtaaattggtcatattaataagataaatatatcatattgttatatctattttgagaatatatgacatatgatctctcacaacccatctagtgcccaggatgtttggatcctactctatcttatgggtctttggagtttccgaaaggataggtcatctctcatccctcacccaagagataagaaatgttggaacttaacgaggatgcctttaggggtcatcctggactcgaacctaaaagagtatctaggatggccttactttcggaagctgcttacgcacacctctgaattatttaacaatcataaacaatgaactatacatataacaatcttaaacaatgaattatttaatatataatccgttacaagaattagcaattaaatctattaaaattttgataaaatataatatgtcacagcgtaattaatcttacatttaacaaaatcaattaaataggtataacttctaatttaaaattaccatattttgtgagtgttttgacgttgttgttatatatgtgcattaaaatgtattcaattatctaattattataattatgttaattattttaaaatgaaaaaattaatttttaaagtgtgcttcctcgaaatttcttgtatattgatatcaatattaaagagaatatttttatttatttaattttttataatgacattgtggttaaatttgatttcatataaaaatatgcttatattattgtagacctatattttgtaaaatttattgattgaacaatttattatattaaataataaatctgactcggtatctttcaaagtagtactagatattattataaactaatttttttttatcaaaataaaactaaataataacccaatctagatgtgttatgataaaattggttatattttctacatttgttcgtactaggaactatctttaagttggttatatttaaaaaattatcgaaaattgcgtttagggtcttatttgtactattttagaaaatatgggctcttttagtacgccatataagggtcgtatacctagacccggacccaaacccaaacctgaacccggacccagacctatgacttggaccctagacctgagacccgcgacccgaacccatatagttggtgttggggtcaagtgtattgaaaatatattatannnnnnnnnaatctattaatacaagtcaataccgaatatagtattgtattaaataatactaatacaatacaatttaacacagtacaatacaatacgacgtacaaaacgaaccctataagatttattttatcatttaataaaataagagatctaatcaacaacttttataaaacacatggtaaaaaataaccctataaaagtttataataaaataataaaaccataaaatctaaacaaaattcctcattattcccaagcaacaacataaaacaataaataactaaaataaaaacttcattgaaatgaaaactacatcataacgacaccaataacactcatattacttattaaaacaacataaaataaaattaacaatgatttcgaccaacaacaacaagagaataaaataaaataccatactaacacaaataactcataaacatgaataatcgccataactaaacaatatttaattaaagttcatgttgttgttccccaatgaaaacatcacatctgatttcccaaatttcatcaaattattgttattagcttaattttgagcgtttaaatccctccttatgcccctgccacgatcattgtcatacgccatagtagtagcggaagcagcgtttacttccccatttatgaatggaggcacttttgctgcagtagctgctgtcattcgagcaatcttagtttttttggctatttcttccattctcttattaatatccttcaaattttgatcaataagcgaggtgagatcatttaaatctttaacagtcaagccttgaaggttcatcttaccagagagattgccatacaagagtcgattcagctctctgtcacgattctctttcttcagcctcttcatctgctcactcacctttccaattttttgtttcaagaaaacttcttggttcatcatcttcttgctctgctcaatctcaggcattttcttgaactttttcactatacgatgtactcctcctggagaagggtacacctcaggctgagtgttgtaagggctatagatgattgcacacgcatctacaccacacaaggtgctcagctcgctcaccttttttatcagacctttctttctcttcttataagtggcttttcgagaggcgtcgttgttgatgtaagctaacttcaccttctttctggtcataattttggcttgttgagtcaaagaaaaaaaaaaaaacgagagctaaggagaaaaactagctagtgtgcaaaatgggagacaacatatcccaaataatattttgtgctcttccttagttcactttgtggtactatttattcacaaatttcatagaggaatgtggtattagggtttaatatatggtaaatagttaaatttcttttttattatttatgggttacacattgtatatgagaacggttagaacatatgtttcaaaatttagaataataagacattaatggtcaattggtttttagagaaaagtaataaaagatatttgtataacgttacataataaatatgaaaaacaaatagaaatcttggagaagcaaaaaaagaaaaaggagagaaaaaaaaagagtcaaatataaaaaaaaaaaatcaaataaaattaaagtgtagagtggaattggtccacaaatagaagaaaatccaaaccctattatctttttttggccatttttattgcattatattatcagttataagaggaatagaatttacatttttaaagagatatctacataaaaataaatcattaattatttagctaaagactatcctaaatatatacaaatatttattaattatgatatatgactatatttgactaatacagctggtgcttactgtataatttttattattatcatgattaccatgtgtatcatagctgtatagagttataattattatattttttttattattatctagttttatattttaaccatatatcataattattacttgcaaaagtaatatatttttttcactatagtaattggtgctttgaaagtttattatagtgaggcactcaaaataaataaaatattaatgttaatgaaaatatttggtactatacatttatggaaatagtcgaaatattttcgatatccacaaatatttaaaaaaaaaaaattataaatatcatatatatttgggtaataaaaaatttctatgaagtttaaaattattttaaaatatagacaatttatgaatactaaacatcgtttggagagtttacatgagtaatgtatttttttttcaaatgtataaaatatttatactcaagtaccgattaaaattttgtggcttttaagtcacttttccaccgaaatatctaattatttgattttttttggaaaaaaattgaaatattaccccgtaaaaagattaaaaaaaaaacccttaaaatatattagaactactcaattttttgatatttttattgaaccaaacacaaaacaaaatccaatttcttaaccataaaatctaatactccaaattattttaaacataattatgacagaagataaattaaaataccgactttatttagttaaaactaataagaacttaaaatttcatcacgacataaatctaaaggagatcttgttcccattttgcaaaattatgccattaacacttagtttttagtattattgtcattaacgacattaactttcacatcttcatcgttgaaattctcattcattgcagaagcctcgaccttagccgcaaccaccatttgagtggttgagttggtgctattattcttggcagcaataatatctatccacttattaatttcttccaaattcttgtcaatgatacaaacgagatcatttaaatctgtagcagataagccaacaagattagccttacctgacaaattgaagtacatgagttgggttaactccttctcgcgattctctttcctcagctttttcacttgctcactctctactttgatcctttttctagagaaagcttcttggttcaccatcttgttattttgctccatcttcgaaatcttactgaacttctttagaatatgattcaccccaccgtcaaagggaataaccacaactacagccaacaacctcaccaactccctcaccttccttaccaaatattttttcctctttttagtgtgcttttcttatcttctttgtactattatttatacataaatttaattaggtatgtgtgataaaagggtatttttccgttaaatattattgaaacgtgtcaatatttgtttaaaaccgtgtcactgtacatggtatatattttactgtattttaatatggtatctcatatattttaatttaaaaatttaagttatttaaagtatttaaaagtaacacaacataaaatgacactttatgagtgagtgtttcattagtttttttttttaattacatattaaattaaaatatgtaaaactaatttcactaatatataataataggacacttcatttggtgttaaaaattaatttaaaaattattagatatcaagaatgtccaacaatatcatcatagggaagtatcttatgagtagttataatattaatagttattatattaaaaaattggaaacactattaggcagtgctagtgcatttttagcattattaactatttatatgatacaaatatgtgtgatttaatattaaattatactaattaacaatacatatttatattgaaaaaatatatataattaatgaaatttattttaagattaaatatgatttttgttttttaaactatagaattttgtcctttaattttttttttgttgcaaaattttcctcgaattaaacaaatcgttggaaatatttccattcacttacaatttactgattttttaaaaataatttacttatatataaatatatttttttaaaataatttagtttttgtttcttttttatctaatatttacactttttgttattgtggactaaacaatgggctgttacataatacatacatataggagaagaatatgatacatggcatatggtgtatatatataattaatgtaatagtttcgcatgcaaatcacgtgaatatattgtatgttacagttactaaaataatgacattagtcaaataaaaaaatctgttttttttaagaaaaaaaaaatattaaaattatattagaatgttaaaaagtttcacattgctaatgcatggaaatataatataatatataaaaagatcaaaatcaactgtgttggattggttaagtcttctaaacattgaagcattgagaaagtaacagaaagagaaagaaagaagaacagagaaaaagaggaagaaagagagaaagaactcttcattgattaagcacacttgatacaagacttatatagtacaagaaccaaaggcacttagccaatacactaaccaaaatcagtaaagacttgaaaacatgttaaccaaagttaaccactaactattaagattaggagattagttaaggttgttaagtggttatttaggctatattagttataactaattcttgattagttattctgactatttcacccttattattgggtatataaaccttgctgtatcttttccttattgtattgaacatttcagaacatttcaaataaaacagagttcttctcttttctctctgcaaaccgattcaggttgctcctcctcatactaaccaacttagcagacacaacagaatgacagttacacctaactgtcattattgtccttacacgccccctcaaacttagaattggtaggactaccaatgttgagtttgtgtctgaaataagagaaaacttggctagaaattggtttggttagaccatcagcaagttgatcaaaggctagaacatgcttgacttgaacttgctgatgtagaatcttctctcggacaaaataaagttctagctcgatgtgtttagttcgagcatgtagcactgggtttgctgtaagaagaattgtgcttaagttgtcacaccagacaataggaggttggggaagctaaatatgcaattctgtaaagagagaatgtaatcaggtgagttcagtaacagtttgagcgaggcttatgaattcagcttcagtgctactccttgagacagtgctctgcttcttgcactgccaggcaatgggattggagccaaaaaatatagcaaacccagatgttgaacgcttatcatcaaggtcagtagcccagtcagcatcgcagaatgctgttagttcaaggacctctgttttgtgaagttaaagaccataatcgattgtgccactaagatatctcaggattcgttttactgtttgccagtgagactgtaagggactttccatgaactgacataccttgttgacactaaaggaaatctcaggtcgagtgatgataagatactgtagagctccaactacagatcgatattgctgaggattgtccactggtgtacttccatatgcaaataacttgaggttgctgaccataggtgtgttggcaggtttagcagcatccatatctgccttgtgcagcagatcctttatgtacttggcctgagagagatgcaacccagaggaggatgaagttacctctattccaagaaaataatgaagatcccccaagtctttgagagaaaatttggcatttaaggcagcagtgtagtgtgagataagcttaggatcactgcctgtgatgataatatgatcaacatagacaagaataactgtcatggacaagggtgtatgccttataaagagactatggttagattttgatgaaacaaatcccaatgatagaaggcagtgatgtaacttgtcaaaccaagctcgaggagcttgtttgaggccatagagagctttgtgaagtttgaagaccagttcaggagattcaggactatcaaaaccaggtggttgaagcatgtaaacttcttcctgtaaatccccatttaaaaaagcattcttgacatcgagttgcttgatttcctaacctttcgaaagagctagagtgagaacaaccctgatggtaacaggcttaacaacaggactaaatgtttctgtaaagtcaaaaccaggttgttggtgaaaacctttagcaacaagtctggctttgagctttgagacacttccatcaggattctctttgattctataaacccacttggacccaataacagttcttccaggtggtaacctgacaagagtgtaggttcaatttttcttgagagctagaatctcttcagccattgcattgttccactgtaagttttgtaaagcctgcttcagagtggttggaacttgagtagtcaaatagaccttaggtttcttaatgccacatttagctcttgtttgcatagagtgggcattgacaggagctactgtggcagtaggaacattatcagctgcagcagcagtaggagcagtagctggtgtagactaagtttcatgagtaggagcaatagttgcagatgattgaagttggctctctggtttaggagaagcagcaagcattagtggaaccaaattcctaaagatagttgttgtgctggtgccctgaaaattctaatctccatctctctcaaccacaacattgtcaccagatgcatgtgtagttgaggaagaaggagaatcagtggtagcattagtgggaaataatagatcaacattataatgacactcagaaataggaattttgctaaagatgccagactctgatttgtgagaatgggaagtggtggaatttaaatgccgatgtggaaatgtggactcatcagaaataacatccctagagatgtatagcctaccagatgggtcaagacacttgtaacctttatggttcaagctatagccaatcaaagtgcaaggagaagatcgatactcaagcttgtgtttgttttatggtcgaatattgggaaaacatttacaaccaaaaactttaaaggaagagtaatctggtgtaatgttgaacaagactttaattggggatttcagagatagaacaggtgttgggagcttattgtataggtagacagctgtcctaaaagcctcatcccaatattttaaaggtaggttggcttgagctaagagagttaggccattttccactatatgcttgtgttttctttcaacaattccattttgttcatgggttgtgggacatggttttctgtgaatgataccagcctcttgaagagactgtgtgaatgacctgtattcccctccccaatccgattgaaagaccttaattttggttcctaattgaagttcaacctcagccttaaaaatgtgaaatgccttaatggcatcagatttagttttaagcaagtacagccatgtgaatctcgagtatgcatcaatgaagtgtatatagtacttatagtcattgtgagatgtagtgaatgatggaccccataaatcagaatggacaagtttaaaagaggcagtatagcaagagtcagatgacttaggaaagggaaacttatggattttgcctaaacaacaagatgaacaaactgaatgtggaattttattcacattggaaatattacatttggagagtacatttttgacaatccgttcagagggatgtcctaaacgattaggccatagctcatactcattagtaggagctttacatttgacacaaagactgaaattaacatgctgagattgtgtggtggtggctatgttcgtacagtgcaggggtgtgagattagagctgctacatggtgttggagagtcagaccattgtatttgactcgaatcaaaagtatataggtcattgtgatgtctcccagtcagcagagttgtattactcatctggtccttgacaaaacagaaattgtggtaaaacacaaaatagacattattgtcagcagcaaacttagacacactaaagaggttttgttgggttttatgccnnnnnnnnnnnnnnnnnnnnnnnaatcagatttacttattaatattgtaaagaccgcatatgattagtatcttgaattattaaatagttagggtttatgtatgagattaaattaatattta

SEQ ID NO: 28403 - DNA, 3131 bp, Cannabis sativa
gagaaatactaaaagtcacaccactttgaagtgtatatcgctaatcgggtttcacataatttaacttaataactattatatgaatattattattaagtaccaatcttctccaacatcaccaataagtggtatactgtaattagttagcaatattgtataaaaaatttatattaagttatatgaaattttatatttaattatacaagtactactggtaccttttatcctttctcctgatatatattgataattatttgcaaaagatcatctttagatactattgcaaaacactgttgattattgcaaaatactgttgatgatttatagcaatgctcaaatatatattatggttccatatattcattatatatgcaaccatgcatccagtataattcatcatatatagagaagtcatgtgatcataatataaaatggtaagaaaacgataaatatgatcgtgggaagaatactggttcatggcaaggaaaagtgaattattgactgatcgtttttattagtttcaggtaattaacgttatcggattaattaagtaataaataaaaaatatttattttattaaataatttttggtaagaaataaagtgacatcacaaccaactcgccggctcagctcagctcggcacggtctgttggaagcgaagtgtgtgacggtttagtgtgtgagtcatcacccatagacacaaaactgagtgacccttaaggtccaaacccaaatcacatacttacaccttatatacactttcaaggaagtattcttatctcaggtgggactcaatgcactatcacacacttcacttctcatatattttgtaaaatattaactaaaattccaacaaattcattacacactacaaattaatgtactaatatgtacccaatcatatggagaaatttacacaatatatctaaaaacagacttttttttatatttttttgaacttctttttatttatttttttacggttttgtgttgtttcaatcttatttttatgttatcgcaacgttatactatttttgtaatgtgaaaacaacgtgtaaataacgatttttttaaaataacgtataaacaaccgtctgtaaaaatataaaaaaaaaatccaaaaatttgtaaaaacataaatattttattattgtttttttggataattctgaaacaatctcattaattatatgacattaacagttgctcaatgtttggtgttgccttatagaatcaaagaataaccatatataatgaccctaaaatcctgaaaccctaaaccatcaacatacatattatacatctagctaactgataaataagagacagtgaaggccattgctctgcattgaggaagtgaatatatatacattgaccaaatcccaaaaagaaacagataaaaggacaacacatgggatgtttatgtataatatatagtgtttgtatgtgtagtgggggccataatcatagctctctcatcacatcttaaatatatctattggatcttcaaatttatgttgaatataatttggatttgacaagtcattctgatgatgatcatttgcactactatactaatatatttcttcctatttatatgggaaacttacaaatttttaaccttagtactaaacagagccatgttaaggatgaagaatgtttcaattatagaatttgtcagaagtgttgatcagttgattaattgattgcaataatcttatttaggtcattttatggtataatgtatatatatagtattttaggagattgtattgggtatatttttagtttattatgattagttaattcatgattatataaatggtattaagtttataaatatgagattcctctctaatttcctaagacaacaactactattattactactattattacatattgcgacaacttttggacttcatcaaacaataggacatatatacactataaatatatgatttatttttgggatttttataaaaaatatatatataaaaactaaaaatacaaatttgtataggcctaacaccgaagacgtctttgcttgcggagatgaaaagtcgaagacttatgtcttcagttatttaggaataactgaagacataggcatgtgtctttagttatttggaataaccgaagatgtagttggttatatatttttcgctgaaccattttccttcagacttttttttcaccttttctcttctacactgaaaaaaaaagcctctcaaacacttaaaaattcgccgtcgttggactactattttcgctattcttagccgtttttgttacaatttgtgataagatgaatgatgttttatctcaaaactaattggtaatgggaggagtagctcatttatcttatatatgataatttatttccacacatgactaactctaatacaccctcctcacgtctgggcttagaaaatgtggatataacaaacgacctttaagagaccacaggactgaacgtgacatttgaaagaattccacaaggccaaatatcaagggagacaacatctttttagaccagcagcactttaactcacaacggatcacaaacgaatttttggacaagtggcactttgggttcacaacgtatcacaagtggctctgataccagaatttgggataagagatgaatgagattccaactcaaaaccaattggcaatgggaggagtagctcattcatcttgtatattataatgtatttccacacataagtaatgtgagactaactctaatagttttctaccattttttctttcgaaatcttatttctatgacctatagtcgcatttaaagtatcaataataatttttttagggctttgatgttaaaataaaacgttagtatggtagtatatatttctatcagaaaatcgtatttttagttattttgtgattttgattagttttgcatagatgtatatatttaacatgtatatgtattatgttatttttatatttttaaattttgacatagactttttaggaaattaatggttgcggtcggtgctagtggtgacctcaaactttgaggtatgtattttaatttttatgttttatttatttatttattgaaaataattgatatagtgatattttaaatattaattttttt

SEQ ID NO: 28404 - DNA, 3082 bp, Cannabis sativa
acgtaatacgcctatggtagttagggtgttacaacaagtcttgatattagctcaagtaggacatcatcttcttgtattgacttgtatattcacctagaacataacctacaaatagttgggaattgtggtgtaagtttaggtggttagcctgcgttttgtgtgctagcctaaggcctgtatttagggcttcatgttcagcctcgttattagaatctttgaaactaacttcgttgcctcgtgcatccatttcccccgaaagtgtccttggggcaaggcctgtatcaggcaggaggtcaatgcaccttctaggttgagctgttttgctcttgttcttgcttcttctttggctcctgcttttctcctaaagttaaagatattttgggggatatgcttctatgattagccatgaagttggcaagagcttggcctttgttgtccatgcttggttaataggtggcctcattaaggtcgagtcttggtggttcacttgagtggtcggctaggtgctgcagcttttggtgacacctatcaccatgtctggttggcatgcattactttaggagttttggaaggagagtgaagcatgcacacttctcctcattctcccttaggcttcatggcataagaaaatcattgaatttccatttttttccatcgtgttggtaagacccatcattgtttcggtttcctcaactattcacatttttggagaattggcagagatcatttacacgtcggatagtacttatggcactatgattcgatgtgcctattcgacactattttgcctcttatttaggctttccggatagcatcttccaactttatgaagcccttaactcgcttaagaaactccttcatgttgctcgtcgagatccttctgatatctttctagaagtcactcaacagcaggatgcctttgagtatggtcgtatatctgctttcttttgtctgacatttgaccttgatggccttagccatgaaccgttgaatgtagtcctttaaaggttcatcttgtctttgctttattttgacaagatcctctagtcgtgaagatatttgtcttaaagcagagaactgaatatagaactctcgggagaattctttccaagaattaaatcttgctggggccagcttgaaataccattgttgagctatttaagctagatttgcaggaaagattcgacatcacacatctctagatacttattagagatctattttgaccacaaagtacttcaagtgtacgaggggattttccttccttgtgtacatcttccaagttggcatcttgaatttgggcaagggcaagggcaaggcattgatgtatgccgagaaaggtgagccccttgacttgacaactcaaagtctgatggttttgggttggccaaaccctttagcatgtcctgtatttgatccaactgtgcttgcatagaagaatctgttgttgcaggggcttggttgactggcccttcttaattgaggtacagtccagaattggccagagtctggctaaccctaccctaggagagggtattttagaggctggccagccctaggcctggcaattttccatggccggctagcccagtggttggcagggtttggccaccctctcttccttgattggctggtggagcctgtgcattgacatgggatagatcacactaattgttgcagtttggtggatttaaagtctaaagtgattgtattcactccttaagtttttgtcttgggtgtttccacctatcctcaagcctagccagttgaagattgacatttgagtggtcgctccccttggggagggagtgtactcccctggccggccagaggcactcctataggtggctggtcagccaatgatttgtagatgggggctattgttgagcttgagatccctggtcggccactcataccgttggtttttgagatctagctgttctcaccattagacttttgttgcaaggtctattctccctttgacaagggaagatctgtcctatttcctaaggaacctagttggtcagcttgtcaatagaccctccctaaatcaactagtcgtccttggaatggatctctaacgagatcttggcctctttcattggttctctaattgaacttccttatcaagtcgctagcctctctattgcagcgatctaactccacctattgagatcaaaggatgtaccccttgtcatccatgcatcttaggaattcgcatctttactgagcgaatacatagcaatcagcagaacatggttcttttctatggccagcctaacagatagcctctctcaatttggctaactcgagatcttctccaagtctacatggggctcgccaattcctaggctcgtctctacatcataataccgggggccaaattcaattgcggcacttgagggctgctccacgtgggtccttccttcagtgtgaggcactagtgaagggtcttccctaggagccatgggctgattatttagatccaccgagatggttgtctccacctggccaactgtggtggccaaatttgtggggccaactgaaatagcagtattgaccatatctatagtgttaatggaaattatagtcgtggttggaacatgggcattgggatccgtaatcatgggttctccaagaagacccgatgatgccaatggtgcaaccaaagttctccttgtgttaaccatggcgtttgattagaaatgatatcaactcgctctcaatgaaagcacaaaattttttacctaaaaaagtggccaaccgacagtgcggtcgtattaatccgatattttccatgtgttacactataagaactataaattaaagaagacaaggatttttatagaggttcgacccccttagttatcggataataacctactcctcttttagttgtattgatactgagagataatactattcagatcactataggttaaatctaatatagctctcttcaaggttacaaagtatgaattagtaggcagatctatagttagagtgtgatatggccttggaggcgtgtgagagagaggaagagagagggccctttgggtgtgtagaagagagagagagagag

SEQ ID NO: 28405 - DNA, 1338 bp, Cannabis sativa
ctctttctctctttttctttttcttctttttcttcattttcttctttttgttggagtagactagcagcctcctttttctatcaattcacttacgcctattttatcttcaagtcactaccctgcttcaataatatgcctagcatatatatatccaatgtatatataccaaagcctttaatactcaccttaggcccaatttctttctctcctccttgctttgttttctctatttaaatggatgggcccataatactaaatgcaaagtttgtatttaaaattttaatacaccacacataattatattgaattaactatgagaaactaaataaacaaataaaaattaagaaaattaattaaaactaattaaaactaatttcaaaatactaaaattaatatttattcaaaactaaataaaaagctactaaaataaaataaaaatacttgagaacaaagctaatttaatgcacaaaaagagctaaataataatattttcataaagttatcaacacacccgaggatatgcatgacgattactgtcaggacaaggccactgatgataatattggagagaagggccagcttgacaagtcagacctcgtggtgatcttaacaaaacaacttcaactagtagaaatcaagttgactcgacgagatcaattcaacgaggtagtgctcacaaagatgagaagaatggaggccataatgaatgtcctaactaaagtagttcctaacatacaagtttctccaacaattgatgcccctgagaaagtaaatccaaaagatattgatgcccctaacctcaggcattcacaaagacaacggcaaagggatagccatcaaatagccaaagaagactccttccaccaagcagcataaaaagtctaaagctactgaccaacctcaacagaagaggaaagaaaaccatgcttcaaggtatggtgactagaccaattgtagaggcaaagtcacgtagaaaaataagactgacatcggaatacagaagctaaaggcccgaaaggagaagcatcaactcagtcgatgatgacatcgataagatatatcatgtattagacgacagcagtggaaatctctccacgactgatcttttaagaagaccaaatgagaaaaaagaaagagctaaagcagaaaaagttaaaccctgtgagaatgatttgagaacccacatcaacaattgcgttagtaatagagaatcttcaagtgacaagacataacacttagaatgcaaagtcgaggagttgatgaagatcacggagaaggtttcaagaaaataaagcggcaccgtgtcatattctaaggaagaagacacgaagccatgtg

SEQ ID NO: 28406 - DNA, 2669 bp, Cannabis sativa
tttacgaacattggaaatggctcccaccataaggcagtttattctgagacttttgccagcacaattcatgaattgcgtcggtataggtaacttttatcagcgcactattgcgccgataaaagttttcactaaaaattttgggcattggttgaaccactatatgccggtaacttttgtcggcgcgtttggccaaatgcaccgaaaaaagtatcatttcttatagtgttcattattactccgctataaatatgaaattatactctttgacaatatagaattatttctaatagtctattgatacaatcaatataagtagttcttcctctaatttattagttcataattaaagctggtcaagattatcattttacccttctaattatctcttgaattctctatgtaccattaattttaagtgaaaagttaatctatgattttcattatagatttggatccaactgtagtcactcccaaaattaacaatataagggaactaatattcaatccttttggaaagtttggattctattattgtataacatgttctcaggcactcatgtcattaaactcccaaaaaagaagttgtaagaatcatattctctaaggaacttaaacgggtgaatcaaataacctaatgaaaataaacaggagttcatgaataattaagattcagactgatctactaataataattattgtgatatgaataactcttttatgataaacgacacgttgataaaagatgtaagttcatatcggtctagtcatgcgtaatcaaataatacacaacatctttactaaatatatatccacatatgtgacccaaataaaaatcacatgccatataaagtatagtacttagtaatatgtacttggtaattccatattaaaaattctataatttaataaactaccgacttcttttattcatatagtatgatcttaattatcttgtaattccttacaagattatactttttctatatgaatatgaaatttttagatatttattaattatatttctataataaacatcgtcatttatcttatacttgtattttatatattctctattatccattaaatagttacttttagaacataaattccaaaaatatcttttcattcgggtctcattgatgcgaaagtgagtaatttgttgaactctgatggcagaagtttggataataaaattcttcatgatctttttatagagaaggacatggatctgatttttagaattctattacaacttgcccaaggtgatgatcatttagtatggataaaagaaatacttggtatttacacaagtaaagagtgcctataatatgttccaagagtcaaatggtggttgagatttagagggggcaacatttaataaattttggaagaagctttagagtttaaaaattcctccaaagataaaaaacttgttgtggagggtagggaaggggtgtctccctacgatgattcggttgcgcaccaagagggtggagattagatctctttgcccagtttgtagtgaggatgatgagtctattttgtatgccttagtcacttgtctagtagtaaaactttgttggaatagagatatcaagactaattttcattcatgtgatactttcttagactaatatgatgcttgctttcaaggagtagatattgatgagaaatgttttgtagttgccctttgttggactatttggagtgtccgtaatggatgtgtgtggaagcgaaaggtgatgggagtaggtagcattgtagcgttagctaaaggatgccttaatcaatggggaattgttcagaactcagtaaatgagtcatcatggcctttattataggtgggtgatggagtagagcaatgtactttacgacaaggtgatagtgttaaggtcaatattgatgctactttgtttgaggtttgttgtatgtacggttttggttatgtggcccgggatgtaagagattttttgattgaatgttgtatcaatttgtatcaaggtttgctttcaccaaaacttgtagaaggaatggggatttatgaggcgtttagttggatgaaataatagcagtggaggcatgtgattctagaacggattgcttgagtgttgtgcaagcactaaggagctctatcatgatgatttctttatttggtcaagtaattaatgattgtaaaagttttcttgttaatttaagaaatgactattatttttgctaaatgaactaatatggtgattcataactttgctagagcctctatattatattctgtttgttgttttagtttggaggatgttccaacttatttgctaccatatttggtagctgagattgatagttaataaaatttctataattttcattaaaaaaatttgttttgatttttttatttgaatgataaaatatatttaatgtaattaaatccaattaagggtccagccaaagagactaatagagaaagacaaataatgtgggaattcaagttatatttatctgttctattttcatattaaacctaatataaatatacacatagataatttacgttggtagttaattgataaacctaagagattgaaaaataacaaaacataagtaaagattgttaggttttgtttttaaaaaggtaaattgaggagttaaacgtatcaatatgtaaatattagata

SEQ ID NO: 28407 - DNA, 2840 bp, Cannabis sativa
  modified_base (1917)..(1920): a, c, t, g, unknown or other
atttaatagtaatccaatagcttaaaaaatataaccacgatagttacaataaaaatataactattgaaacctcttccatatatatatatatatttgagggaataattaagacttcattatattactcaatcaacaacaatgcttctgtgttatgtttacaatctttattcccctacgcccaatctcctttgattctatacattagctttgagaacatctacaaattttagtaaactaatccccctatttatatcttttgccttacttggcattacaacaaaattttaagttgaaaatctttttgaattgcctctacacattacaaaaaattttatgactaattataaattatcaattctatattttaattaaaatgtttatagctaaatgtattaattttaaaatcacaatttatgataactaaatatatgactaaaactaaactagtaacaaacaagcaaagaaaaatttggccgaaggttatgtgtaaagggaagttttctggcgtcaaagatcgaaacaattatggttacaaaaaggagacaataataacaaattttttcatgcttctgcaactacaagacgaagaaataattttgttgccaaacttaaataccgttctggtgcgtgggttgattgggatagtggtttggatcaatttatggtttcttatttcaacaaactttttttatcttctcaaaccgattggagagaagtcacaagctatgtgcaaacttgtgtatcatcacagcagaatgtcgagttgttgctaccagtttcagatgaggatgttcacaaagctttgttctaaatgcatctggataaattcccagggcccgtcggtatgacccctggctttttttttcagaagtattggccgattgttaaaggtgatatcatcaatatggtcaatcaatttttttataatgggtttcttcctatagatcttaacaaaactattttagtcttaattcccaagaagaagcagcctatggatatggggaatttaagaccaattgctttatgcaatgtgttgtacaagattgtgtccaaagtggttgctaatagactcaagagtgttatgccgtccatcatatccgatactcaaagtgcatttttacaaggccgcttaatctcagataatatcatgattgcctatgagattatgcatcatttaaagagaaaacgaagagggagggatggttatatgacgcttaaacttgatgttagcaaagcgtatgataagcttgagtggggttacctccgtgctatgatggtaaggatgggctttgatggtcgttggattaacttagttatgcaacgttttcttctgtttcctataccatttcacatggagggaaggagttagggcccattgttgctcaaagaggattaggtcaaggtgattctttatcaccatatctgtttattctttgtgctgaaggtttttttagtttgctgcgtagttatgaacaaagtggtttactcacggggtgtaaaattactcggggtgcaccggtaatttctcatatgctctttgctgatgatggctatatttattgtaaggccactgaggaggaagcgtacaatgtaaaggagctgatgcgtacttatgaggtggcttcgggtcaaagaattaatttcactcagtcttctttgttttatagcaataatacttgtagtgaggtgcgggattctatctgtgctatgctggaaatttatgaggcagatgaaaatggctagtacctgggccttctttgttcggttgggaggaataagaatgctatccctggctttcttaaggataagcttcggaagagaattcaaagttgggaagggcgtattttgtctcgtgcgggaaaggagatattgctaaaatctattgctcaagcattgccgaattatgctatgaatgtnnnnctcttgcctttagacacttgtaaggagttagagcagcttatggctaagttgtggtggtattcagattcgagcggtggtaaaggtattaattggatgagttgggagcaattgtgtcgtcataaacatgcaggaggtctgggtttccgaagcttgagagacttgaattttgctcttctggagaaacaatattggcgattattggttaatgatgactctttggttagtaggctctataaggcaaaatattatgctcatggtaacttgttttcttctgaattgggagatcatcctagcttcatctggcgaagtattcttgaagctaaagatctagtacattcttgtgctcaaagaacaatcgctaatgggaagaatgtatccattcttacagatccttggcttccacatagttctaacagctatgtcgtacaaggcatcctgcttttgtgaacaaatcggtgagctacctctttcaagttgacactcacgcttgggatgaggatgtcgtgagagacttgtttgtttcacgtgatcaggaccttattttgtccattcagcttagtgattcggccataaatgatggttggaactaaagacttgagacttgtgggaattattcggttaaaagtgcctataaatttttacaagaatctaaaggtgcttggtgccgtgatgccaatactgaattttggaagcgcctttggtcgttacaaatacctcctaagatcaataaattcttatggatggctgcttcgggtgtgctcccaacttaatttcagctccaaaaatgtcatgttctcgtcaatgctgactgtccattgtgtaacactcatgcagaaaccgttcaacaactagctattggggatcttcgacagagggtacgaaggtgaaatggaggaagtggctgtggtgagttgggctat

SEQ ID NO: 28408 - DNA, 4281 bp, Cannabis sativa
ttatttatttattttgaagaagacagttgaaagcttgttttgcttcgtattgaagcgactaaacatatcagagtttgatattttgtttttcaacattctaatgaataacacgggacccattcacgtacatgaccattatcatacatttcatcattgtatagctcacaattgttttgatttaataaaaaaataaaaatccccaacgtgattcaattctaatttttataggttagagaaataaaataacagaaaaaagaggaaaaaggtgaatttgtgcaataggaaaaggaggaaaaagcaaagaaacacagaagggaggagaaatagggtcttttatcttctcactgtatatctgaatctcatttgttcttcccaatgtagaactgtgaaacagtcaaatattccaaatttaatgccaaaattgcctgctggactctctctcccaaatcccaaatcaatcactcggcaaaaattaaactacagatttattcttggatataatttctacaagggttacgaaagggccaagagcataaggtaaaatgagatgcaatatataagcttatagatttaaaagttgaggaacatcaacacaaagggccactaaaaattaattgtagatgaaaagatctaagtcgagtgtttgtgtaaaaacaacttgaaagatcttatgtcttcagatgacagaagtaaatgcccataagcgcataacacatgaaaataaattggtagattcatcaacatgttttgggttccccgcaaatggtgcgaaccactctatgcaccacttacttccaccatttcttgttctacagctcctgcagttactgggtagtaatgatagtgaagctccccaacatcatcaccagacagcttcttccatccatttggtcccacgtaataaactggtaagaaaaaagttcccgggtgcacacgcattaattatagaatttttactttttggactatttacaggtacatgcacagagagagagagagagagagtataagagtgagtgtgtgtaccgctagcaactccaccactggctccatcacggaatgttgcatgataaattgctcttctagccaactctgaagcttcttcaattgacatatcatatcggtatctgagtgtggcaaaaggacaaaacaataaataaataaacaaacgttagagctagaatgtcaagtacgaggaataacaatcataacaataagaaaaaggtgaagcactaaaattacaaaataagtctccacacacacacgcacacacaaaacctaaacaaggaagagtacaattataaaagccatcaaaataatgtgttaacagatagaatttcttgcaatcattgcaggaaggtagtggattagtttcttattcatcaaaataagtttttgcaaattcaccacaccttattgcagatttcagatctataataatcttcaccaattatcttatccaggcattcattgcttataggttaggtgttacaagaatcatggataattgttactcaaaccatagcacttaattgaaatatacagtacttttgtttaataaagaaagttccaagccaagaagcttccacattcattaatgtattacggagcactgagaaaaaatagtagggggaaaagtacagacccatcatccagtacaccatacgcatatggtgaaccagatccaactgaaaatcgtgtcccctttagccttcctccttcactgtccacatagtatagcccgggaccctgcagctcacaccaaataagttacacttgtcaaattaaaattgcaacatggatgtgttaagatatgcaagtaaaatggaatataatcatgtgatattaacattgtcattaccgtttcatcccatccagcaatcatggttccaacagacagacccatcccacggtaagagtacagaatgttggctaacagcttagatgctcctgtgactgatattctccgcttgtttgccaattcgtgcagccggcactatggtgccaaacaatatgtctattagtgaaaatgggaagcacacaataacatatgaagatgcaataacagaaaaatgcaagaacgttagactatactgctaatagtccaccgccagagaaagttaggcagatagtagatactacacattagtgtaccaaccaataacatcggaaaacctaaatgaagtaataaagactatatccatctatatatattgttaaataagtagaagtcagtcaatgtacaaacccaaaataaaagataagaagataggcaaagcaatcactagctacggaatcagttaccagataggaattcagtaacattatattactaaacatactgctttttctataccaaaaagaaatatgataaatatagagctacaacctcaaacagcaatcagcaagcatacatgctacaacgtaagtttttaaggtttttttttttttttaacttaaaaaataaatgaacaaaaaaggagctcaacagtaccttaatccccagatttctgtgccaaaattggcaatcagctgctcctccagccattgtaccaagcatgtaaggattaatttcaatgatcttttttacagattgtgaagctgagaagttagaaaacaaaatttagtcttatctgatttttaatgtccaaaaattataatttattttataaaaataaagtgagacaaactacggaaagctaaacactatcatctggcgttgaaaacagtaaacgactttgaagcacaacaaaatcacatttgttaactgttcaaggattacaagttcgactttgtttttctattctttcagtgatgaaaatattacctctccatttccccttatgtatattgaattacacacagtaaagcaaacttacatatatagcctcccatgctagctcgagaatcagcagccaccatgacaccctccttgaaaatgaaagccagcgttgttgttcccttagctggcttcaccatttggattgtgtctttcaagaatccatcaagctaaaaaataaacgaaaatgaatttaactactaaataagtgaatatattctcaatataattagtagaaaaatgaaccagacatattcaaactcacatcaacattgctaggaagatcgaatgatggggcagtagataacccatcaaccaactcactgcttgcaccaaaaagcggtacacttgaatccaaaccgctagtgtccagcttcatgattaaaatcctgtgaccacatagttaaaacaaaatctcaacccatttccttttaactattacaattcaagttttattaaattcccaaaaaatatcgatcccacaaacgttttttttacgaacacataatgtatgtagaaatgtcaagcagagaccaggaccagttctatttggatatgatgcgcagttcatgttcgttcattttcccactacccaaaactatacattgattaaggtagatcgaaacaaaaccctaaaaataaactaaaattgccccattctgcaaacaaaaatccactcaatcattctaaattagcaaaaaaccagcaaagaactaggtaaagtaccttggtgatgaacgttagagaacgaggaggacgaagataatcggagagacggagagagatcgagaaaaagagcaagctttgggaagttgcagaagcctagcgcttttagcagagtgggttttcttgtgcaccaggtcactggcaaattgtgttactgggctctatgggcccgaatacaatgggcttgttttctcgtttcaatggacatgaagggcccaagttttttataccaccttttatgtagcttctttttttcttttttctttgatgaaacagtaatttgcggcataaatactaaagttctatgtcgagtagtagatacctaagttatattttttgcggtaaaaatatcttctatcactagtatagaacttccgtaggtacttttctgttttctgccatataatatgtcagatggcgtgtcatgtcattaaaataaatgtcacatcaatctcaccaataagaataaatcactatacatgtcaaatagatgtatatatggtaatatttaagaagaaattagattctatgctatttttatattgtccttttttatttttattcttttttttaagttctttatttttacttctttttctaaagactgttccaattttgtccctgtcacttcaagatactttccaagtgactcacttatgttagggtattttgggtaaagtatatatgaaaagatatatgtttcaattaaacataaa

SEQ ID NO: 28409 - DNA, 3349 bp, Cannabis sativa
  modified_base (2101)..(2103): a, c, t, g, unknown or other
  modified_base (2405)..(2405): a, c, t, g, unknown or other
agttgaaacaaataattattatataataattgaagaacttaatttttgttttctctatatatattcctaaaaggaaaaacatttgagacgatagatccaaggaatggggaggttatagcaagagttgccgaaggagataaggaagatatcgatttggctgtcaaagccgcccgtgccgccttcgatcatggtccttggcctcgcatgtctggctctgtatgtatatatatatttatatattgcttctgctttcacacttattttgaactctctttaatctatgcatgcatgtttgtttagtgctatatgtatgtgcatataagtaatttaataagccatatatattataatatggtatatattaatttataaacaatatgcgtatctatatttatacgtgtgtgagtcaagtgaagtggttatatataaaaatatatttaattatcaaatagtatatactaaattcatcaatacatatgtaagaaaattaacgaatggcgtcatcaattacttagttaaattaatttaaaaaataataatttattatatagttttatttaaagtttgcactcatttgtactgatagtattagtgataatgctggattttctatcttgtactgatagtgtaataatttggactcatttattatatttttctcctttgtgaaagggatatcgttctgacctccataaaatattacaatcagcttatcccttaaaaaattattaagaagtggccgtggtggaaccctatagatttttgtaaacttcccgatccaaataacccgcccaaatcaaaccgagataacccaacaaaaaatataaatcaaaaaacccgacgaaaatatacccacccaatctttatattgagcgggttgaaaataatactaacccgcttaattaacccgaactaactcgaccaacccaaactaactcattaatgggtagtaaactaatttaattataaatattaattttaaaaatattaaccattagattttaatctgatagccaataataaaaaagaaatttaattttttatgtttaatttagctacttaattaaagaaaacattaaaaaaaaatactttttttttacattatatcaaaatatatttatataaaaaatatctaagtcaaactcaaattttttaccatttttttgccgaaaagttttttttttaattatttttttttcagctgatggaacaatcttagtccatataatgtaaaaatgagaaatttttttaattaaatagaaaaattaatcataaaaactcaattttttctaatattaactattcatgtgtaatacccattaagagcaccacatatatttatatattatataatttatatgactattttaaaaatataaattttaaactaatatatttttttatggtggttgatttgaacattaaattcaatctataggattccaccacggccactaaaatataataattgtatgtaaaaataaaaaaattaaaaaaaatattagtggtctgtttggacgggttaacccgaccaaaccgacaaattttattgggtgggttactattttcttttttcttaattgggcgggctgcacttagatttttgtaacccgatctttacattgagttgaataaaatatagcataaaccgaccaaaccgaccgatgtactcttagtggaaccaggtcataactagcacaaatattattaaaaatgtccaaaagcatagtatatatattataagggtctccttctcttctatatatatagtatacagtttatatatacatatatattagaaggattttttttttttatgcaaacctatagtgtgtttaatatataaaacattcaaactaaaaattcaggcggccaattataaattattattattgtactgtgactaaaataattagttacaaaaattatgatttgttgtgagactatatcatgtgtttttagtcacaatatatgttgtgactaaaactaaattaataacaacttataaataaatactgtgttttagtcacaactaattttttattgtgactaaaagtcacatttactcaccaaaaatttatgttgtaactaaaagattgtnnntaaaagtaacagttttttataataatttaagatgttaaaaataaaatttaagtagttatgcatatgcgtggttattttattttatatgcatgtgaattagataattcaactttattttttgtaactatattacatcatccctgcaaatttttgaaaaatttcgaatagtttacagtgcagaaaatacgtttaaagatttttgaacacgtgtggtaaactggaatatcagaaactctgttttgagtacggtaaactattcggaatttttcaaaaattaacagagatgatactgtaactataangaataccgctatgaaaaaaaaataaaaaaaaatatttcgacatgtaatttcggatgtgaaggttgactaggttgtaattagcactcctcttttggtattataaattattttaaatttctcgaaactttaattaaaataaatataatacatatattattacataaaaaaatttaaaattataactactcagaaaatacaaaaatagtatatcagcgcagtactcatttcattgggagtactgcattgcaaaaacacccataaatatttttactttcgttgaaggaaatgtgcaaggttttcttgaaaattaatttgatatgtattatgttcaattcgtctccaatatgtcatgttgattttttatttatttatttatttatttgacagtgtgatatgtcatctacgtgtagatcgatcatatacttgtcactttcactatgcgtattgattattttgaaagatatgtgtttttcctatgtatttatcctagtttgaacaaaaaaaaaatagtaaatcttattatggtagataagggtcccataaatgcatcatctatatatgaaattatactattaagggctcatttaggaagtcctttaagaattagaaatttgaaaattttatttacatctcaacaatttataaagaacctttattttaataattttaattttatataaaattaatatctttaattttactaaatttttttaacttttttctctcaattcatattcttaaaaaatatacctatcaaacaaaattaaatcaaatttttaatattatgagaaaaaaattaaaatgaaaaattatatgaaatattttcttaaaaaatatatatacatgaattagactaaattataaaaataaaatcaaaataagtattgaaattaacataagataatgtgaggaaaaaaaatttaaaaaaaaatattaagaataat

SEQ ID NO: 28410 - DNA, 1072 bp, Cannabis sativa
agaggacaatataaaaagggtatggagtctaatttcctcaattttttttatagcacgatacgacctatattttttatggcacgatacatctcgacccatattttcttatggcccgacacgacacaactttaattttaaaaagcacaaaaatattagtaggactagcacgacacaccgtatttacaattatagtttttagcttttcaactgcctaccttttaagcataaaattactttccatgactttcaatcaggtaaatcaagggtggttcagactttataagctctacccaattagatcaagaggaaattatattgtatacccactttactttactttacttgttttaatttttacttctttttttatattctttaaaataaccaatttttatagatgatgtccctatcagaccccttaggttaatgtaaattatatgttagacttaagtagagagtgagtgtattttgggcaacccactaaaaaaagtgggtatattttgataaaatataatatgagagtatttttgattaatggatgcaaaaaataggtatttttcaactaatcccttggatcaagcgatcttttcatattgggcctgtgtatgggcttgatatctgcgataggcctctgagagggagaagttgaaaaatacccacttttcttacacattaactaaattcacctctaaataaaatttaatttaaatatacctcttttttttagtattgtacccaaattattctcacacactcacataatcaagacataatttcaaacataataaatttgtattttttgtagatgggtatgtaggtttgtgaaaaagttgggacaaaattttgattagagaaaaatgaaaactatggtgaagtgatagaggtaaaattggtagaatggttaaaaaaaagataaacacaatagattttgaaatagaggataaaaattaaaaatatcaaactaaaagagatatataatgtaattttgagaagggacactcaatatctatcagaaaatacaaataacaatatttatataacagagaagagaagaaaacaactagctgaaagg

SEQ ID NO: 28411 - DNA, 1810 bp, Cannabis sativa
ttttatcttaaattattatgatgtgcactgccataaaaaagaaaattagagtgaaaaatctcttgaatgctaaaatagataaaggtacattgtaaaattttcctataatttgtgaacaattataggtattcaaattttttttgacaaattaaatttttattattttcaagattagtgtgctaattactagatactctttagtctttttttaataaatatactctttaaccttactttattcttgttcaagatgctcttatgtgtcaatttcttctaaactattaaaattattagattcaaaaactcttatctaattccgttaaattttactaacataacaattgatcatgtactaaatcatgtcccaaattttgacactaccacatattgtctcccaaattttaacatataccaaccgataaacttccgttaacaaaattaaacaaaaatccttaaatttaacaattttactactttggatgaaacttttaacatagcatgatttaacacatgttaaaatttcagaaactaaaaatcctagttaaccattaattaagatgagaaagtaaattaccaattaattcattttttactttttgatgagtgattaagaaattgtattagattaacgccttgttgatgttgatagaaaagtgtatactgatatataattataaataccatcttaaaaatcaaatgtaaaatagagaaaaataaaaaacaaaagaatactatttcattggtagaaaatatgatttctaagttctaactgtatattatatgtaagaaaaatcagcaacaaattactcaattaaactaaccataacacaaaagaataggattaagtaataatctaaattcactaataccatcaaaattattaaactcatcctttagaatctaatcatcttctgcaaatatattttgaaagagggtttcaactgcaaagagtcaaaagacaaagcaaaaatcagataaaaaagagcaaataatcaaaattgtaacttgttaagtttgagagtgctccatagtccataatagtaccttcctctttcggtatgttcggttgatcgatcaagagttgctgcagtgtacttagatcgtttggactgcaatttatgaacaaaaccatagttagtaaaagggcatttaacactaacacacaactgtttaggctaacataccgaaaaccggggtgtacatcgatcggttttgtcgggttatagtgtatttttaccaacccaatataaatgttgggttgcaaatatctaattttatagagtaaactcggcacggcctgcaagtttagtaatttcgtgccgtgttttattcctaccaacctatttttcttaaataagccaacctgtgttcttatacgggtttaaattcatgctctatatttttgcatttttattgaaattgattagtgaaatactaaattatgtgtattttatagttttaattattattctatattttttcaaaagtagttatacacaatcataaaaaaaatgtataattattataatttgaacaccattatcattttaattgataaataaatatttatcattgttattactatcaaattatgtgttatgctttcgagctaacctattcgtgcttacgtgatttcgggtttgtcatgtcaaaccgtgtttaagcccatattttttcgttttgggttgtgctcgtgctggttttataccgtgtcaaaaagtccggctcatatttacagcactaccgaaaactacctaacactgtatatttcagaagcttatgagatgtacataatacatattcttcaccc

SEQ ID NO: 28412 - DNA, 1425 bp, Cannabis sativa
tgtgcacggggtgatgaagaataagtcttcgatccgaaggagaaggtccctctcttgtgctttctctagggtatttataggccaactcttttgtatgggctgtcttggatggatcactgtagggatgaaatcctaccgttggactggtaggtggaatatttctcatgtggcattttacgggtgttagatcgtaccggctgaacaggctgggcctaggacgcgggtcacctcaggatcattcctatttgaattttccttattcctacccattggattatttagctcagtacaaaaggacacacatgctctgtatgatagcatgtcgtgagggacaacttctgacatcgtacatgaaaagcctggtcactgggtccgtagcctgacacgcgtgggttgagttttcccaggccgaaagcataccctggactggtgtatcctcgaatcaccttggcctttctgagaggatccatatcccttgcaggagcaaatggcctcagctcctagaatggaatgagtcgttggttcatgggtttcgttcacgtggccagcagtcagggagccttcctttcacggagacctttcccgcgaggttaatgcctttgtctttccgaagcgtcaattgagggagtagggcagtgaatgaatctttggccttttttaattaacatctacgtcccatgcttacaaaaatgcaggtaacaataattaaatcataaaactacattaaatttcaaattttgactttttttatataattttttgttttaaaaaaatgattatatgaaatacaaaccagaaaataatttaattttataaagtcttgattttttaattattttgaacttaataaataatatttttgctttaacaaatatacataagtatatctactatagtcatcaataaaagtaataaaataccttttaccacctctagttagaattctatttaattcacataaatcactatgaattaattctaaaaattttgaatttctcacaatattttctaatcatctttacttttacacaagtttcacatttaccataatttcttatatcacaatcaatcatagtataaaaaccaatatgagctaatctaagatgccacaaaaataaagaattatattcaatcatataagtggaactagatgctttattattgctaacattaaaagttacatcattggtgcacaatttcaccattctgtcacaagagtactccttgcccaaaaatacattagacttggtaagtatgagcttaccagattcataaacggccttaatgctggattttccaagtaagtcaccactaatcaaatttatattcatgtcgggcacataagacacattcaccaatgtgactttcttaccggaggtaaaaaaacacatcaatggtacattttcctagtacctttgatttgac

SEQ ID NO: 28413 - DNA, 3379 bp, Cannabis sativa
  modified_base (2480)..(2481): a, c, t, g, unknown or other
  modified_base (2766)..(2771): a, c, t, g, unknown or other
aataaatctacaccccatctctctctaaagagctacatgttatcatcatttacaacataatatgggaggtctagaattttatgctcaatatgctctaatatatacattctgcaatcaccactgtattaataaataaacaataatttagtaaattatggtcaacatttatgaaaattttaattaagctacttagtaaatgtattcgcaaaaaagttggattattaccttgtatttttccgtggtacaacctttttgtcgacgagtttccaatcgaatggtctgacctgactttcagaggctgttatttgaaggaccgtgagtatataatgagtatcaaataaatcggactggtccaacaatgaagttaaaatcttgcatcaagcatccattaacttcttcaaatcctaagggttattgatccaatactcgaattaaagaagaacaacttctacaactccaaattcacctctagagccactcaatgtctctattcaccacctgctgagggctctccttctcatgattctcagtcaccacctggtgcaactagtgatgcttttgcagcacaatcctaaaaggtccttcatctcggaccagtggccaggaagcttctcttgaaaagaaagcacgaaccaaaaggcgtcatgacaggcctattcctgttgctaaaaagctcaagcttaattctccctcggcctcctcgagtaatgatgaagaagaagattccatggaagtgtcttctaaggaatccgatttcaaaactgagtctttttcatttgataaagtaatttctgcagaagatgatagtgtctcttctgaaattgaagaagtcccagttaaaaatgaggaagattttgttgatcaggatcttgaaccatctttgccaaaatctgcagcagtaacttctcgatctgcttctgcagtcaaagcattagcagtagcaaagggaaaacaacctatgaagagctctttttctggtaacctctcttcctctcaagttgtaaattttagatttttttataatgacaatcaacatgattggaatttatatgctacccgtaagtttaaaatgagaaattttttgatttacatgctcatagagtttatggcattgtgaagtatattcaatatcagaattaggaggacactttaactgcctttgaaggttatattgatgacatagctaaggaatttaatgctaatttaactgatgatttgcttgacaaaaaatctaagttctttggtaaagtctatgctcgtggccattggttttcattcactgaagatgaaattgccaaagccttgaaactgctaacagatgtgaaaagtgatgaagtgtctatggatcgtgactgcattcttactaaacttactagtgaacaagttgaatgggctggtggtcaaagtattctgagtatgcagtagagttttgggtgtggtactatttcgacggttctttatcgtgcaatagaggcctgatatagtggcttgactgggttgttttattctgggaacgacgaggctgatattttgcttgcacaattttggagtagtgctacaaacgtcttaaagagagcgacttagtccgcgactcaatctaaatttttatttagtaatttcgttactttttattttttgcagcaacttatccaacaaaaataaaatgaaatgaaatttaaaatgtataaaaagaaggataaaagaattatattattttttttcatcttgtatttatgtattgtatggatttttttttattttaaaatagaatagtcatatcacttaaatagtaaaaaaaaaaaaatttaatactttaaaatacaaccacacaaaaaaaattaaaaattaatttattttattttattacctcaaaccaaataaaatttaaaagtttatcattacattgttaactttccacattaatccatgtgttgcgtgtttatgagaaatatgcctctttaaccaaaaaaaaaatgatttggattcgaattcctcttgccttttcattagtatctatcccatatgatctacttgatcattaaattgctttgaaacataatattcttttatagcaaataaagtacttcacatttaattacttttgctctcctttcggtatagatttattttatattttttaaaagaaaatatatgaagtaattaatgtgaagattataaatattttaaagtagaattaagagtgtttattggatcacacctaatatttttaagtttatcaagattcgatttaattattaattaaatgttaaattttaacatctgatttgatctaattaatttcagtcattcaatcaatccaacatttattggatattggattgaatcagttttatccattgtatatttttttagagattatttacaaatacacaaaaacaacaaaaaaatttacaaaaatatagttgtacgtaattttaaacatttttacaattttttaaattttatttacagaaaatacnntctttttatgttgtaatattgttaatttgttgttgattttttcttatctgtatgttattttttgttgttgtttgaatgttatttttctattatttttatataattttcttgttgtcttcgtgttgtttctataaaaaactgtaaaaaaataataaaaaaatcttaaaacgtaaaaatatgatttttttttaataaaaaatcatattttatgtaactatcccttttttatgtatattattttgaataaaaatcataagatctattaattaataaattcgttcaaannnnnngaacgcacttcagaggaatagtcttccaactgaagcacacgacctgtagagaaacaagagtctcttgccaagcaatgagccaacttatttgcagatcgttttacaaaacacaaatcaacaaaagataaagccaaaagcaaatttcaaacatcttgaacaataagaccaaattgtgaatacataaaaataccgttctgaattgcttggacacacaccaagctatttgtttccaacatgatctctatcccatgaatgaattgtaatccaactcaatgcttctttaatgcctattatctcaacaatttcgggttgaacagatccaatcttctcattcttgaatgcttctaccataacgccatgatgattctgaactacacaacccatgccaaaagacaagactcgaaccaaaaaaaaactaaaaggaaaagactaaaaaaccatgtcaaaagacaagattaatgggaaaaactaaaaggaaaagaccaaagaaccatgtcaaaagacaagactaatgggaaaaactaaattaagtttatttaatattttttggatcagatcagatccatctaatattttagatacaatatgtattggattgaattggatcc

SEQ ID NO: 28414 - DNA, 2435 bp, Cannabis sativa
  modified_base (27)..(38): a, c, t, g, unknown or other
ttaataagttaatctgattatattgannnnnnnnnnnnttagggcataaaacccaacacgactgacaattatgagtctaggcggtatgcccaagagtaatttcttctgtacctcctagtgggatactagacgcagcagctggttgctgattaatagcttgataggctctctgtatcagtacggtagcctgccttgtttgctcatcgattgctgcttgctgagccttcattgtttccatctccctatccctccactaaatgaactggcatcgttgttcatcaaatgaaaggtttattgtagcacagagatgctccttatcatggtgcatggtgttagtgtgaccatgcatgagtccaagggcatcacggagattttgaatctctttgtcatcccctaccgtcctctgagcattggttgtggagtggattccaatgttgggagtgctttgatcggctgcaaaagtggtagtcccaatctcttgtacattcggtgtgatcccagctagaggggaagttacaccttggccgagagtttgtggctttgtaataggatactcgggattagttcttggtgcgacccttgtattccctggggtttgcatagtatgatctatcaccagtgggtcactttgatcaaccaagcctctgcgagtttgcaccaccattttgtgtccctgttgaaacttaagacaaagaacgaacatggattttttctcacaatgaaatcactaaaatttttacctcgctttgagccaacgatagtgagccaattaataagcgattagaaatataataaaaacagagcaaaaatcaataagcaataaagaacaccatgttttaaagaggtttgactcctttagtttggtaatagcgtactccacttagattttatttatttgataacaaagaacacgatgtttcctctgtcaaagctctcacaatgaaatctccgagtgttttctcttagatccctctttaaagcaattttttcgatcccttttacagtgaaggtagatcactttttatagggcttaatgcatgacggaaggtttcccttttgcatacaatatctataattggtaagaatatttattacataatttgaatacctgagatgagggactgagacaacctgccatatccctctgatacaatcccatgattgtaggaattaccttcatgcttgggcttcacgatactattctaaagtagtcaagtcttggtacagagctcggagaactaacttcatgctttgcttggatagtctgccgtttactctgctcggacaagcagactatgtgcatgcagatatgttgcttgaagtctgttcggaatatttctctgcccaagtacaaggaatgatggacacgtatcactcgtacatgctgccacttcatagtcaaaaaaatgggataacaaatggttacttaaagcatcttaagtttgatcaccatataattgttcaagttatgattaaaaacgcaaatgaacaaacatattatgttcaaatagaaagatatgaggcaacaaacgaaaagaaataaataaaaagtaaagctgaccatccaacaatgcaaatctgtctttacaaaattatttccacaaggggcaaaccattgtctcggccaaaaaaccaatttcctaaataattaaaagaaaaaatagttaaaaaccaagcctacatagtaggagacttggacgggtctttatcttcttcagactcaattgcctattattcttcttttaaggctttctcgcaataggctaagacttcttcgaccccctcccccaagaaacttaagtccatctcaggatttgccatccaagctcggtaaatggattgttgagcaacatcattgcaccgttctttagcattggcctcagcgccctcgagctttatagtggctgcattaagttcttgttggagtgtattacaagacttggacttgtcctttgcttctttgtgggcttcctcaggttcagtcttatgagtcctcttcatctcttcagcctccttggtcagacagaaaatctgcttttggtcatcgttcatgttatcccaatttttgtactctgacgtggcatcgcataatggtgacacgtggaatccactttgagtatctgctaagagggaacagtacgagcaggatgcctcgctagcatgcccagagctaagctttcagcaatccacgtagaacaaccaacacttagcgaattcagcttccgcattgtgagtcatcaacgaaatccctataacttggggatcagataatagagatatggcatacccaagatcccacgatcagtgtattctgcatttatcccacgatcaatgtattccgcatatatccaacgatcaatgtatactgtagggatcgtgtaatccttcttcttatatctattgtaacgagaggggaaacacttcctctccaagtt

SEQ ID NO: 28415 - DNA, 1192 bp, Cannabis sativa
acattatctataataataaagtaaaaaaaataaggtcatttacttgcatttctctttaaaaaataagtgttcatgactctccatttcagaccaacacaccaggtaatttgtgtcctctaaaataatgtgaaacttgtaaaacatatctcttgtgagcaagttacaatgattaacctgccacattataaatctatgctttggaagcagcattttgctccaaataacttgcttgtaagggaaaacaacctgctgaagttgatcattataaagaatagaagttgatattttacctcttctcccaacaactagcaatttatctttgctaaatttcaatctcaaatggcacagttttctccaataccaactattgtctatcttaagctcatagtctcacaaatcctctccttttaagtaaattgtattcacccatttcacctaaaaaatatcatatttttccataagaacccaaatgaactttcctagaatggctttattccagttggaaccactcttaaaatcgagctcaccataagccttaggaaggcaaacggtgtcccaagaggcaagatgaatcttctatctcctttaacacccctcaagaatcccttacacaacttctcaagctctttgataatactttgaggaaagataaaaatgctcatccaataattcctaggccccaaaagaacagattaaatcagttgagtccaccccgcaaaaaaaagatttcgagtagcccaagttaacaaacgagcttaaatctttttattattattattattatatcgggtattatctattaatagaaattttaaaaaaataattataattaagtgttaattttaaaaatattaattgttaaaattaaaattttaatccaagaccgataataaaaataattagagtttatgtaatttactatttaatgaaaaaaaatctcttttttatatattatatgaaaaatatgtatatttaatattacttttatcgggataagttgaggattaatacatctcttttctatccatcaatcaaaaatactcttattatatttcattaaaatttatccacttttattagtagattgtctaatataccattgtcctccctttaagtgtagcacatgatttacattaacctaaggggtataatggggacatcatctataaaagttggtatatcttaaagaata

SEQ ID NO: 28416 - DNA, 2008 bp, Cannabis sativa
  modified_base (1249)..(1259): a, c, t, g, unknown or other
  modified_base (1959)..(1971): a, c, t, g, unknown or other
catctttttaaggatactcaaaatttctacatcattcaaaaatataatattttttatatttttttttttacattatttttagcactcttatttctaaaatcactctaatagtataacaatcttcaaaaatactataattataatcttacacattattatttaattttttagtaacaataattttttagttttaattttctattaaaaaaataattgtggtatcaatactagtgtataacattcacacatattcttagaatagtattttttttttctccaatgatataacatctcaacattttgccacttcatctatccacctaagtaaacatcccttaatattttaccattagagatgctcttaaatagataatgtatattttggattaaatttgatttaaaatataccaaaaatttatatttggccaattttttgtatttgtgctccaatgcacaaattaactataaaagttgatattaccattaatgctcattcaaaatatataaaataattaattttatttatattatcttaatatcttagaaatatattttattcaaagttaatgaataatattaataaataacaaagaggtcattaaaaaatgtagtatttatcttgggctaaaatttagcccatactatcttttgtactaaatttgacacaatttttagcttgagtcaaatttgacacacattttacatcaccattaaaattaattttagcaaaatgttctaaaaaaaataagaattcaccatatttatagctctcacttggagatgctcttaggtgccaatcacttctataagtagcgtctcataatggttaataatattctctaaagttattttttcaagttataagagatttaatatttaataatactaataacaatatgatactgaggagagtgataaatatcaatagtacttttttacaattatctactatataagagaatatcattaaaatataggtaagtctatggtagagcccggtgtttcgatagactctttatttgtttcgctgaaaattttttagttcatttacaattttaaaaaaaaattaaaagtttattttttgatataccaaaatagataaagattcaaccaaccctttaaagatttactacataaatcttttaaaatatactattaaagaaaaatgctaaaatgcaccagtagtgtctagcgttctcttatgtattaatattcatattagtccaattaagtatcgggtctcatatannnnnnnnnnntaatttttaaagagtatcgctagctaatcacaaagtaacatgtctagaggtattagataccactagtagccaataaatagtgattgttataatatagtttatactttatattttgtagtttgtaccgcggtagaaataatatatttttatgtgtcttattattttataattatatttaaatttttagactaaacattcttttcttattttactacataagttttttttcaatatatttttaataaaaatattaattatataattttttttttttaaatataatcctacttttacatttattcttcaaaatggtctaaaaaggtaaagaaagataaacgtcatcaacataaacgtctcaatattttgtatttaatttgttttttttcttgcaaaggtgggcctgaagtaaacatttattacacacggggtacgatttcttcagctaattgtcctttttgctttatttgcatttgttttaatactatagcctcaaatatgtgtttagctttggttcttcaaatgtttcctttaggaattaggacccataagaagagacagaaagggaaaaaactgacaaaataaaaaaggcattgattgttaatttattgtgtatttgacaataataaaagcgtgttatataattttcaaaaactatcataatagtaataatcacacctacttaaaaaaaaaaaaaaaaaannnnnnnnnnnnnaaaaaaaaaaaaaaggggggggggttttttttttttt

SEQ ID NO: 28417 - DNA, 2875 bp, Cannabis sativa
agctttcccaacgacattcaaatgtcgttattgataccttcatttttaatgaggacttttaggcgttggtaatagtggcgttggtattgaccataattcttgtagctatggtcttaaacatgcccctcgtgcatggaatgacagacttaaacactgcctacttcagtggggattcactgcctctaagtccgatacatcattgtttatctttgcagcaggtcctagtctaatcattcttctagtatatgtggatgatatactaattacagggccagacacatctcttatcaacaagctcattgataatttaaacaaacagtttttactaaaagacttgggggaggtccattattttctgggagttgaaattttcaaagattctacgggtatgtatctatcacaaactaagtacatcactgatctactggtcaagcttcacatggagggtgccaaaagctttccaaatcccacgagtgctacagcaaaattgtctttaaatgaaggtaaaccattctctgatgtcatagtgtaaaagagtatgattggggccttgcagtatctatccttaactcaacctgatgttactttcatagtaaagaagctcagccaatttctcaaggcacctacaacctgtcattgggaggcctacaaacatcttctgcgatatttcaaaggtaaaatttcagatggtctaatattttgaccaactactgatatggctctagaaagctattctgatgcggattgggaaacttgtgtggatgatagacgttctacaagtggatgtgtcatttttcttggcaaaaatcttatattctggtttgtcaaaaagtaacaggttgttgctaggtccagtacagagagtgaattcagggctcttgccaacacggctggtgaactgaaatggatcacttccttactaactgagctcaaagtccagctgccaaaatgtcccattatctgagtacataataagagtgtcgctgcccttgcaggcaatctagttttttacgctcgatcgaagcatattgagatagatttacactttgtgcgtgatcagattttagcacatcagctagctattcaatttgcaccatctattgaccaggttgcagatattctcaccaagtcaatactacaaaagtggtattttgcttcggttttaaagtgacacaaaaactatttgtgtcggttagggtaaccgacataataactacagacgcaaatagtcatattttttgcttcagtttagaacagacgccaaatgcttttttgcttcggttatgaactgaagcaaaaaaaaaaaagaatttttgcttcggttcataacggaagcaaatagtagtgcaccgacgctaattagttttttgcttcgattataaactgaagtaaaaaaataattaaaaaaattgaacaaccaccacaccaccacctccatttttatacaagaagtcaattttttttacaacgtccaacgacaataattccaactgaatatatctatttcaaatccaaaatctattacaataatataaatacaaatatattttagaaattatatcatattatatataaattttattgtatagtataaacatatatatatataaaggagttgatatagatctgaggaggatgggaccaccggagagagaaaacctataaaaaaatgagagacggagaccgacatgagagagaagcagtctgtgagaacaaagaaagatcaaaaagaaagagagagagttacctgcaataatctattgactaatcactttccatttgtttatatatagaactgagcacaacaagaaccgttagcaaagaaatgatagtaatctaatgaagtaaaatgtctcataaatcaaaataagcttaattaagagaaaataatccaattacccaaataaagtggggcggaatcctgggttgtctggattcaccaacccagtaaaaccaacttcttttcctctaaacattgcttaaccctaaaaaacaaaattgtaaccatacaaaattgacaaaaagataaaataaataaataaataagaaatttagaactcaaaaatacagtaacgccataaaacacactcttttagtcttattagacatgtttataaattgaattgaggcaaaattttgtattttcaaaatcagaaatgggttgtgtagcttaatcaaattagattaattaccagtatcgtaaagttgttgccaagaacaatgcaagtaggaaaagacctatcaacagtttaagcagcaacagtcaaaattgttgcaaccatcttgttagtaactttcttgagttttgctttcaatgaaagcaccaaaatattgactcataaatctagactagacttttaacccacacccgctcgctgggatgatgcaatgaaaaagtagttaagtattttaagagagagaacaaaattatttcacctgtatcgcgacagtaatggagcttcatttacttcgagaatttatttatcacgagatggtaattacagaaaaagactaagtgtcagaagctccaatttctagagagagaaactagagagaaaagctttgaccttgtgggtattgttctggatgtgaaaaatagggggaaaatacaaataagatattttttaccgttgatgatgatctaacggtgaaaattaacttttggtggtgatggccattttttggagcccgacccaaagcttatttttgtaactcccatgtggatgaaaattgatgatgatagcttcagaattacgactggagtgtgagatgtgagctgatggagcattaaattatcttagaaatgcaagctcaattgcatcaatcgaatcaaaattgagtaagctatggttgttttactgaaggtagtgcatga

SEQ ID NO: 28418 - DNA, 1572 bp, Cannabis sativa
aatcaaaacaaaacaattaaaacaataaaccgtaaaaacttaacacaatataaaatttacataatatttttgataaaaattctacttcacaataaaagggtaaaaaaatttaaaatttaagtatgtggtggaaaaagtcattaaataatataattgtgatattggtattaaactaaaccctgaaattgtttgccacaaatcccaaaaccctttgattatgtttttcaaattcaatcaaccaagaactcccaacctcatcgattcaccaatcccaaccaccgtgtggcgcgccggctcctcagccgacgcttccacccaactcaccgccaatttcatattccggtaacccatcacttctttcattccttttttttgattcaattcttcatatgatcaaacaaggtatgatcagttctttgtgttcttcaattactcgtttttattcattttttcaatacaatttcgataaatttatttgctttatgtctcaatatgatgatatatatacatatgtatatgcttatgcttttattattatgttcttatgttaatcttaaagcttaagtatcaagctaagctgtgtattgattggtttttaagtgctttagagaatcgattactagaaaagattatacttttttcaaaggggtgttgaagaagattattatgtttttatgagaaaacttaaattatatacaatattgggttgtgtatttatagaagtaattgtaatgattagtatggttttatttgatgtgtttttagtttgattctaagcctttaacaacctttggaactattatttgattttagtacttttggggaattttatttaaattttgcaaacctatttatgaaattcttatttattttcactttctataattgggaaatttagatacttacttccttttttcagttgcttttgattattacttcactttttccttttcttactgaaatgattttcacaaaatttcatttgaatggatgaaggtgaactttttttaactcatgaaggattcaacaagtaacggtatgaactggtttgaaggaatcattccagaggttaatgatataatgcttcaggtgatatttctgttatcacttgcttttagtgtgtttttaattttatgattttctttctttgttttcatggggatgtgttttgggtcattcatatcgaactatatatttttagtgttaaaattttgagtatgttttcagatagtttcgttctaagctaatcttcaatgaactcgaactcgtggggttgtagattttgactgtagtttgcaagtcctttcatcatcttagtgaatctcttttttacttgttgcagggtacatttaaatatgttgaaaaccatgtgaataatgtaggtggaaccttgaaaaaactatgttctgatgttgtccaagattttcttcctccttcagcggattctgtaaattgtgaagctgaagaactggttccagaagaaggtgctgccaccggtaccattacagagaataactcagcgattagtatcgagaatttttttccaaatcttcttgttgaaaaatcaccagt

SEQ ID NO: 28419 - DNA, 2178 bp, Cannabis sativa
  modified_base (873)..(873): a, c, t, g, unknown or other
ttctcttgcaactaagtaaagatcgcttccttacatagtgtagtccgaatgacaagtcgtgtttgacaactggatagggactcgcatgtcccacgttgtcaacatgtgagatgtccatcaatgtgattcaaggtgaacgcagacatccaaacaataggtacattagtcgtttagcgaatatagaacgcatctaaagcctgcgagcttatgcgagaatatgaatagacaactcgcacttgataagtcgcgtacgttgttgcacttaataaaagaacgaattaaactattttttatttatttacgtttattctgatttaatattatcatttattgtaaaaacggttctaaaaccggtcagttatgtaaaactaaaaggacacttgctttctatataaaagagtaatccaaatcaaataaactaagcagaattcatttgcaacagtggactaaacagaccgtgattttactgaaccactatatttccttgtgcccttattattttccagttgttctgttatttttggtagctctgcgtcgaatacttgctactttaagtgagtgttaagtgcaagtggaatgataattgaaaggatttagccgcaaaaatctcatttatttttagtataaaaataaaaaagttgacattggggagaagagaattttttttaaattaatttggagacaacttatttctatggccatgtaaaattataaaaaaaaaaaaaaaaatctataatgcaccagtttaaaaggggtacatcggtgtaaccctatatatctcgatattcaaaagaaatttttaatttaattttttaatggtcgtgcatattgcagttatttaagacatcttgcaaaattttaagaaatttaaanaaatttaacacgccgaaaataaggttcaaacaatcgattgtacacgtgtgtgaaataaactatttgaaaatttctttctataatgtaaattattttaaatttcttaaaattttgtaaaatgtcttaaaataactataacatacacaactatcaattaaattgattaaaaaattcttttggataccaaatcaaataggtatgtatcgatgcacattttttatgagggtgcattataaaatcacccaaaattataattctttctaagttctctatattatataagaaaattctacaatacactccacttgaaataggtgtatcaatgcaaccttatctgtttcagtatctacaaaaatatttagtccaatttttttttatgatcgtatacattgtagttatttaagacgtttgagaaaattttaagaaattcaaaaaaaattagcatgtcgaaaatagggtgcaaagagtatgttgcacgcgtgatttttttattttatacgtacgcttgtgaaatagacggtttgaacattgatttctatattgtaaattattctgaatttctcaaaattgtgcaagacatcttaaataaatataacgtatacgactataaaaaaatttaaattataaaattcttatagatgtcgaaatagttagggattttatccgtgtaaccattttaatgggattctctagtccctatgctcttcgtagtgacttactctgcttcggctacgactttgagattgttccctggattttctccacgacgtccagtctcattccggctccgagcaacactgaattcccccagtttgcggcttatttgtgctcctctctttggcatgctagaaaccaactcttccaccaaggtattgccccctctccttcggctattattgagaaggttttagctgctcttaatgactataacagggagtttgagagaagtcgggcctctgatggagaccctctgttggagtcttggagaaatgcccaacctgcgcctaaaatggtgaatttttttgtggatgcggctgtccgaggtgatcttgtgttcattgcggtggttgctctgaatggggagagggggactttcttgatgcggtgactgccaaggtcaagtgtgcatctccttttgaagccgagtgctgggccttgtgccatgctttctctctgtgtttgcagatgaattgtgtggacgccaacttcttctcggattgcctctcccttgtctctgctgtccgtggctctaccatcccctcttggaagctcactaatctatttctgcatttattttcttgtctg

SEQ ID NO: 28420 - DNA, 5047 bp, Cannabis sativa
aaaaaaaaataaaaaaattcaaattattaaattaatttaaaatcttaaattagaaaaaaaattatatcttttgaaaggattcaactcatgttattgtacttgacatataataattttaccactcttacaccattattatattcttggttgtattgattattgtaggattaaataacttgaatattttgtacttttgtagctacagttattgtgttaagtagaaaataaaattaattaaaaataaataaataaatttcaaattaaaaaaataattaattgaaaattataaatagtcataagataaataagtaaaaaaaattataggtttggagtttgttagttgaacttgcaattaataatattgaagattaattgtaaataaaaaaaatatattaattatggtgtatttttcaagggttaatttgagccatttcattaaatcaaaggctacaaagttctattcctattgatagataaaaatcacaatacctattgtattagctccctaaaataaataaaatattttactttcacaaatatatttaagactcacatttatttatttaaacaaatatataatttaacaaaatacctataaataaaaaaaaaaaactaattaaaaagaaacgtcaaaactaaaagaaattaatgaatatgcatatattaaaaaactaattaaagttaaattaaaattatacaaattgtaaagataaaaaacatctaaatataaaaggaattattacatgaaaaatacaaattgatactttatttataaaaatacctccataaaatgtggataatatttatatattttatatgcttttatttaccaaaatacctcttatactatcacttacacacacaatcagacgaaggttgcattagacgaaggttccaattccaggaagcggggatagtgggttgaaggtatttgtttaattttttttatttcagttgtatattcgttatttatttggtcggctggaattttttttgtaatattgactccgattttgctcccccatggctaaaggtggtcgtcatccagtaaaaaagaagtggaaggtgtctttgcctaaaaaatttcaacttcgacggccagaagggaaagaaaaagtcaatttttaagacaattgtggtaaaactgtaatgcaaaagttatatctgttgcaagccaagtaacataaaaccacgaaacaactaataattcaacatatttaatacaagaaaatattacaacaatcgtgttttatctattcaggtcgcgtgcaactaatgtgcaacaaaaaaaagttaaatgtgaatgtgtatatgtaaaaaactatttgtctatattttttgtgtcactgatcgataattacttgtactttaatagtaatatgtggagaaataactgttcgcaaaatgtttatgcaactataatacaactattatgaagcattaaaaattagagtagtgtttccacgtgcgtaactctatatacacgcctcttcgtgaattaatatgaataaattcaccgtaagaattttgacaaacaataaaaatacaccaagataaatattttactatagtattgatgtaatttattttcgattatacttgagttggattgtttgggaagaccagcacaacattttgagatctacatttcatggatctgaaaatttgaagtcaggacattaattttatgcgaattaaactggatttatagttgaattttagttttgtagtatttttttgtactttttttttcatgaattccacacaacccttgttttgatttatttcaatcgtcttcttaagtgaagtccccaaaagttatggtggttcttttcagggctggccttgagaatatatgggcctaataagaattagattttggggccctggaaaatataaataaaaaatatttaaaaagagtgttatgggattcgaacccatgacattgtataatatgttgtggatcttgcttttagccaacgacagtgagtcaattattaagcaattaagaatataatataaatagagaaaaaataagtaattaataaagaacaccagattttaaacaggttcggccccgtttgtgtggtaatagtctactccccttcgattgtattaatttgagacaaagaacaaagtttttttctctctcgaagctcttacaatgaaatctctaagtaattctcttacatctctctctagagaaattctttcgatccctttcacagttaggctaagtcactatttatagggccttaatgcatgagagaaagtttcccttttgcttgtaaaataggaaagaatattcattacataattatgctacactaaacaggaaaatggaacaggttaccatattcctctgactcaatcccacaattgtagagattttcttcgtgcttggacttcacgagatcattctgaaatagttaagtcctgataagtagtttggaaagccaaacttgttcctgctcagatagtctgccttccacactgctcgggtaattagaagtaatacatgcagatgtgtaatatggagtttgtttggcacatttatctccgcccagatgcgaggaatgcaggacacgtgtcacttgtgtattctgccacatcattgtgcaaaaaatgagataacatttcccccaagtctgcgcgggacctttgtggtcgcacatggacttcactcggtttggatctttatttgaacgggtagcaattgttcaaagttcagttgatgacccaatgtgactctgaccaagggtctcttcacttttgggctcattaatgttgattgacatgtaactcaaaccacgcttaagaattagcacgttttgacggttgtccttcaggtaattgagtgcataatgtgcacttttaggggaaattcgaggtatttaaaatttgaaataattactttgcctcactaatctgcttataaatagggctgaaaaccttaatcaaccacttttagccattttcgcttttgaagaatcagagcaagaaatccattttctttcaaatccttcggagaatccttaggaaacttcgaccaacgtcatctgagaaaatctcaagcttcgaacagtgagtaagcttttcatttctttcctcttatatgcttgaatatttgattttttgggttcctgttgcatagcctgatggttcttgaattcgttctaggaaaaccatagaaaatttaggtttaggaatgtgaaatcttgacaatgtttaaccacgttgcttgaatataactgcgttttaatttcgattccataatactcactttcacttgcccattcgaggcttagtgaaaatcaacccttcattcgaaatttttaaattctggattgcaaacctcattatcatgcaaaatttctattttggatccctttattagacctggtcggtataaccaacctatttctgttcattatcccagccaaatgctcatcttgtgttctacatttttgtagatgaaccttggtgagttttggggaagggagcatcatatcgaaaaggatctgcttcaacttctgtacaaggatcatcttcgcctccgtgctagtccgtcttcatctagtgacagcctctccaattcaagcttcaaagattggaagataagtagtgaacatacacctttcctggaacctgaagtgcaacaccatttttaccctgaccagattgaaggttaagagtacaggcgtttcatctgggagtttaggaaggggtggtggcgttacctaccgtccaactggacatacattgtccaaccagatattgttgataccttgcctgtacgccatccaaatcttgctgctgcaggtacgcccattgctacattttccgtaaccatcgccagccataccaatcaggctccgtcaaggaataggatgacaacacaaaccaaacaaacagtgcaaaaatcttctctatctaacccacacgtagctcggctcgccacaatgccaagtgcagaataggcctgacctgttgctgagcaggaagacattgttggggatgctaatgtccaagaggtggaggatcagggcgagctctgtcctgaaactccctctgaagctgaggaggaaggtgcaactcgaaggtttccctttggtggttttagtgaaaatggacaacctgtgtccgaggtcggttaaatcctggaggctggtgaagactacatcaccgaggaatacaccgaggccgttccttataggagacaaggcacactagcagctcggtgggtttctcctccattcgtagtaaccagggcaaagatgaagaacttgtagaagcatggttacttacgggatgtcgaatgcttcctttgctctcaaaaccagctggcgccagtccaagggatggttaccatgcttggtcgcacactcacactaagcagggtgctatgttacccttgcttccttactttaggagaattgaggattgctatcacctctgtctgacctagtttactccgaagggcatctactatttgtccaccctgttcatcctctacgcctcacacggaagggtgagccatccctgcatgataccaactggctttgtgatctaaaatcaactcccaagcggagcaggttgggatatttttactttcctcagatcgaggagaagtggttgacgggcacagtagactctgaggtgagtaagatagggaactttgtcgatgaatactacttcgtccaaggaatggacacattccacacttggttcaaccagataccctaatactgacgccctcccttcacacatgggctcagggagagggcacaaagaattcttcaactgccgaatgctactcgaaacattactttccttgccactaaagcaatttatgtcaagtacaaactcttcccagcagattttgttcccaagggccgtgaagaaggcgaagaaggcaaagcttaaccaggaaggaggaaccgagcaggagaaactgagcaaaaaaggggaagaaggtccttgttggatatattttaccaagatctagatttaataacaagtatgtttcattaacatcttaatatga

SEQ ID NO: 28421 - DNA, 1576 bp, Cannabis sativa
gttgtcttcggtggggcttttaattacggatgtgttgctcttatgcagtcctctcttttgttttctatttcaattaattttgtcaaaacagttcgggaatcaggcggctaactttttagctcgttcttctggttctattcctggctgtgtttctcgggagattttgtccctgctggtttgaaagctatcttggtagctgatttgattttataaaagtaaattttttggttcaaaaaaaaattaatatatatatatatgataatattaccatgcatatatattatatattataaatgtgtgagttaaatattaaaaataagatttaagtgagatattttgaaaaatagggtaaacaagaagtgctctaagacattttaagataaactgttcaaaatttgtataaatttgtatgttgtggggattcaaattttgtttcaatcctattaatcttaatacagatttaaatttataacattttctgatgtattttttttaaaactaatattttgaagttatatgtacgtaccaactgaatgagttgcaacagccattctaatggtagaaatccctttttcttaaaaaataaaataaaaaggtatgaaggttttagtgctttgctccctatggaagctataaaaggagaggtactctattcttttcaacacacaaaaaaaaaaaaaaaatcattatcttcttcttctaagtttggtgcagtaactagtaactaactagtaactactctctttggcagtcaagttggtatttgcttggtcatagaatttgggaattgttcagtttattagaagcaacaaggtgatccatactaattgctcaaaaataacacaattattttagtttaggagtcatatctctcattagcaatactcaaacactttgatggtatttaattggaaagaataaaaatataaaaataaaaatcagaatgagaatagaattaaaatcaattaaaagcataaaaaaattgataaaaaaattattaaattttttctcatttagcattgaaataatcttcctttttatttcaaaatgaaatagtcattccatcaaaatgatgaaaaattcattctaataaaatgatattttaatattttaaaatgtaaccaaagaaagaaatagaataaaaattgtttcctttctattccatttcattaattccaaccaaacaccactttagagagtttaacacttaagttatttttagttggaagtaataaaatagaatggaaaaaaataaatttatattctatttttttatttagttatattttaaagtattaaaatatcatttttattctaatattttgatggaataattattttatattaaaatagaataaaagactcttaaatattcatttatcaatgcaagatgaaaaaaattaattattttttattaattttttccatacattttaaatatttcattcaattttattactattcttattcttgtatttttattcctttcaaacacaagcttagagagaaggtgtaactatttcatggacaatatttaccatactatacaggctcggttttttttcttcttctttct

SEQ ID NO: 28422 - DNA, 1426 bp, Cannabis sativa
  modified_base (1381)..(1381): a, c, t, g, unknown or other
taaactcactaaacgttttatcaataatgtttataggatgtgtgcttgtgttttgtgggagtgatgtgaaatagaaaatgcactggtgtactttggacaaattgtgcctacataaagaagatggtggcgtgggtttcagagacttggatttgtttaattaagctcttcttgtgaagcaagcgactagctagtctacaacgtttccacctcttttgctgtctaggttctaaaaggtttgtattttaggaacgggaactttggtgatatagttcgatccaagcaagacttttttgtgtataatattttctaatctggagcagtttggagggttggcaatggacataatattgatatttattctaacttttgggtctgcgtctccctctttcatgttggctcctcattttctcagtgaaggtagcaaagtttctttgttacgtgaggcttcaggggctgagatttgggtttggttcttggactctttattcctaatgaaacagaagctatcttatctattctttgacctttctccgataaggataacaagctcatttagaattttaaaaagtttggatggtattctgtcaagagcggctactggttggctctttgtaataagggcttgggttgtgcttttccctctacggggtgtactcgggttggtgaaaaaaattggactcggaatatccctctagaggtgagattgtttccttggcaagcattctctaattggattcttacgaagattaatttggctactcatggtctcgtatctgatggtctttgtacctctttgcaagcttgattaagagattacttatcacgccttgtgggggtatctaacatcaatggcttgcatgaaactttatgattttgatcagggtaacccttttcttactcatacagattttcttagctttattcacaatgttattgatcctatgccaaaggataaattaaattagttatggtcattttgtggcgtatctggttcaacagaaataaaatagtgcataatatcatttatttgcctcttgacttagtggggaaatggactcatgaatttcttcggaacttctaacatagccaggtttagactaggccttttctctctctgggataggctgtctctttgcctttcgatgagattatttcgaaatggtctgcttcgttggctggttctatcaaggttaacagagatgttactattaataaaattggtgcttgtagtggccttgccttggtatgatggtgtatgattatttgagtatcgttcttgttgctgctatttggtgcatgaaaggttgtcttgattttaatggttttaaagattttattttttacattgtctttgtaaagtctttttttttggcaagttagntgacaaaataatttttccatttatggtaagattgttatgcattca

SEQ ID NO: 28423 - DNA, 2028 bp, Cannabis sativa
agacaatggtggtagggtgctggtgacaaaatcaaattactttttttttatggatgtttgcaatatattgggattgaagtgagggtaatgaataaaaaggagaagaaaaagtcgattctagaagtttgtagggagaatagggtgggatttggggcgttgtttgaatgaatataaagcatgagaaggtaaaagatatgataatgaataattttcctaattaggattattactctagtaatataatttcttatcgtattttattgatttggcaatctaaatttgtaaaagttgaggtgttgatggaagatagtcaacttgttcattgcaaaatgaaagtgacaggagttaaggaggaattttatgttactgatgtatatggcagcaatatgcttatggataggaaggtcctttgggataaattggcaggtattggtcatgtcagaaagccttggattattttagagactttaactccatgttcagcttttaagataggattgggagaaggcaagtctcggctaaaaagattgagaaacaagattagcttgtaacggtcaagaggaagagtttagatgttcgggagctcatttcactttgtccaataagcgtgacattggtaatagaattttttcgaagcttgatagagtttttgtgaatgagaaattgtttaacacctttcccaaagctgaagcatgcttcaaatgggaaagtgtctaagaccattgcttttatattgtaaaaaaccatgaattgggtaatgttgggatcaagctagatctgtaactactgactcaattcaaagggtgtagtgacattatgttaaacagctagaatcgggggactggttcgagaggtttacaaagtgttatgctgaaacttctaaaagtcaaacatactttaaagaagttttatagataagaggttggagatgtagcttttgattataaaaggaagaaggatgtctacaataaaactcaagagaatcttgctaatgatcctactaatatcttagtgcagcaggaagaaaaaacctgctacctggagtatgccacgggtctgaacaggtacatcagctttcttaagcaacaaagtaaagttaccttgctaagaaggggtgaggagaacactagctatttccatgatttcatgaaaaaaaaaaagaagaatggaaaataggattacaacttacactcggaatgatgaagtggttgatgattatccaaaagtagttgagcattttctaaaccatttgaaaggatttatgggaggaaaagcacatcaactaggaggataagaaatgattgcatttagcttggatataagctagatattgagcagcaattcaaaattataagactgttcaataagaataatgtcaagaaagctatgtttgggattcattcgtcaaaacgtcctcgtttggatggctttggttcaggttttttcaagagcctttggaatcaaattggggaagtaatttctaaagtgatgttgttattctttgaggagggtattttacctaacttgttgaatgaaacagtcattcccttattcccaaaaatgataattcgaaggatacaaatgactataggccgatagcctgttgcaatacactgtacaagtgtatttcaaagatgattttctcacgtatggttaaagtcctgtcgtggcttgttcagttgaattaaggagcttttatcaagaacaggcttctccttcacaatattttaatctttcagtatctcttgaaaggttataataagaagaatattttgactcgttgtgttatgaaaattgatttgagcaaggcctatgatactgtggattggaaatttatagaagatttcttaaacagtttgtgcttcccctcgaagttcattcattggattcttacgtgtttgagaggcagaaaatacaatcttctgctaaatggaaggctccaaggttcattcaaaggggagaaaggcctccgacaaggtgaccttatatctcctctcttatttgccttgattttggagtatttgactc

SEQ ID NO: 28424 - DNA, 2231 bp, Cannabis sativa
ttcttccacaattacttgtgtctcgccagtagtggaaaaaatttcaccagtccccatcccatctgctgtctctacttcgtcgatcgcagcttcaaattgttgggtagaggcgtggagaacagctttttgggcagcatatgttgcagccgcctcttgcaggtcctggatagacacaacttttgaattgtttccaaaaggagcaatttctcctatgcctggcagataaaccataggtaattgggtaataaccaatccctgttgtgtgtcgccgttggttgtttcctcctccgtgatgatgcgtttcttccctgggaattgtcgacggcactctctgagttctgcagcatctccattagcaatagctctatgcaccttcaggaggtttcgagtagtgggatcagtacaaagttttttctgcagtacccaatcgtggaaccactttgccagtggcgaggagaatgttgatttttcgggtgcttcattcttcaaccaaacaccatacattgggaagaaattccctttggcgtctttgatgacagtgggtgacttaaagcacgtactctgctcatgagtaagtaggccgcatttgaaacacaactttggaagcttctcatatttatactgtatccatagatcatcaagtctttgtcttcgtagatagaagcctgaaaatatgggtttgttaaggtctatagtggccctgaagcgtagggaactcatgcccacggcgtcctctataccagttgggagttcataaactggtgaggcttttgaagctaactcttttaagttagataagttccagtagaagggggggatccgatcaatgtgtacccagatgggggttttgtcaaacctaacttccatgggggatagccaggcaggccatggcatgataactatcaacgccccacatacaaaccatggccttcgtgccagtacattcagtgcgtcctctcttcgggcaaacgtgaactggatgattccatcctcaagttccttccacttccaacccttgatagcattccaagacagttttaaggaaccttggattgctgcttttccgaatcggtggcggctaatgatcttaccaagtagcacttggttagcctcctggggttcatcaacctctcccgggttgagagcaaaagtaatgtcgtcatgtgagatttgcacggagtcctcaaagaggttacatactccggtgggatccatgtagcactaagactagaaagtgtagatattgtagaagatgaaactggattagaatcgaaaaagaagagcagtactctattatacttccatgaagtcagcccctagagagcatttgtaagggagcttttattggtataatatataaagaaattagtatatatatatatatatatacaaaaaaaaaaaaactatgctaaaagggactaaattgtaaaacaacttgttgtcatcttcctctttttcttaggtctgtccaccatgccaatagttataagttataagttataaggtgtttttactttttatggtatacctctatttatgaatgagttagtgatacactccattcatgtttttgatattcatttataattttaacttttttatataagaatattttggttgttatatattttgtgctaaatttagttttaaaaataaattaatattatattttcctcaaattttataattatactctaatgtactaaagacaaaataaattttattttcataaaaatgtacaaaacaaaaccaataaaaacaatcaatttttattggaagtatatataaaacctatattaaatgtataaataaaaatataaaaatttattaattgcattaattaataaaaaaaaaaataataaaataatattttttatggtataaaatttagttcatattatattttatgttatgaatataggctaaaaatatatacatcatatttatagcactctattaattagattaatttactataataatatatattatagttacttacaatacagggataattacataaggtactattttttgtaaaaaaaaattacatttttacaattaatgatttttttacggtttcccataaaattaaacaacaagaaaacaacaaaaaactacataaatgtaacataaaaataacatcaaaacaacagtaaaaaataacatagatataacaaaaaattaacattaatacaatataaaaagaccgtattttgtgtaaataaaat

SEQ ID NO: 28425 - DNA, 948 bp, Cannabis sativa
atatatatatatttaatttaagaaagagttcgccatgttgggagttttcagcagctcggtggtttcgcccccagacgagctggttgccgccgggagcagaactccgtcgcctaagatcacgtcgacggcgctggtgaaccggttcgttgtgaacaacgcctcggctgtgtctatacaagtcggtgagcaagctcagctcgccttcactcatcacaatgagtctgccttgcaaccgaggtacgttataagaaatcgtcatcatcatcatcaccgttaaaatattatctgatcatcatcgcagtgttgttatattgttagaaccaaatattctccgccgtccgatgcatcgacttttctttttaatcatgatcattagaaagttcatttccaaatttaaatttagcaaaaatacaaaattatattttgttcataaaattaatcagctcttaacctgtgaatagacatttaacgattctgtacacgtgtcatactttttgcaattatttgagaattagctcgtaaaattattcactttccaatttgctcattcaattagatctttgagattcattttacatagttttgtaaacatgaaagctcaatcccgtgaaaaaaaaaaaaaagaaaactcagtctacaataaataatctttttcattattatgttgtctaaaatacaaaagtttctttaaaaagtaagttatggaaagagagtatccctaaagccacttctttttattttttagttacgtaccgttggattatccgagctactgttttggaagaatatttagagatccaacggctatgatttagtaatcagagggttgatcgtgttgattatgttgtgattataaataaatatttgtatgtatttggaggagtgtggtgtggtggtggggtgggtgggaataggctaaggaagaggtttctctcgcatgattgccac

SEQ ID NO: 28426 - DNA, 3047 bp, Cannabis sativa
ttataagcttcaagtcacagcattgaattctcaaggtgttgttcctgcctctgtcagtttcaaacccaaggctcttaatcatacaaccacaagtaatcctgttcatgacaagtccaaaattggcaatgtttggcactacagacttggtcatcattcccaacctgtactcaataaagttctttctcatgttattccaaatgtaaagtgcaagccactagatttttgtaatgcttgtcaaattggaaaattacaccagtttagtttcaaaagcactgaaaataagaccacaaaaccttttgatttgattttaaatgatgtatagggtccctcgttttatgcttcaggtaatggtttcaagtattacattagttttcttaatgatttcaccaagtttacatggttatttcctatgaaaaacaaatctaaggctagtaacatgtctataccgttaatttcaaactaaaatcaaatcagtgcaatctgatcttagtaaagaatatgagcaaatgtataaaatttttaataatcttggcataatccaaagaagttcttgcatacacacaccaacagcagggtcgagttgagaggaaacatcgacatgttgctgacactggactcaccttgctgtcacaagccaaaatgccattatcattctggtgggaagcttttgcttttgctgcctacttaataaatcgattacctactccaacactcaattatcaaacactatcaaacactctttcagcaaacaccagattacaacctgctcaaagtttttggttgctcttgtttccctcttctcagaccttatgaatcacacaaagttgcctttcgatcttccaagtgtgtcttcatagggtatagtgtcaatatcaaaagttataggtgtcttcatccctcaggtgtgacaagaagtgttacttttaatgaacaagaattcccatatactactctctttcctctcattcaatccactgtcaacaattcacccaataatcagcaagccttcctcataccaggttcaaacctcacaccaggttcaaacatcattcacccaccaacccaaaaccacactccaccacctcccagtcctacaatacctccaaacggaacatcaccacaagacagacaaccctttgtcaacaccagatcttcttctggttcagccactccaccagttgacaacccactcatctgtcctaacatcaattttcatcctatggtcactaggtccaagttaggcatttacaagccaaagacatttcttgcatactccaatgatgaaaaggaacaaacttcatttaaagaagcctttgccaatcccaaatggaatgctgcaatgaacaatgaaatgactgctttaaagaataagaaaacatggactcttgtgcctagaacttctgagatgatcattgtgcaaaataaatgggtctataggattaaacttaatgcagatggcactgttgaaaggcttaaagtaaggttggtggccaaacgtttccaacaaactccaagcattgacttttttgaaacctatagccctgtaataaaaccctgcaccattagaatcatgttcacattagctatcccaaatggctaggaaatacaacagattgatattaagaatgtatttctgaatggacagctccaagaagatgtgtacatggcacaaccacaaggatttgtggatcctacttaccccaaccatgtgtgtaaacttcacaaggcaatatatggtctcaaacaggctcctcgagcctagtttgacactcttaaaggcactctggttcaatggggttacaccagcagcaaatctgataacagtctatttttctcaatcaaaaatggtaacctgctgcttatcttggtgtacattgatgatattctcataacaggtgcaaacaaatctgaggttcaacatctaatctctactttgaacaacaacttttctctcaaaaatcttggacctgtaacaaacttcttgggttttgaagttcatagaatcgctgacgaaatatgtttgacacaacagaagtacaccagggatctactggccagaactcaactactcgattcaaaacctcagtccactcctatgtgctccactacaaaaatctcagcaacaacaggtgctctcatggaaaacccaacacactacagaagtatcattggtgccctacagtacctcaccatgtcaagacccgatattgcctttgttgtaaacaaattgagccagtatatgcaagctccaacatctgaacattggggagcacataaaagaatactcagatatcttgcaagtttagtaggatctggactggtttttaaacctgctcatagatttgacatccaaggcttcactgatgctgattgggcaaggtgcttcgatgacagaaaataaacatcaaggtattgtatattccttggaggaaatctaatcagttggtattccaagaagcaaactgtggttgctcgatcgagtacataatctaagtatagagcccttgctcttgccactgcagagataatatggatccaatctcttatatcttaaatatgcatccactctacacaacctccaattctttggtgtgataacctaggagttggatccttagcctccaaccctatatttcatgctcgaaccaaacatatttaggtggacctttattttgttcgagacagggttatttccaaacagcttgacataagatatgtggaaacaaaaaatcaaattgcagatttattcactaaacctcttccagcaatgccatttcaatattttctcaacaagttaacgcttggttttcaccaatgtcacttgagggggctattagaataggaaatggctaagtcttctattattgtttttctctattttttgctttactcaatgtaacagttcttgagttagttagaagttagttaaagtttgttatacttctcttgtaattaactcaatatataaatgtcaagcaaggccaactggttagtttagttgagcaatattattccacccttcgtcttcatctctctctctctctctc

SEQ ID NO: 28427 - DNA, 2235 bp, Cannabis sativa
acccataagggacaggaaactgccgcagagcacaaaaagtgggcagacgactcttttttcatatataatttgaaacaaaaccttgaacattatgttttccacttcaaccaactaagctatgaatatttgttgtttataatatacttaaattttacttaaataaaagccgaaattttttttttatttttttattttggactctcggaaagtgtgggccctaagcaggagcctagcctgcctatgcctagggccggccctgctattgtgcattgtttcttattcttgctcttgtgattgacgaactatactctttaaaaaattattatattaaactatatgagacttaataattatttaaactaataataatattgacataaaaatgtgctaattactaatattactttttacatttccttttaactttgataatttgttaagtgagcatgtggtaagagtaccattacattaatttcatcatttattagttactgtggaataaagagaaactagaagcttagctgataaactgcttgtagaatacaaatattttcatcattaataactggagctataattttccattattgaagtacaaaaatacaatatattgtactgtctggcataacagaacatggtgacctacctgaagaaatgactaagtcaatgaattaaataattatgccatttcagtctgcctcattacaaagctgttggagctagagaatgaactactgaaatcttcccatcaaagagtcaattccggtactaccttgttgagttccaataatggagaaaacaacaagaagatacacaagaagaaaaaaaaaactctaacttagactttttttttattttacatataaaatataaggtggtctgccaaagtgcagagaacaagaaataagaagggcaaaattgctattataataataatagctcagctaaaaaaaaaggcttttccagccagtttttaatggaaattgcaagcaagaaataaaaccatacatagtaatttgctaccgactaagcaccaccatctagctttccatttggtgtattttgaatgtccaagaagatattacaaattcacgtatagacttgacctgaaattgtagatatactgtgccttgcctcatttacaaactacttgataagaatatttagatcgattggtgaatatgataagaggtagatgaaaaattaaagccaaagcacacctatattatttatcatagatgtatgattatgttaattttgataattggtaaagtgggcatggagtaacttctgttttattacaggaaaggaataccggtcacattacttacatcatatatatttttgttgtgcgtgtataggatttaaaaatgtttcttgtccaacaaaaaaggaaaaatgtggaattaagagaaagtaaagccttcattgaagtaaatggagtaacaaattttccattattgaagtagaaaaaccaataatttcaagactgaaaatcaaatttctgaaattcacgttgatgtaatcttttgcctcttgtatgagcgaatgcccattaacgttccttagagcaggcctatcatggttgtgttgtccttttaaatgtatattcacagtttttggatcgtctaaggccttctgcacatattttttaactaaacatctaccatttttgcaattgtagaagtacctgtgaagcaaaataaatataccaaaaaaaaaacttagaatcccaaacacacttctctttcttgggagaaaaagaaaacaaaaacaacaagtttaaaagaaagagtataatcgtactttagatttggattgttcttggtagcatattcaccagacttgtaccactggtaagcatctctaggtatcttttcatcagtttcaattctaaaaaatatttgtgttgaatcttcaaatgctagataatttttcgttgctgatttgtacaacactttcggagcatcccaaatagccttacaactttcttttccctccagtttagctctcacttcatcaggcatagaggataacatccatctctgaagctcatcgtcctgttgtttccatttcaagaattcttggttgatttttccaccaacttcatcttcatcattcagaaacttctttgggattgtgcgtgaaccaaaaaggtaatcatcaagattgaaatgaagcacatgtatcagaatctctttctgccacgagagaaagttgaaagagttgagctta

SEQ ID NO: 28428 - DNA, 949 bp, Cannabis sativa
caaattgacattaatcatgccttcttgaatggagagcttcaagaagatgtgtatatggctcaacctcaaggttttgtggatcctaactacccggattatgtatgcaaacttcaaaaaatcatctatggcttaaaacaaacccctatggcctggtttgacactctgaaaaatactttactcagttggggctacaccaacaacaagtccgacactagcttgttcttcaccaataccactggctccttacttctcatattggtatatgtcgacgatattctaattactagtgcaaatgcttctcaggttcagcatgttattcatcagctgcatcatacttttgctctcaaaatacttggtcctatccactactttctcggttttgaggttcacagaacaggcaacactatttcattaaaccaacaaaagtatatctgtgatcttcttgctaagactcaactactggattccaagtcccaacccacacccatgtgctcctcaacaaaaatcatagccaccactggcacacctatgcaaaacccaactcaatatcgcagcatcataggtgctttacaatacttaacaatgaccaggcctgatatatccttttcagtaaatcggttaagtcaatatatgcaacaaccctcatctaaatattgggtagcctgcaaacgcattttgcgatatctgtctggtactcaagacattggtctcacttttcgaccttcaactcgactggatattcaagggtgtactgatgccgattgggctgcctgtcatgatgacagaaaatcgacttctggctattgcatattccttgggggaaacttgatcagctggtgttcaaagaagcaaacagtcgttgctagatcaagcgcagaatcggagtatcgtgccttagctttagccacttcagaattaatctggattgaatccattctcactgaactca

SEQ ID NO: 28429 - DNA, 1294 bp, Cannabis sativa
cgttataatgtttgtttttagtgttttactttggtcaaatttttaatattatcacagtttttaataataaattaatctattaaactagtttataaaatcacacacgtgatatccttatagattagggagttacaagtagtctattgggcattgtcatttgtccccattttagagttggtaaaaggtctcaaaccaccagatcaaccattgccaagggcaagattttcctgcattttgatcgagagatcggccatggcatggtgatgttcaagacaactttcatgggataaaagtaatgcctatacttcctcaatggacagagcatcacttcttgaggttatccctagcacaattgaatcgaattttggacccaaaccattaagaagctataagataatgtcttgattacttattggggaaccagtaagcataagtgatggcctgaactttgtcaacatattcggagattgttaaaccacctttctgaatgtgggagaatcgaccgttgagttaaagacatcgagctttagtctgagaagcaaaattttgtttaagagccctccacatagtggatgaagagatgaaattagccactaatgcaagaatgatgtcaaacattgaagatcgtgaccaagaaagaagtagctaatcttcacgacaccactgagtatacttgggattaggtgcgccattgaccaaaacctgaggaggaggtacaccagtaaacagaatatcatcaagatcatggccaatcacagttggcatgacttgagatttctagaagagatagttgagacaatcaagcttcgtcatgagagaggaattaggcgagttggagaaaggattccaaggagtaacagcggtgacaggggaagtcgccattggagcagaagcggcagtggccattggagtaggatcagaggtcaaagaagacattaagacgagtcaataaactcctgataccatgtagaatgtgaaaaggcagagcacaactcaaaaagacagggaagaaagaaaaaagagttgcaaagcttaactttctattacatgaatcactatttatatagagtgttgatataaaatgaatcaagaaactgttgcaataaaactaatagtaatcactaactaacagttgacataattaacttttacaactaacaggaagtactagcagtatgacactttaattttacaaaaaaattatttaataaaataattattttttattttattattttagttatttgaaaaacatatttaattaaaactgaatacttagtcgtattttttacgg

SEQ ID NO: 28430 - DNA, 1716 bp, Cannabis sativa
tagaaaaacaagtttctttatttcctttgtctatcgtttcaatgatgatgttggaaggaggattttgtggagagaccttatggatcttgtcggtttggaaccatggatagtacttggttattttaatgagattcttaataaagatgaaaggattggcaggcatgctagattcaataactcgagtgagttcaaggattgtgtagaaacgtgacaacttgaagatgtaaagtttatgaggaatttctttacatggagtaacaagcaaatgggagatgatagaatctattccaaaatagatagagtccttgcaaactaaaaaaggcttgatcttcattcagctattgaagttgtttttctcaatgaaggattgttcggccattcaccagcgattctaacagtttatgactctatcccaggtggaaaaaagccattcaagtactttcggatatggtcttctcatcctaaatattctaatcttgttgctaaaatctgaaaacagcatgtactaggtgcaaatatgttccaaatagtgactaagatgaagaaatttaagccagttttcatagaactaaaccagcaggcttttgcaaatctcgctactgctgttattaaagccaagaaagccttggattcgtaccagtatgaaatgcaacttgacccattaaatggtgtactttagcaccaggaaaaagaagttagagaggattatgcaaaaatttagaaggagtatctctcttttctccaacaaaaagctaatttgagttggctaaaagatggagattcaaaatcagcttttttccataatttcattagggtccgaagagcacaaaatagaatactctccattactaatactatgggaataagagtggatgaacctcaataggtatcaaatgcattccttgattattatatgaccttgcttggtagcaagataactaatggaaagtcatttttgctttctgtcataaatcaaggtcatataatcacaagtatacaagctaaatccttactttctgcattttccttggatgaagtaaaaccagctatattctcaattctagggaataaagctgcggggctggatggcttcagtagcttcttttttcaagataattgatcttattgggggtgacatatatgatgctattagttctttccttcacacaggtcagcttttgaaggaagtcaacactatggttttgaaagttatccgcaaaattaagtgtcctaacctagtgaatgattatcgacctattgcatgttgtaatgtactttacaaggtgactaccaagctgatttgtgcaaggctcaaatctgttcttccggatttaattgcccaaaaccaaggaggacttgttcatggcagattcattcgtcgcaacattatgatctgtcaagacctcatccgtcactatggaaggagaactaaaaaagtaaattgtatgtttaagctggatctccaaaaagcctacgacaccattgaaagtgatttaattgaagagatgctttatgcttttcagttccctcaaatgttcattgggctaatcatgatttgtgatcgaactccaatgttctcattgatgtttaatggctctttacatgggttctttgtaacgcccttactaacttaaaataaaatgccacaaataaactggcgttaagatactaatgttgtctttattttaaaaaaaaataacaattttcaaaacatgg

SEQ ID NO: 28431 - DNA, 4140 bp, Cannabis sativa
atttatttgcttgaactactgatatgatatgtcattataaattacataataatttgaatgttgtgggtcaagtaattgatagtggcaattattcagtcttccattttattttctttttaaatattaatgaatgtgaaagtgttaagctgagttcttttatgctctttctgcagataccgccgaggaaaacagcagcttcctacaggtttttgttatgcttttattaaaattgaggatacttactatgcattagacacattgtgtgtgaaatgatggaaaaaagatttcgtggactaggctaaacatcttatgatctgccaaagaaaggcccaaatcagaaaaaaaaacgaaaacaaaaactaaattcaatgttaatattgtaaatgtgaactgtagaacagtagaagtgctttttaaaacctgttattcgaggtctgcttctttatttctttgaaatttcggtaacatgtagaccataaccatattgtgtcttgattatcattgtttcatatgcagaattttattttgttcattttgggtaatatatttttcagcataaccctgtaaaaaagaaatttaaataagctgcaaatagtcttcagcaatggaacctactgaaataatcttacacttgttatattatatagatggatttttatgtccaaaaagttcatttcagggctgatgagtgggatgtgaacaagtgggcatggcagggtgtattgaaagtcagtagcaaaggagaggagtgcatcatcagacttgaagataaggagactggtgagaatttgctgtacttattctaagatggagatataatccattgttatcttcttcttttttcatatattaatatgtttgattattttaccgtaacttgctatttttcatggtaggtgaattatatgctcgggcatttttgagaaacggagagccgcatccagtggaacctgtaatcgatagcagtaggttaggctcttttattagatcctcatttcaatacttggaaatcattttttcttcagcttgtggtacttcagttttattttcattgaaatttatctgtaggaatgtctaaatatttattgttttatatgcagatattttgttcttcgagtggaggagaacattggtgagttagtttcctgggattataatttgagatcttccatttgttccatgggagacaaaattttgtgaaacaaaataacatagggatttctttcttttgtatactctaaatttatctgtcaacaaaatcaattacgtatcataattgaataattgcttctctggaagaaactttttgtataccttagcgatgttcaatggcccttctaaatcttcttttctccaactgtttaaccgaattttttggatttgattctctaggtagtaataaccccactcgatgatgccactttttgccagttttcatttcgggttcggttttcatctatcagtgtaatagtttgaaatttatgcagatggtcgtcttcggcatgcttttattggcattggttttagagaaagaacagaagcttatgacttccaagctgctctgcatgatcatatgaagtatcctccccttcctaatttttaaacttatggtttttgtccaactttttaatgatcaactaataccatcctgtttgattcaagatacctggacaagaagaagactgcagagaagatggagcaggaatttcagagaacatcgtcagttgattacagcttgaaagatggcgagactcttgttctgcaattaaaaaacaatgtaaactgcatttttatttccctgtaaatgtctttataatgatgactgaatattccttgggagtatgctaattgaatatctggtttgggttttaacagagaagtggtcaaaatgtcaagtccaagttttttgagcaaggttcgaacaattcatcacctgagaataagggtgataccaaaaaagagcccaagatttgtatcaaacctccgccacctccccctgctccgctttcaccttctgctactggtcagaagtcttctccgaactttccaacatctttcaatctcgaggaagcttctaaagatggagttgtagtaccaaagaaagatgattcgaacaatacagattcatcagaaaatcaaagcacagatgtaccagatgatgattttggagattttcaaactgctggttaatatttaaatattaggggggaacatacataaccatactaagaatacccgaatttttctttcactgtggttttctgttagatttggtgtttgtggtggtttaacaccctcaaagatcttgttgatttggtgtatatcaggctaaatattaccaatgtgaatttactttgagacaaataagtctgcccacccaacccaaatgatatagaaatttctaatattgtacaatttggcaaaccagaaaaaataaacataaattgcaacttggtgtctttcactgtttcaccctataaacctaaatatgacaattattgttgctttattttgctaatcaagtcagaaaataagtgactttcttagcagtttgttaaaaaggaaaaaaaagaaagatgtctgaataggttattaatagtgattagtcacagcaacagtaaatactaataagctaagttcaaaacaactttttgacaagtatttgataaataattatacataataacttgatttcacaataaattatattatcaaggagaaataagatcatctttattataatttcatagaatcttgacttttgaactttgttatgttataaaaatttcattggaattatatcaatcattgcaaatgtatttcttttgttgtattctgattatcatttttaaactgcttgttaatgttgttattgtattacttaatactgatgtgatgttaatattgtacaatttgaaatttttagacataccaacttaatgataaaaataaatggaatgttcaaaaaagaaaaagaaaaaaaagatacatttacaattactattactataattcaaagtgaattcttagaaataaaatccacaaatgcaataattttagggaaagactataattattaactagaaaatttgataaatttaagaactagaaaaaaattacttctcaaaatttttaatgtgtgagaagtttgtgatttataatttgtaagacgctatcttaaagtagtgctaggtgtcacggactaactattagacactcccaagtagatgagacgtgcgacacttgctggcacatcgaactagcaagtcaaccgaaacatgctgagaggcaaacaaactcaaaggttaggcacgatatatattaagtgcaactacaattaatgtatgagcaaacacaacataagttattctaataattaatcttacacaacttataagtagacacatagataaatgacacacaatgacttaacaaagacaacacacagacagcataaaatcatacacaaagaagtatgaataaatatcattttattattatatgaccttaataaggtaaataagtatacaattggttacaaagtgcttcacaagtcaccaagtcactcctgaaaggttttaaaaaatttcaagaaacatatatgatattagctttgctaagtgattttttttttacaaataaagctaaatagaaagtgtcaccaccaaggtatctcccaacccaacctcaataaggtgatcaagtaagcaccatactcaattactcatcttacaaaatgaccctttgtgggtgtggcatgaaacagcacgctgctagacagtaagcatgcattactcctcagtaacaagcctctcccactatatgacactttgtattgatgtagggcatgagaacctggccctgtgaagatagggggggtcaattcctagtactcccacttattgagtttccaattttaatttttcatataaaaaagcctctaatttattaaaaataccattttatatacaaattaaaaaataattgaacctttcccattaaagaccaaacctttttgacacgagcaccaaaccaatctttcaaaggcacaaatgaattaataaagccactatcaagactccaatactccaagttgctgaaactgaagaggggaaggggacccacacccactaggcttaa

SEQ ID NO: 28432 - DNA, 1999 bp, Cannabis sativa
ggggtaaatgttatttgggttctgaaattgtgacttgtataattccaaagcctaatacaagctaggtcggcccaaacctggccccaatgattaagtcaagctatgattccaattcgtacataagcgtaactcgcaaacctactaaggtcgaactcccttggttcggagaagaccatttggcccagaagcgaagaatttgcgaagacaagttcggataccttcatgagctgatccaaacatgggtaatcgaagagtcgcctagatatagcacctggacatcccctttctcggaaccctccagacatggggccctacattgtcagagtttttcccctacatcagactgacagagtgcgtgcactactaaaagaaggccacctttttatcctatgctatatcttttgatattctcggtacgtatgcagcttcgcacgacacctgacatcctcaaatagtccccacttgtacgaacaagtctcacctcgtgaattgggcctcactcaagtgacccaaactcaataactattgtaatttacccaattagatggcctaattgattcctagaaatcctatcgagttcgggtatgctcgtacatggttctctcctataaatacagcatgatcctttcatgcaaaaggttggaaatcgaattcttgagagaagaattgagaatcagtgttctttaactatgacataaatacttgtataaaatactttgaaacttttctagttcaatactattgacttgtggactagaatttattaacactcgaactacgtaaaaatttgaattcttattctctaatttgactttttttcttaagtttatttattttataattaattttcaaaaatctaattgtaatatatatagctttaaaacatttgtttgttatcatatcttttccgtaacatatagtagtcaaattatatttcatattagtcttcttcttattttcaaaagcatcatcaaaaagtacacagcttttctagtgtacatttttttttttaaatctcatttcatgacaaatatatgtggacaccttaatttctattcgtagactttaacaccaatgaaagaagaatatatagctaagctatatattgactaacttattataactacattgattatgggtccataaatattaatattaatttggaggaggtgaagaagacaagtgaaatatatatatatatataaaaagtttcatacaaataagtgtatatatgtattgactaattaaccatttttatggtccaatatggacccccacttgatacacaagacaatgacaaacctccaaatattaatcaagaatcacaatttgtttcatattcacacaaccatggatgacatttagtggatttttcttaattttctccatccttttttgtccacttttaacaccttagacgcccaacaaatctaatctaacctttctatatcatgcctctagtgaagagaccatgctccttgatctaaaattaattctatccaaattcaagtcccacaaatctatacctatacaagccaagaaataaaaaacctagtttttgtcaaggatttttatgttcatcacttttatttcattttatttgttatatatataaataatatttatttaaaagggcaataacataattgcttatacgtgtctctaattaagagaccatactcgttaatctaaagctagatccaaatcaaaatcttacaaatctacctatgtttctaaaggagggatttacttgtgttcactttgtttttgctttcaaaagggcaaaagcatattgcttaagcgtgtctctatattccgttatggccaatattatgggccatgcaaatctcaagaaaaacagtacgacaactatatatatatatatatatttatataagttataataataaactcacgtaagggtttggtattaaaaatggcaatgaagtattataacttccaaacaaagaagttacaattaacaagtgaatacatatat

SEQ ID NO: 28433 - DNA, 1380 bp, Cannabis sativa
ctggttgaagaagaagcaacagtaataggaacaccatctgttgcagcagaaaatgtgggaacagcagtgacaggaattgcatctggtgcagggacagtagcaggaacatcaatagtaggattagcatcagatgctgcaatctcaacaggaataggttgagtagaaaaagctgctgaagtatcaaaatcttgaacaataccaacataaacaagatcattaaattgactggtgttatgtgttgaacatgtaggaaaatggtggttatcaataggaacatgttggtcagaagcatgagaatgcatagaactttgtggagaaatttgagtagaagagtgcatgggattgacagctgacctgttagaaatttgagtagaggcagtaggaatgattccaatagttaaaaaatcattagagtaatgaacaggtgtagcattagtagtagaatgtttttcaaagggaaaggaattttcatcaaagatgacatctctagatatgtacattctaccactcgagtccaaacacttataccttttatgattgagactataacccaacaaagtacatggggctgacctaaactccaatttgtgtttattatagccttatgttaggaaaacaagcacatccaaaagttctaagagcttcataatctggtttttgcttaaatagaacttctagaggtgtttgattcctaagaccaggagtaggcaacctattgtgaatatagacagcagctctaaaagcttcatcccaatacttaagtggcatagaagcttgagctaacaaagtcaacccattttcaacaatatgtctatgttttctttcagccaaaccattttgttcatgggtagtaggacaaggatgtctatgtaaaactccaagtttattaagaaaaggtgtaaagcttctatattccccaccccaatctgtttgaagagcctttagtttagtgccaagttgcaactcactttcagctttaaaactttgaaacactttaaaggcatcagatttatttttcagcaagtataaccaagtgaatcgagagtatacatccataaaatgaatgtaatacttataaccactagaggagagagtgtgggagggcccccataaatcagaaacaactaattggagtggctcagtgtactcggtttcagatatttttgggaagggaagttttgaattttgcctaaacaacaggcattgcaaactttattactctcagtattttttaaggacatgttacatttatttagcacagattgaacaaccctagaagaagggtgtccaagtctgttatgccacactgaaaaaacagaaaatttattgagagtacaattcgaacaagagtttgcttcagcttttacaccagaaggactg

SEQ ID NO: 28434 - DNA, 1902 bp, Cannabis sativa
catgaaaggtaactaagaaagtgaaatagttgtcttgttgtgatgaatctgtcaatacttctagtctagaaaattgtcaaactagaagaaagctttccttagcaaatgcattgttggtgtaggctggccggtcgacatatgtgtctggggagatacttgcgtcggtaccagatccaggtgcaatggctgcagcgtcttggtacagagcagcagctttagctgttaaagacaaatgccagccttcatgattatgcatacgccctcatgtggttcgatgttcgatttctgcaccttcagatcaaccaacataatccttgtcttttttgttttttatttttgcccgtcttttataatttacggtcttaacaattttaagctttccgcttatgcttttttatgcataatgccgagagagttgagcgcctgttcatgttttaatgtttgtgttttgagactcggagactaagttgttttaactatacaaatagtttgttgacatcttctcacacagaataatttgcatttttaagcatgtggagttggaaataggaggaatggctggaactttaacttgtaatctgttctctcttcttcttctttttttttttactttcttttaatgtttattcttggattggcaggaaccacttcagtcattcattttagtgctaatatggttcaattcaacaaaatcatgctagagtattaaaaaatatggaatgaaactttatggagtaaattgcggcataatccctaatagtgtcagctcgttagcaattaactcttaaaacttaaattttggtagtaaaactctttaatcttaagttctgttagcatttactttttctcatttattgttgattgttaactactaagatggatgtctatatgtacatatgatattgtctacatagatacaatgtacacatgatattatattattgacctacgtaaataaatatttaaaaataaaataaaataattaaactgaacaaataaaataaattaattaatttactaaaataattatttctttttcttttttactaaacaaataaaagaataaatgaaaaaaaaaaaaaaaaccttaatttcccttagaaacccctgaacttaagctttttcctttcctctcacttaatcccacctctttctctttgtttactgtcacacacgcacggctaggccatgatggccatcctccagtcgacaatgatcgaaacggacaacaccaatgtgctcgcaacctctggaaacccattacctcgactccctctcgttgtcactcttgtctctctcagttgtgcacggatggagctaacttcgaccaccgcgggtccaaacaaatgccatagatggcttttgtagagttttgaagaccctagatccataactcttaaaggtccctcactgttctcttgccgtcaaaagggatcgtcagagctgtgagttttgggtctaatctgggcacctccaggtctcaacgagccaaacaaatagcgggtacaggttctcatcgtcaaaggtttccagatcctgtagcttttttctgtaacgccctaatttctcgagatgttacacacgatagtctgtataaaataatttaagataaaaacaatgaaagacttatttattgaaaaataactaagcatgagatctcattatttttaaaacaaaacatcaatttattcataatctttaaactataaagctttacaaaaatatccgtattataaccttaaatgaaactaaaaaaattatgtttttgcaaatgtcaattatatataagaaaatataaaactgtatgtgtctgcagaagcagaaactcattttgtagcgacaaaacagaacaggcagaatataaaatatttgtagaaaattaaataacttgacacaagagat

SEQ ID NO: 28435 - DNA, 2018 bp, Cannabis sativa
tgctagtacttgaaatgttgtttccttagccatacaaaaaaatcagagctaattttatttcatgatttacaagttcctaaccaatgaatctaaactattcgtcaggaagaaaagggaagtttctgatgttttggctcgacaacagaaggagattgataaattaaaatccacaatccaatcccttaaacagaagaaaaaaatgcccaacaagaggaagaaggagaggtggctatcaggcgtatgttccacaacaatacgctcgtgaggatgatggtccaccacaaatttatgctgaggagtttgtctcccttaacgagccacctctcctgtataatttcgatgaccagagggcccttgatcagaaagtatatctcttctttgacaatatcgattatattgtggcccgagcgtatctttaggagcatgagggcccaataaaaattcactgcaaggactacgatgattcccatgcccgagttctgatttcgaaaatgctggaagaggatgttgaaattccaatctcaattgaagggtgcagatatgttagggaagtagcaaacatgttccttcccttggcctagatacctaattataacacttgaggtaacttttgctataagttaattattaaggattagtggagtttgaatatcttcaatattcaaccatggtgaagtaggttcgacgaatatatctactgcggtgggatggatgaataaactatagttatatctgtgttatttgtcattatataggcatgtttaaattttttaggggaattcaattatagtcgttttgctgcgaaaatttcggtagaattaggatcaaatttgatatattatggtgtgttttgtatagggtccactcgctcaactaccttcaagacgtgatgtgtcgaaggtaaaagctcccatgctttctccacaagacggtcatgatgaagaacatgaattattctcgcaaaagttcatgcatttgatccctcaatcgctaaaatggatggttgctgaatttctgaaactcaaagataaacatgatataatcacaattctggtgccctaaggattcataacacggcgtacccagatcacgttaactggagaggatttgcagcaggttgcattgtgtgacttcatcggcaactagggaatgttgtttggaatgatgtatactcttctttaatctaattaaccttatacatcaaattctagtgaaattattacaagtcactaacacttaaaaatttaatgtaggcacatctgggagagcataaatgatttgagaaaaatcttcaagttttacgacccagagcatctcgcagttaatggtatcaacaatgaagagaacagccagtcttttgacaatgcggcaagacgattggctgcttggttatcattgatgaataataaccaccaaatgttctttattccctagaatatcgggtaaacattgattaattttttagtgattattgtttatttctgtattagaacttggaattttttttatgctatcttacctaaaacccaatataattttctagtgcgcattggatgctagaggtcgttgcgccaagaaaagttacccatttagaccctatacgtggccaccaagttcctgaacaaattactgcaatgttgaaaagataataatttaatgactatttatgtaacaaattatttattaactaatgaattgaaatgttaatataatttttcaaacagagcatacgaatatataggaacatcaaatgcgtatcttgggccgtggccaagaatttcactagcaacttgtccaagacaacctaaaaatcatgaatgtggtttttatgttttgaaatacatgattgacatcgtcgcacgtgcaaaccccaatcgttatatacaagatcaaaaagtagtaagttttaattatttattatagtatttattataatgacgaataataatttatttataaactaatataaatttttactttttttcagtttggagacaagcaggaatacaatccaaaaa

SEQ ID NO: 28436 - DNA, 3852 bp, Cannabis sativa
  modified_base (35)..(37): a, c, t, g, unknown or other
  modified_base (194)..(195): a, c, t, g, unknown or other
  modified_base (668)..(674): a, c, t, g, unknown or other
gatcggagccaacatgaatgagcaaaggagcattnnnccaaaacatggaaaattgactcgtccccatgattgcacaacacacaatgtaagtccaccggaacatgtttactataatgtagagtacgtgtaggcaaacaacccgaaagagctttccaaataaaatgtaaaaccttaggaggggctttaatcttccnnaaaatcttccaaacatcatcctccatagaggaattccaactatcattgaccgactgtaagtgactataagaacttttgaccgactgtaagtgactataagttgagtaatttaataataatttaagtgccttctggtaacatttttattttctaattttttaatcacaaaataaaaataaaatttttgttttttaaaaaataaaaatgttttttgtaaccacttttgttttttcaattttaaaaacagaaaacaaaagtgtgttctataaaatttattttcagtttttgattttatttaagtcgggtataggtccggggtcgaattcaagttcgggtcaaaggtcgggttcagcgccaggtcgtggggtgattttggtttgggtctgatcggaatccaaaatattgattaagaaaaaaaaaaaaaaccgtttaataaaatattgaaagtaattatttttttgtttttaaaattnnnnnnntcaattaaaaaattaaaaagtgaaaacatttttataaaacatgtttttaaaaaatattttcaaatttttaattttaaatataaaaaaagtgatttaaaaagtgttactaaaagccacatgtaaaaaataatatttaaataataaaataaaagaatcacaagattatttgaacctgttacaaactttcttaaatgactaactataacgtatatataaaaaaaatagattaaaaaaatttctgctaaataccaaaagagatagaaggtgcgtcgatacaatggagtgaaccatagaatattcctatatatatatatatatatatatatacaaaattttattttttcatcactacattattgtacgtctgttgtgttatttacaaaatcatacagagtaacagatatacatactaaacatagcacactatagtagagttgggtgaacatggtgatcaacccccttgaaggtctaatccctggagaagaaagagtagtaacaaaaacaaaatacgatgaagaagatgaagaagaaaatataagttatgatgagcttgagaggcggatgtggaaggacaggatgcggatgaaagagcttataagtcaaaatcagtcatatcatcatcattatactgatcaacccgaaacctcatcggattcttcttattcagagaaacgagaagaagcgtcacggaggaaaaagatggcgagagcccaagacgtcgtacttaaaagcatgttcaagatcatggaagcctgcaatgccaaaggctttgtctacggcatcgtaccggagaccggaaagccactcacgggctcctccgacagtctgaggtcatggtggaaggaaacagtaaactttgacaaggctgcgcccctcgccatcgtgaaaagcacacagccgccggtgattgtagaagaagtcgtagtgtccaataattcttcagtggatcttcttgtaaacatgcacgatacaactttgggatctattctctctgctttgatgcaacactgtgtcccaccacaaaggagattccctattgagagagggctggccccgccgtggtggcccagtggcagtactattgggagggagctatggtggggccaaggcgaaggagtggtcctcccagaattattacaacaccctccaccctataggaagccccatgaccttaaaaagctttgtaaggttagtgtgttagcttctgtccttaaacatatggctcctaattttaatagggtgagaaggttggtcaaccagtcaaagtgtttacaagggaagatgacatctcaagatagtgctatttggttaaaggttgttaaccaagaagaggctctctcgaatgaaatagccaagaatagacttaaaataatctcatcagaagatgattgtgatcatgatgataacaactgcatatctaagaagaaaagaaaatgtactgatcttgagaaagaagcttcttcaaatagtacagaaccatatgcttccggccaaattaatgctccatgtcatcctcaagtaagtgaaaaaagcctctactttttcggtgaaagcagttctagtactcatgataaagagattaacaatattgaagccttggatttattggagaagagttatttcaatactgctcaaaatttgagtttggttgatgatagttggatgaatatggagagtagtgaaaccaatcagcaggcagtaactgatgatagtgtgagtactgaggagactactgattttggacactgtggaagctgtttggatgagcttaatacatatattgatcaaatggatgaattagaagtaccactcccattaatgctagaccttattatcccacgtaatgatgatgatgaacaacacgaagcttcaatttgggatatgggatttgactgaaaattagttgatataagaaggggtcctttagtttctcttataataaatgttgaatgttgagtttatcattatattattaattatagcctatcaaaattagtgtagatgtcagattatatgtatatgtacaaattgttactaccgagttagatcatcatgtttaaatatatagatattgtgtttatatttatacattacaatatattacaaccagatcgaagaggaagatgaatgaaatttaaaaaaaaaaaaaagaaaaattaatgtacagttggttgaggtatctaggtgtgattgtatagtcaattaattaatcatagaagctgtgtctttgaggtatgcagtcatcaaaatccagtcttggagcaatacatgagtaattacttttcctgaatctgttaaggttatattctatagggctttgtttcttcacttcaacctccaccgagaagacggcacaaacaggtctatggtcagaaaatcttgattccccacgaatatatgataattgctctatcccattcccacgccacagtatcctatcacacctgacaaaaaaaaaaaacattaatggtgtgatgatgaatacctaaataaaattattcatgtaagagtagatcagtacgaaccaagcaggtgttcggcgtttcttctttgatttcacagtttcgccagcgtaagcatctgaattgtgagagtacttgtaagttggggcaaagaaaatccgtccctcgtcgaacccactgaatactctcctcgcttctctctctgtattcagctgtaataatataatattgctaacgtgttaagtattccttgtacatattatatatatatatataatcatatgggctgtattgcatctttgcaaaaaaaaaaaaacaaaacaaaacaaaacaataaaacccttatttgcgtgagtctttgatgtttggttctttaattttcttctactccatgcctatctctgctaattaagttatagtcaaaagattaggtcttaaatataatatcacatcacatgtatgcatgtcagaaccgaatattccagtggaaatatccacgtctctgtaacattgtcatctcttgctctttttctatataatatgtagtataatcctaacttattttggccttgtgaaagagatatttgacctacttgtttactgatgacagacatatcatcccactatatcttgattacgttcaaacaaaattccctaataatttattaccattatataatcattgttgttagtcatttactttttttttttttttt

SEQ ID NO: 28437 - DNA, 2852 bp, Cannabis sativa
tagtgaataataccaggaatgcaagtaagtgttgtgaactcataagaagcagcttctgactgtgtactcataaaaaaaccctaatctaaacctaacacacatttccttcactctctctcccttatcgaaccccaaccccgaccgctcctcaaccgaagaccaggtacgccgcctttcaccctctctctctctcttaccggaccccaaccccgacagctcctcttcagactagaaccccaccgccgacccttgctcctttcgcagagccaccccaaccggccgattcctttatctctctcgtccttctttcgttttctttctcttgtgtttagccttaacctgattcttttgtgtaatattgtaaagttcgtagctttttttcttatctatttttgttttattttccagatataggtggagagggagggcattttcagatttgccccaagttttctggcaagagaagcggtggaggcgttgcgagagagggcttcagatctggggttggatgactgtgaagtgttttcagatctgggtttcttaaatttggtttgattttttttttattttttttttgttgtgtatgtgtgatttaggtgagcagtggtggtttcggtggtggtgggtggtggttgtagatggtaggtagtggtggcttcagtggatgttggtggtggtggatgtcgtatgaagaagatgaagaagaaaaacaatagaaaataatgaagaaaaaaatgttttacttttaatttttaaattatttttcttttaaagaaaattaaattatttttctttattttttaattttaaatatttattacgtggactaattaaatcgtgccacgtgtacactgtgtacatgtagacatttcaagttggcagttaacacccaaaaatagatggaaaaggctaagtgctaacagaacttgggtttaggaggttttaccactaaaattttaaaattgggggttagttgcaaaaacctaaccacttaaggaggttatgccgcaaattactctaaataaaataatgacgtgattgcttagctaattgataagttagtatcatgttaaccccaaatgtataattcatttgaaaaaaataatttaatttttttttaattttgttttacataattttcctaatcattaaaaaatcatagtaaatagccctaaattataactataagactgtgttagtaaatgttttcaagttttgaaatgtactcctcaagcttctatctaccattcttccaaaacacatcttagatttgtgaaaattaaccaattgtcccgatgctattgaatatttattcagcagctccctgaagcaattacactcctccatattggcctcaaaaaatacaagactaccatctgcaaaaaataaatatgagacctttaactctcttcttccaaaggacagcccccgaagtcttactgccatctcctctctgtttatcaagcttgaaaacactgctgcacaaaaaagaaacaagaagggagacaagggatcaccttaacgtaaccctcggtgtggagtaaccttgccttgtacctcacaccattgatcaaaaaggaaaaggtgacagatgaaatgcacttcataaccttcacaatccattcttcggcatatcccaatttttccatcattgtttcaataaaagccccattcaaccctatcatatgctttacccatattcattttcaatgccacttttgaaccattttcaaatttattttttctcatactatgaagcctttcaaacccaacaatgacattatcatgtataatgtgtcctttaataaatgcgctttgagattatgagatcaccctatttaaagagaggcgaagacggttatatggttactagggaaaaaaatgagaaatttacgtgagacgacgtcatgaatttcatattaattgtaaagatgtggtttaaaattttattactctaattatccctatgctgttattcctatgttgttgaattattttgtgaacagcataatcaattgaaacattaatcaattccaatcactttgtgttgtaagtttattttcttttgcttttttcttttgcttcattttttattttattagatatgtaactgaaaattaatggttttctttaacattaaaaattctttctctctcttagctagtagttaatttttttttttcttgtgtgtatgaataaaggtggcagaacatgcattatacttgtttttttttctttttcaaaagtttaaaaagttttttcagccacaccatttattattttgactcaaaaattgtatcattgtaatttattttttatgatgatcattttgatatatgggaagcatatatttttttattgctacaaaaacgaataactcgaaagagtaacttttaaatttcttttctatatatttagttaacaaaaataatcaaactttcaacttaaacgaaatttaatatatcaaccaattttataagtttctaagtaataaatttatacatctagtttattttgtaacaattttaatatgtttctaaaataaatatatagaaatgacatagtatcttaaaattcaatacaataactaaaatcacaagttactctatattttttagaattaattacatcccagcacataaatattaaattatttaatgaattattgttggttattaaaataccgagtattatgtaataatttcatacacgcatactggtggtggtttgttttgaaaaccgataatttttttgaaataggttgacacatatatatactttagtagttctcttctaagcttcaatacttatactttttttttttgctcattacttttattttgtctttatgt

SEQ ID NO: 28438 - DNA, 2382 bp, Cannabis sativa
tttacctcgcgtataggagatattaaattcttttacatctaacaacgtacctctttctcttaacaatataacacatggtctaatattcttcaatgaaataaatttaaactcaaccttcctcgctaggaaagtatcttctattttcaaatattttggtaagcttatcaatcttatttccattccaatagaaactttaatactctaatacttctaactgagacccacatctagaaggttatctaaatttctcctttcaatcatcggggttataacccctacctcactaaatacaaagtggagacctccacgaatctccccaagtattattataattattattaataactagtattctatcaatctcattaatatatatctcaatcacttgggtatatctccttcattcacaggttatgtgcttctccactttctgagtaaaccttacctttctcaggatttctatgaccattccatatacaagattcaccatctaatcaaaccattaaaagtatttcccatcctcatcataccatttctagcaatccagattgtctcctttatctttgtaatatcaatgttctcatcattaccaccttataagtcattaattgagttattccttaattaacatagttcaactcacattcctcgggatctatcctctactatctggaaatcttttctgtattacgaaatagcaaaactcacttaatcataatctctagtccacctcaaatcctggatggacacaattatacttatctattgttctaccttcaggggttctgaaccaccttcaggacaagaagattccatcctcgaaaccacttaaacaactgcccttaatagtttctcatattctacgacccacatgacatgtcaaatactcatcttactttcaaaaaagcttactactttataaattctttgagctgcttgctttgtcaactaatttactatatagcaacatacatcacttcgtgattatagtagcgataaatttcccattgaactgcacaaatttccttattgagttccatactcaatactttactaatcatcgtttcacactactcatattttttaaataacaataatactaataagcattcctttacatatatatcggtcatatagctctactgaactatctcaattaatatatagtcataataaactactattaacttaactcaggcttactctgtatatacttctaacgatataagataaaaattaatcatatagcatgtaaataatacttacttcccatgagttgagcttatcttcactgtaaaagtacatatgcagctagtcttcatgacctttaaaatcttgactgctctgataccatgttgtaacgccctaattcttagggacgccaaatgtatgtatttatgaactagtttataatcataaactagctgtttaaataaaatgtgatttaataaaaattttaccaactaatttaaatcataaaattatggcatagtctttttttacgattggggatcccctatttaaaatattacaagacatgccattacaatattattacaaaatacatttaaaagttcagaatactgtatttgaaatatagttcctgacaaatcagcaccacttgctagataagctgatatatacatttgttagagaagattcttgactcgtagttgtctaaatgtctctacctattacctgcaccacatagcacccatgagtcacaagtactcagcaagaaagtaataacaacaatcatataatttattattcaaatatcttcatttatactcagacaattagaatcaaacgatcacacattactctatccaaaccattactgacttttgccacaaataaacgtcagtatatagatattcagtaatacaaaatcataatactaataataggtcatattcatttaataatataaattaaatctattactcatagagtaactttctgtattacatcacattgcctaatcaggcaagtcaatactttaatataataatcatatattgcattgcctgcctaatcaggcaagcccatgccatagcctgacacccatatgtcacatcactgcattacctaatcaggtgagtccatgccaaaacctggcatccatgtatcgcatcgcctaatcataggaggtcgtgccctgtcttggcaccaatatatcgcatcaccgtatcacctaatcaggtaagcctgtgccaaaacttagcacccatgtatcgcactgcctaatcagacgagctcgtgccttatcctagcaccaatatatcgtatcacctaatcaagtaagctcattccatgtcctggcacccatatgtcactattgctacctaaacaagacgctgacaagtaagaaacctagca

SEQ ID NO: 28439 - DNA, 4621 bp, Cannabis sativa
  modified_base (3584)..(3585): a, c, t, g, unknown or other
ttcagttttatgcgctagtcataacttttgattttcctttctcgtcagataggttataaatcaaaaattacaatggtttgatccctttctcgtctgaaaggctcgattaaggtgttataatgattcttccccttttttcgtcataaaggtttggttagggagttataacggttcgacccctcttccgtcaaaaaggtttggttgaggcccttttataaagttttcaaaattttaaactatgggtttgcattatactatgtatttccagatcaatttcggttaatcatacatatatgcccctcaagtaattttaaagattttacgctttgtaattacttgtttgaaagaaatgattatttcattcacagctgggatttgaaatattttatcagtaatgtgatttacaatcattaatctcaaaagaacttccccaattcaattatttattctatcaatcttccaggaacatctggttttgataaaacgagttttgatgtccagggtcaatcccaaacattctcccacaatcgtttcaatattcagggtcgatctgacatatactggggttctaggtggagtaatcctggttttagttctgtctttgactgctactggttgacgtcctgttatggtaaccataacaatccagtatctactcaggtcgcaattgttttacaagtttgattttaccagagtaactgccttttgtactcttgttaccctctccctcttgagataaccaaagtgtcccttcttctcatggaagagggttataatcttcagtcactcaagttattgggcaaatcgaactgattatgggcatcttcctgcccctttatatatcgatgaaggtgtccttgcaatatgatagtttttatctcatctttcaactgacgacactcttttgtggtatgaccaatatcaccatggtattcacaccgcttacttggatccctcttgcgcctcgcatgtttcaaaggtgttggctggccaaaaaagacttcttgtacgtgtgcgaggtagatcttttcccgagtttcattgagctcagtgtattcggtataaagaggaatatacttgttgggtttcttgtcgttaggcaaccttttggaatcatctttttcattgattctgaggcttccgaatcaagttttttaacagtatcgtgccccagttgtctcttgggttttgtgatttgatgtactctggacttccaacccgctcattcgcaaatggaatgaatccttttttcttgaatcgaattgttgacggaggttagcttttttcaggttcaaatgctcttgtagatcagtctcgtcatgattgtggctggaccctgcccttcctctcaaggtttgactcacttttttcttcctacaagggtttgcacgagtttcattcttatgagactgaatagtgggttggaaatttttgtccgatgttccacatatcccaggctgtgcccctagtctgtcctcagtttcctcaggttgcatcttctgagagctctgagcatatccctgggttatctcctgcctcttgtcttgtgaggcacaaggtttgcctcgtaaatctcttttctcaaggttaggttgtttttgggtgcaatctcccagcattgcatttacggcagctatttcacgctccaactcggcattacgccagtttgtttcgttcaattgacgccttagacgacaattttctaattccacgatcagtatgtatctagtttggtcgtaagcgccatcctaatcaacctgattagggagtgaccgattgctgttccaaggtccgtcaagccaagggccccaatattgggtatttactggggattgcattctcttcatgtgatgattcagcagatcctcgaggactcaatgattctttctcgggacgacgattgattccttcttgaggacttttaccggttgtgtcatccatcacttttatgtcaggagtctttttttctgagcttttgcacagaggctctcaatgaaagcaccaaactgttaacgcatatttttgttaaccaaatttgagcctcacgaatatgattcaacacaaaaaactatagaaaaatatgaacatcggatttttacgtggttttgcctgcatagtccacgagtcaatcttattcaactttttgagtatgtttttctcttttttgttcggcccccctcttttgatcttatctgccactatttataattgcataatggcagttaattacaaagctgaccaaaatacatttacgactattatccctaaaattgtgggattttattacaaatcaagccaaataaatgaggtttttacacaactatgaatatcctgcctttattggaccgagatgagagcataattaaagatatacggtaagtcgtatctcatagggatgcctcgccgaggcgggagccaagatcactttgatagcgagcagtagcttgtcattttagcttctagagactaatattgtcttaaccctgatggttacactctttggggtcgagaagatcttccgcgcttgcaaaacatcttttagcaagataaacgcctcactgtctgttatctcggctcgccatactatctatacttagtttgtatatcgcataatatacgctaagtatttttagtgtcgtcgctttctctttcacgcagcgaggttgaggcctcgtcatgagcgtatgcactcacatggtttctcgtcaatacataaattagcagatcatatgtctctatctcaaagagggctattcagccaactgagttataaacctaccctgcgaattaaactttccaatgagttgttccatgctaagcgtacttgtcgtttgtgtgtttgagttcttcccagctcgacacgtgtcctcctctgatgtgcttaccaaacttaaggtataacaattgccccttaaaaagttctttttaattaagaagagctttttaatgattaccaagggtatttttgtcacactcctctatttttgaaaagacgcattccctctgattttggtggttgtgtggttttgaggtacatcagaattaaatgaccatcttttcaacttccacttcgaaccacgtccattggatcaaatcttttttgaaatcattatcgtgagtataatataaggaaaaggaaccacctttgcaccatttcagaaagtttgagaaatacccttaacttcttcgttaaggatcaccattaaaaccgtttgaagatttgcatgccatccttgtcttttacctttttcttacaagtttcctccaacttcattttttcaaggagatccttgctttgtttgatggttttcagacagatttcccaggcgtttccctaagccccaacttcaaacagtaagtagttttcttcttcctcgtgtttattacatagtgtggatcagttgcttgattcgcttttttcgttgtcatctcatctggttttggtagttttttagggttaaaactattcatattagggttcaggcaatatgtaggttgttttaagatctccaactcattaccttctggtttgataatattctcttccagggattgggaatgctttttgctggtagcaatgtccnnctctggttcaagagtttatcatccgaaagctttagagtttgagtttcctacagaattggccatcccatacaaacacaatccctcaaaacccacctcaaaattagagttaaacgatgctacggctagggaacacatactgagaacccaacaagaagatatttctagtcgccataggcgcttcttgcaagaaatattcgaaggcagatgtcggttcttgcgagaagcagcctggccagaaccacccaacatatcctttgttcctgtggcaaagcctttgtttttacccaacgtcacaattactttcgaaccaaatgacttggattttgagattatgcctcccacgtacatccaaaactcctcaggaccccagcgtcacctttgaggctgagttaatagaatcaaaggtgcgatctatctcaggaaacccaggcaacatgctgaagacctgtggaattgcacttgggcaatcatgtcaagttaggtcagtacgagagggtgaatttagttgctaccccctgcacgctttgccagcagtaacccaggaaccagtgatgagaccagtactagtggttcaactagtatgggcgcttagagccttgagcatatttgtgcaaaggccatcctccctcttcgggactacttcaaggattacataaatcacatcggggttggcccattccagctgaatcccatctcttataggattcttgctagtttgaaagtcttgtaaaaaattattaattggggttgtccacacctttagagattgagtatctttactcagttaaagtcgctccatcgaggaagaacactgcagtgggctttcactatcttggcactcatgctagagagccaaaaattattgtagacttgccaaataaggtgtccttcaaggagggcttcttttggacgtctggtttctcccccattggcacaacaacattttgcaaacttcgtaagtgattgttctcttctttcttatttacatcaatcttccttttttaagtacttgactaatgtgttgtttgttttgaca

SEQ ID NO: 28440 - DNA, 1257 bp, Cannabis sativa
ggatctaaaaccaggtcatcatggcctggatcgagacccatcgggcgaagaagaaggttccaacctcctaggcgcaaacaacatatcgtttggcatccatgggttgtggtcgttttcgaaaaatgacacatacgttatttacataaaacgacatgtcatttttcacgacaaaaaaaaaatgaaggcccttgggggcgtgtgtggggtccaaattggaccaattttcacctttatgctctattttaattttttcacttaattgttttgattatattttgagtttggtcaatttaaattgtcaattgacacataatcacatattagtttaaattaatttttttcacaattttttttgttaatttaattggttgaaaacataattatattcataccataaaaattattttatagatgattgatattttttataattatgttagtgaataattaattaaatgtttatgtactcacctattgtgggtttaaacatatcaattttgttaatcattgtgagaattgtgacacatttatagttaattaattgaatctcatacaatgtcatttttatttatttatcatactatacttttgtgatatatatgcttttggcgtttttgagaatatgttgtgaattttattgttgttgttattatgaattctttttggatatattttatagaaaatgtgtaataaaatattgatcaatttgcacatttattgatagaaattattgccaatatttatttgatattttcggtaatagaatttgttagaaattcaaaatgcgcaattggctttactgaataattatgagattaaaattactcattgaatgtgttatatttacccgtcgtaagctttcacgtgtcaattatcgaaattgtaatttatgtaaataattttctcctgtatcactcacaattattactaagatctatacatgcaatttagtcaccttgttgataatttttattattaggtaggatgcttagatggtgaaggaaacacattagatgtcatgaactacacaattttttctaccctattagtagtggattaaatgaatttggttataatatttgaagtagttgtctttacatgcgtaagagtcaatatggtttatttgaacgactctagcataacatgatcgtttatgttgatagatcattgagaaagctaagaaatgagcagattgcataaccttgttttcacatagtgacactgctctaagatattttcttttagctttaagcaatc

SEQ ID NO: 28441 - DNA, 1749 bp, Cannabis sativa
  modified_base (708)..(714): a, c, t, g, unknown or other
  modified_base (1110)..(1118): a, c, t, g, unknown or other
actcttgtttctctacaggttgtattcagttggaggattgttcctctgaggagtgttctattgttttgaatgagtttattatttaataaatctcccgattaattaaaaaaaatatttaaattttattttttaacactataaattattcgatatttttttaaaatttacaaagagtgatcaatcataaataattataacttacacaattattaataataaaaaaaaaactaaaaaattcttctagtcactaaaacaatacaagtatatcaaaacgaccatattctagagaatgtaatataaaattaggtagtaatataaacttctttgttgccatttatacttttggacaattaataaagtcacataattaaacaaaataattataagaaaaaaaaaaaagaagagactaaagtaagtatagtttgacttctcttcacgtgagtaatgatcacattaatatagtaaagtttttctttctttctataatattaatatctatttattttggcttttcacctgaaagttgatacttatatcataacgaaatgaccaggtagtttccttataaaaattgtttaattattcatttttatttagtatattagaatcaaagttaattaggggatttgttagaatttgggaataaagtgaatgtgattacatctcaaaattaattggcaatgggaagagtagctcattcatcttatnnnnnnnaatttatttccacacattagtaatgtgaggctaactctaatacaccctcctcacgtttgagtctggaaagtgtgagtataacgaacgacccttaagaaaccacagactcgaacgtgacatttgaaagaatcccacaaggccaaatatcgggaaatttgtgggtgtacacgtcgagaaatttgtagattttaaaacaagtcaaagaccccaacacttgaaattggcacataacactttgacttacaacggatcacaaacgactttttggaccggtggtaatttaggctcacaacggatcacaggtggctctgataccatgttagaatttgagaataaggtgaatgtggttccatctcaaaaccaattggcaatgggaggagtagcccattcatcttnnnnnnnnnaatttatttccacacattaacaatgtgggactaactctaatagaattataatgcaaattaacatggcaaaaagaatttttttcccctttcggtgctttgctagggctcgacctttagtttctctgtggctatgacgggtctgggtagaccaaagaagggtgtcgttcagggggtgaaacgaagtaggaccaatctttcttcccctttaatttttcatttagagaacattagacaaaatttgagctctaaatttggagaatcaaaatcatgagaaactaaaaaaggccctggaattaaaatagatatagctgatgttacaaaagagattcaatattgggattcaacacttgtttgttatgtattgggtgttaatccttcatttagcctttttttgctaatatgatatgaaaagataaagggttacacaatgtgggattactggctaaaggtacccacattgtgcgttttacttttctggcagagagggatgcaattcaaaattgagggttcttgttctttgataggaagtctattattatgaaggcttgggatacctacacagacttctctagggaagacgtgcggtctgtgactgtgtggattcaaatatcgggattggatatagaatgtt

SEQ ID NO: 28442 - DNA, 2699 bp, Cannabis sativa
gatagttatgaccataatataatcagtcgttgcaatagtatttcaaagtcaagaaaactaaactagcgcccccaactcattttcgaagtgctgcagcacgaatgcctttacatagagcagtttttagaattttgccaatgccttagcgccatgggggagtgctgtgacaccctagtccgtgcgaatcatgaaattctacattttaacagggaaaaagaggtcttttcacacataatcattagggctttattaataaaacaacaccaggtgcgattagagatcattctaagacggcttaaacatatcaaaagaggagtcttgtagatgcacattggagcaagattgacaacctaaatctagttttcttctcttctacatttattttctgtttttaatatttatcaatttttatgtcatggatgttttaactttgattatgaactaaatttatcttcaagtttttcaattaactctcttgaaactctattatgatcttatgtaattttttatttttttatccatctaatatttaatcagttcatattaattgtatatttaatttttgagcacgcttttacatattatttataaaattgaattgaatactgagaagtgagatttaattatgctaaaactgaatagacatagattttagtatagaaagagaatatcaaattgatatgtaattttagggctgagttaattgcttcattttgtttacttttctcatagagatatagagaatttgtattaggtcaagctttctatttcctaacctgaatagttgacacttttgtatggctatcattttagttgaggagagatcatcatcaactgcattggagatcaatagagtggatagttgagaagattaggaatcctactttaataaatattagttaattctatttttagcataattagattgtcaaaaatattgtgtaatttgaatatggattttggttgagttatatttttatttccatatatttgtttttaattgattgattcatttaaggtataaaatgtgtgtagcttttctaaattgggaaagttggacataattggtaagtttcatgaataaatcaagaaaagttgctcttatagcttgcaattttgtaggtacagaagcataaatttctgggctgattgaagatctttctcagggaagtttcttgtgagcagtgatcttgttcagaccgtgtatgagctgtctatattgtgtatattgattataaatacacgttatagtagctaggttttgtatctctttcacatctttttatttcactcatactttgtaagaaagagagtatatctttgttgtgtagaggagggattgttcgactcttcctctatgtttatgtattttgtattgtcttaagtctgtaattaagtctacaaaagaagaagaacaacagtgctacctttgggagaaggttcaacaagcttttgagagagaacttttcaagtcttacctcaggaggaaacaaacactcttcaaggagatcgaaaggaattcaagcacttgaagtttcagttagaaggtggaatacatcaagcttgcgacatacaataagagggagtctatttattcataagtcaattaattagtatttttgagacatatctaatgaatcttatcttttggtgtggccctatgaactagtaacaatttgcaaggattgttaataccacgtataaagaccttgtatgtgtgtgtgcgtgtgtgttttttttttgcattgtttgttttttggtttattctgcagtttcagagttatgttctataactttagaataattatttcagtactaattttattattctgcaattaattaaattaattaataaattggtaattataaaacacacaattttaattggtatcagagcaagtcactaaactcttagtgagatcttgagattattttattttgtttaatttattttgtgtgagatgtagttctttgcaaaaggaagttgtatctctcaaccaccactattgaatgatactaattatccatactggaaggttaggattgttggaaagcatatttaatcaggatcttattttactattcaagtatgttgattatttctaatctaacatcctaaacatggaaccttacaaacaattataattaaacacttaaaagtttaagaaaactttataaaattacagcagaattatatgtctccttccgttcaattctattacccttgttcctttctgttgcagagtatcaccaagaactgaacttggatttctcctccttaaaatgtgttcatcataatcttccacgaagatctgagtattactttgaatagtgtgggttgtgttgggttttgtgccctaagtaaaattctatttcggtgttatcttgaatttttatttatcaataaaggaacaaaattattttattactcatttaaataaaatgcctggtccacaagtttgcttcatggtcatttgcttgatttataaattcttttaaatctttatcacattattattcataattattgttttgtctacacagtataaagtaatcaagattatgtgatcaaatattaatcccacgatttatcaattcacatgaattctactgatatgataatcaacaatgtggtttacttacacttagatagtggtatgtcttttccaaggcattggtaaagtaagcttgtattggat

SEQ ID NO: 28443 - DNA, 3467 bp, Cannabis sativa
ccagacccaaacctggacctagaagtcacctcaggacctgagatccaagactcggtgcttggacccaacctgttgtcggtgtcttgatttgggacttacaacagaacccagacccaagctcgaactcaaaccaagactcggacacataccaagacccagacccacactcgggaactaaatcgaaacttgaactagcaccggactgggatcttggaacgagaccgagaggtgcacccggacccgaaaccagaaccagaccaaaccttagaccctaaccgagattgaaacctagaactaaacctcgtctcggacccaaattaggacccgaacccaaactcgaccagaacccataccccgggacttgaaactgtaactgaaactagaagcaaatcgagacccaggaacaggactaggactaggacctgaacctagacccaaaactgtaaccggacgaggacccacacgaggagacagtcccaccttgggattgggttcgaaaccttaatccaaacccgaactaggacttgagacccgaaccctaacctgaactcagacccaaacatggaacaagactcggggacacagaattgggattgagacccagaactggaactaagtcatggtcccagacctagaccgaaacttgggacatgaaccgaagccagactaggatccatgattgggatcaagatcttgtatcgggatgtgggaaccgggcttagacaagacccatagtcaatatcttaatctgggactgagagaaggacccgaagctggactaggacctggaaccagacccagacctgggacccaaattggaaacttgaaccaaaacgtgaccaagaccctggaacaggaccacgaccatgaccctgaccaggacctggacctggattgggacctggaaatagagaagaacctagccccgacactctagctcagacatagtctggaacccggtccggaacccaaactcagactgagactcaaacctgaacccaaacatgaactcgggactcaatctcggacatgaacctagacccaaacctgaatacttacctaggcccaggtcgagatcaaaacacgggaccttgacccaaacccaggcgcagaccaagacccgaacttgggacccagacctaagactcgaacctagacccagactcagacctggaccagaacgggatataaaaaacctgtacctacactaggaccccgaccccaacccttatgtggacccagactcgaacttggaaccaacccatacacagaattagaactgaaactttgactaggacctgcacttgagagtagaactgaacccaaacgcagacaagaaccttaacaagtactcggacttgagacctaggacccgaacttggaccacgaccaggactgggacctggaccaaacctggtcctaaacccttgccgggacctgagacacgcgacctagaccaggatccagaccttgactaggacccgaacctgaacctagaccaagaaagggaccgagacctagaaccgaacagagactggacctaggaaccgaacttggatgggggacctagaccagggacctaggctgcggaacccagaaccagatctaaaacgggcactcgaacaaacacctggagcccgatctgaactagactgcgatccagacccaaacccaaactcggactaggactcaaaccccgacccgaacttgaacccaaactcaaacttggaatcacaactagaactggaaccggactatgactaggactaggatctagacccaaacgctaaacccgaacctagaccggggcccaaacccaggccagaactgggacctggacccagaatcgggatagggacctagataacggaactaagaccaggacccaagaagcaaccctcaaccctgacccatacttgaaacttgaacctaggacccaactcgtgacaagtcacctgaaatagaaccagaccgggacccaagaccggaatccagatctggactggaggcttggactgaactcgtagttggtgtgtggatttaggactttgccccagacccaaacacgaacccagtctaagacccaaacctataccagaactagtaccctatgacctgaaattacaaccgaaataggaagtagactgggagccgagaacgggtcttgaaccaggacttggacttggaacccaacccggacccagaactaaaccaagacctagatcagaactggaactatgactagcactcggacctgagaccagaatcgaacccaaaccataacccaaactcggaccagaacctggactgagaccttgataaagactgggacttgagaccttggacccaagcctagaccgggatttggacatgacttggtcctaaaccctcgctgggacctaagacccgcgactcagaccaggatccagaccttgacaaggacccaaacctgaacccagaccaaaatagggaccaaaacgtggacctaaatctagaccgagagttggactaaaacgaagactcgggacccaaacccggacatggacccagaccaggacctaagaacgggacatggatgggggacctagaccagggacctagtccgcagaacccaaaggaaggtctaaatcaaggagtcgaatccaaactaggacctgaactagacccgtgaatctgaagtcggacccagacccagacccgaaaccttccccggacccaaaccagcacaggaacctggacacgaacccataccaggaccaaacctgaacctggacccgaactcagatccaaccccagaatcagacccaaacctagagctgcacccggacccgaactcgaacccagaatgggatggaacccaggacatagacttgaaactaaacgcggacttagatcgagatcgaaacttgggactcggaccttaacacggccccagacccaggaccctaacccacacccggagccagatccggacctaaacttagattcagacccgaacccaaactaagactaggactaggactaggacaagaaccaggacccagacctgaacccaaacccaaataaaaacccaaaccaagaccaaaacccaaaccgtgactaagacaaaaacaaaaaccaagactaggacccaaaaccagaccagacctaggacctggactagaaatgggatagggacgtgtgcaacggaactaggactgggacctaagacccgaccttgacccgaactttaatctagtacccagctcgtgacccatcacccgaaatggaacaagaccaggacccgagatgaggatctggatctggatttggggcttggactgaacccgtagtcagtgtttggatatgggacccagccccagacccaaacccagactaggacctgaacccaaacccggactcgaacccagacctaaactcgaacccagttccaaactagaacatggacccaaacccgtaccttgtga

SEQ ID NO: 28444 - DNA, 3531 bp, Cannabis sativa
gtatttcgatccttattcatagtgtatatatgtttgattaattccgcacttaatacttaaacatatacatttcagtttatatatataaatgtctaacagaccaaccttagattacatccgtgcctagaatctacctatcttagcgctacataaaagaaaattaacttttaataagaacccacaaatttactttttttcctaagacgtattttggccctgtgtccactccacaatatctctctttggcattttcacaaccaaagcaaagcattactcaacaaactacgttgatgtgattgtgaaaatgccaatagatagtttgttaaaaactcaatatgatagcaactgaattagaaaagtaacaacgctaattctgtatctcaaaatataaataaatgtgtgaattatttttataacagtaaattagttgataaaatataaattagtgcctaaatcaccacgtttataaatcaatcttttaataacatataatgacaacaaccaaataattttttatatataataatttacatacacactaaataatgccacgtgttcagcaaatccaaacttgaactccatgcaaaaggacacgtacccgcatttaactcaaatttcatttaatttctctctcatccttctccttcttccttctagtatttgaccaattctctctttctttcactcgatcgaactttgaatctctacaaaaaagagagagagagagagagaaaatggtaaagctagcttcggctcgtgagagccgagtgtacggaccgaggatatctaagaacagagcagagtacataaacgctgggctgtacctgttcgcaacagtggtgcttctgggtgggttcgtggctcagctctcgggcgaacccaagtctggtctggtcctattgctcattgccttagtcctaatcgccaccatcaacttccacgacgccctcgcccaccttgcttcctacgattaccgattctccttaatggagtacgatgtacagctctttctcgttgagttctttgtccctcttgttcaagcaatcggttccattctcctcttcttgggaattctctttctttttcttcaggtacgtaataatttaacagtaattaatatatgtagttttatttttcactagctatttatttgtggctgtgtgttagttattatatatattgatgttgaagatgatcaagggtcgtttgaaagtaaatggagtcgttaatcatcacttttgccagtacatttttttgatattaaaaatttttgctaacacaaaatgaaaagcgttgccaaaaatgattttttcaaggcgggtaaaatttttaccttttgccaacgtattgtagtgattgttaattgatttttttatattctaacatcatatcagattgaaaaaaaaaaaaactctctaattcaagacccaagacccaaagtcaaaaaaaaatattttgcaaataaaatagcaatcttacctctctaatatatgttagaaagataatataatattgccattttaaaatggcaccttaaccattttccatggtcatatcatatcatatcattgtccaatacaataataaatctactacaataaaagaagacaaaatacgaaaatttacattaacttccacattatggctttatcctaattgaattaattatataaatttgatgatgaatatgacacttgtatatgcatatgtaggaagagaagggttataggtacatgaagatggaaaagcatggaatgaatatgttaatagcagggccagttttatgggtagtgggatcaattcacaactcatgccaagtgtacgagagagccgatggacatgtccaaatcttacaacaaagtgtccacattcctttcttgataggcagcattttactcacagttgcctccattctcaacgctcgtgagcatgctgttgctggacaactcttccatggtctccaactactggtcagtaccccctcaatccctccccattaatatatgttaacatactattttatggataaaagtactgatgagttataatttacaatataaatttcaggggaggaggtggatttgggtgagcatatttgggagcttgtttcttgtaattggggggttgatgaatgtggttaaagtgtttcatatgcagagcagtagcgacggtggccgaattcgattggagaaactaagaggaggagcacaagagaggttgttccaagaaagagatggacaagttccactcatcttagaagaagaagaagatcgacaaagccacaggaggagaagaaggcaaactagtcctcgtgataatggccaacccaaaataatattcccaccatctccagtccctgtcccaactccttacaaggatattctacttggtccttctactactcttaattgattaaccatacatatagttttttttattactttgtaatttgatatttctttttgaacaatttttacatatagaattaatgcagttactaattaataactctgaattattaatttggcctggtatgtttttttactgctaaagaatcatggattatcgaaaggcatttacaataatatgcacaatcctttacaaaatttggatctaatactaaagttttttttttttgaaatgggatctaatactaaagttaaaatatgttattaaatataatatgtaatattgcttttttcctttttttttttttttttttttgacaaggcaagacatattgcaaattaaataggcaagcatacaaagtaacaaatattatagaaaataatgtcatgttgcaaattaaattggttcaattacgtgttgaaggtttgatcaaagtacaacctagaggtttcacatgaagtccccaatagctaggtgcttgttattataataggtaaatttacgataaaatattagagataaattaaaaaaatacttattttttgtgtttattaattaaaaatattactttataatattatattttattaaaatatacctatttttttaagtgggttgctcaatatatttttactctttacttagtctagcatatcattttcattaatttaagaaatttaatgaaaacattatctataaaagtaaatatatcttaaaaaaaatataaaaaatagagataaaaattaaaacaaataaagttaaatgaatatacactgtaattttttcataaaattatctagattttgttaattagtctgataaattctctaaattaattttaagcaatagactattttgtacatgtgatagattttcattagtctacattagtgctacaagtacaaatggtgtcataaatatgaatcatgttttaccatatcaaaaacaaaagatgggtgctataaaaaatatgactcgcggggttattataaaaggcattatttcacaaatacataaaaataacaaaaaaaatgtaaaaatacaaatgtacagaattttaaattttttatgatctttatgattttatttacagaaaatacggtttttttatgttgtactctt

SEQ ID NO: 28445 - DNA, 4096 bp, Cannabis sativa
aaaaaaaatctgatttttttaattttttttttaatatttataattatttttttaaaactaatattacgtggaccactaaaaatttgccacgtgtgcaagtgtgtacaggtggacaatccactgtggcacttaactgtgatttttggacggaggtgtgcaaagcaaaacgaaaccagggtttaggtagtttaaccgccaaaaattcgatttttgtggttaagtgttacaaaccgtaaaattcaggtagtttagccgccaatatccttttattttaacatttaggaaaactttttaattcaattttttttatcctttatgtggtagttatttaaggttagtaaaatattcttaaaataattcaaatagtttatgataacataaataaaattgaaatatatatgtgtatatatttattagtatgattgcagtgaataattatttgaattttattttcagctattcaaaattttataaaaatttaacttaaataactaccatgtacacaatcaaaaaaaaaaaaattaattgttttttaaatattaaaataaataaaaactcttccaaaataccccagatgtacttaacatttttcctatactatttacgtctcatttcatcctaaatatattaagaactcacaaattatgtcatcccaaaaactttttcaactacttccgaaacaatacccttgactcgccaattccctaaaactttccacatctctacactaaaaaaattctcttttgaactttcacaatctaccatttcccccttgttcatggccgcctgaagttgttctctcccccaagaaaagctcatcactcgtctctaccatttctacttcaaacaattctttttgagagtcaactcataattttttgttcactctaccactaatgagaaaaaagttgaagacttaaaagttagaatttggaattgtttggttaaggcacgtagttccatctcaaaattaattagtaatgaaagaagtaattcattcaaaattttatttataaaggttggagacttttaatgttatttactcaaattataataataacattaaagattcaactaaccaattagtaattaatacacttttcttacttttactcctcttagtagttaaagtgcagtgaaactaatttgtgaaaaatatgttttaagaacacatctcaaacaatactttactagaatagaactcatggtcacgtgtatagctcatataccaaaaacaaagctcatgtgaaaacctttcaaacaataacatgacagccacaggcataagatttacaggtttagtaaggaaaagcagttaaaagggacagtttgctgttaggtactgatcaaaaaccttatcaagaagatcaactagtctacatttgaagtgaaatgggatcaaaagtgtgagtcacttcatgtactgtaaacctctaaatggcaaaacaacagtactaatcctctgcctcgagagactgtacagtacatgcataccaaaccaaacccacataaggctataaaataatgtatggtaagtctacataatacaacaattatcttagtttggaaaagcattaatggctctgttttatcaaagtaagtttggagcaaacgatgttttcttatgtctcatgataattgttatgtttggtaaagcgtcggtggtccaatatctatgcattcaaagaagaaaaaaaaagtagcaagtacagttgcgcagagctactgacttttcattcagatttaagtctttcttaggctttttaagccctttgtattttttttttttttcaaagagcccacaccaataaattacccatgataattccctttcatcacatttttttttttgtgtgaggaaaacaacatttatgcaataataaataacactgttaaatgacttcataaagggtttcaattcttatttttcaaatgaatttttgttaaatacatatcttcctctttttgttgttcattcataaaattcttcttcaaaccctaagattttttattcgtgaaaataaaaaacaatttagttcctttagcatccaagctgacaagaaaaggacagctcacatcaatggaaacactatatagttctaccatttatgagttaagtcacattcttgtgtacaattttgttataagttatgggtgctaaacactaaaatcacaaatggatttcttttgcttgattcaaattcctcttttagaaaaactcttcagaataaagtagtactaaactagcacatttcatgaagtaatagtcaaattttgagaaaaatcatatagaaagaaaaaaataaattggttcctctaaaacccatgctgacaagaaagtatagagatcaacataaaactaattttaatttaacttaatgaaattgtgtaatttatttttagtataatttatgattaaatagtattattattgtaatttacaagtgtcactatcattgctcaaaaccaaaacagagagttttatttgacgatcacagaaacaaaatcttcttttagcaaagcacatcaacataaaagtactcaactaagatcaatctaaatctcttttaattaaattttacttttcaggaaaataataataattattattatattatcaaaactaaacattttataaaaatcctactatggattatgttcgaatatatgtacctacctcaaagccaaaaacagaaaaacaagatttaagttcaaactatcacaagatcacactcaaaaacagcaaatacataataaattaaaccagatattgaaagttaaaaatactatctgattatgaatttcagtgcatgataccaaaaaaagcagtactgaaacacaacgatcgctaaactatataaaaacactaaagaatttatttatatatatatatgtattaaaattaagaagattataataagaatttacattcgaatataagccatatcaaaccagatttgctcaaacgccttgacgattatatcatgatattccttggagttgagagaaagataacaagctaaaagttcttctaaatccttagtccctctgatgttgttttccacgatcatctccgccattgattctctaaaatcgctctgaggatcaactgaggatttaacaacagcaaagctttccgaaaggtgtttgttgtaatttcttgttgttgatgatgatgatgatgagatgctctttcttgcataggcttggattttcttgctggcgagtttaggtgagttgactctgctgagcttaatgccactcgaagattttcgacccaaaacattgttgttgttgttattagtgctttttgactctcttcgagtttttgttctaaagctttcttctttgactttcggtctgtacttagtggctttaaagatggtgtcgtcgaaatttatgggctttgttaagattggaggaagctctagctccgtaacgacgtcgtaaaactcgtcttctaacttctctgttttcttgacagagccatcgtcttcgccattattgccattgttgttcaagtcgatgatgatgtcagcagtggaagaactgagcctacagttacaggagcttgaccaagaggctaagcccacaaaagggtctgacctaacatagtcatcgcagtcaaattcggtctcggaacaactctctgttccggaaacagagtagtctggagattgaaccgggttcgggttgagacaaaccggttcgggtctcgggtggttgtggggtatggagattgctttccttctagctattttcttggatgattttctaggaggatctgggaaatggggtgttgagttggagggagagaatgatgtgttgttggtaaagaaggggtgtgttgttgttgggtgagaaagttggggtttttgctgggttttagaattgaattgagtgagctttttctttgtggtgggacgagaattgttttgctttctggttttgctcatgtctttgagcttgtaaaaccatgcatttggtatcatatctgacaatctgaacttgttgttacccatcaaggaagaacttctcttctctcttctctttctttgtcactaatagttatacttaactctctttctctctctct

SEQ ID NO: 28446 - DNA, 3335 bp, Cannabis sativa
catttgccccccaagtctgtacgggaattctaaagttgcatgtagacttcattcgagcagtctttgcctttggatgggtgacaattgttaggtgcatctatttgcgattcgatgtgaggctgaccaattgtctcttcaaattttcggcttaataaatgcttctgatgcaattaatgcttcaaaacccagttttctctcaccacgtttgacagttacacttgattgtgtttgatttccaatattttctttggggggaaccgaggcgtctaaggcgttcgaaatgattacgctttttcaattttctgcctataaatatgactaagcattgttcacaaattcatttttaccaacttctccattaagcaagctcaaagcgaaaagagaggttttcgcttcaagtctgccatgaaattttcacaagagccgttgaagaagcttcgctttaactgaatccaaccgtcaatcagtgagtaagtttccgactccttcttcttttttactttgcacatttagtttctaaatgtgttcttaaccttgctgtctataggttgaaaaccctaggttcagaaactttgcgatttttctttacaatgatctgcgcgacttcatgattcatgatgcttgccttttgattgcaaaatttttgtctttcaccttgcttattcaaagccaaaactttcaaacttttggattttgacttatcgtcgaatatttccattctttaatctgttgggtactcctgctcggcatattttcctgtttattgttgaatatcccgaccaaacactcatctcgcgtgttgtcttttgtagatgaatcctggtgagttttggggaagcgaactccaaattgactaggattttcttcaactcctatacgaggattaccctcatctttgttttagtccgccctcttcaatcgacggtcgtttcaactcaatcttcccatccagcaacaagatgatggctcaaacaatgcaaacaatgcgtaaggtgaatgcgtccgaccctcacgtggcctagcaccccactttacccatcaccaaataggatgcacccgtctaggagaagggggatcatgaaggggacaccgaagtccaggagatagaggaaccgggcaatgtccgttctagcagcctttctgaggtagcggaagaggaggaggctgcacctccaaatttttggggatacaacgaggctggggagctgatagatgtagacagagatgtcttggttaaaggagttgactacgtcattgaggagcttactgttgcagttcctcacaggaggcaaggtgccttgggtgccagatgggtgagccctccctccaaggtcactgaggcacgactaaggaatctggaccagtccgaccatctggtggagctagaatgttatgttcctacctcaaacaacagagccacaaacccatagaaggggatgtgtgcctggttgggtgctcattccaagcaagaggcaatgtttcccttgcacccatactttaggaaggtggaatacttattccgtgtctgtccgacgtagtttactcccaagggcattaagtatctatttgccctgtttgtcctctacgccacccagaagtggggtatgccatctccgcacgaggctagttggttttttgacttgaagtctactcccatgaaaggcaggtcgggatacttctatttttctcagccagacttcaagtgctggacgggcagcggggacaaggccgtgagcgaaattgggaattttgttgacgagtattacatgctggatggcatgggcacaacctatacttggttctaacagatccctacatattagcgtccacccttcacgctggctcttagagatagagcccaaaaggatcacttaggtgctgcatgatgcctggaacatcactttgttgaccttaaggccaacttcgtggagtacgggatttattgaaaggatttcattccccatcctgtgaaggagaagaagaggaaatccagtgctcgttgggctgagggagctcatcaggagaatgaatccattcaacagaatcgtgaagctaagttgaagggaggtgcgggagccaagcaatatgctcaggagaattttgagcaagaagatgaggttgaggaagagtcggagactccgctcaaaaggaagaagaaacttccagtcgagcacaggcctatcgaacatacgattaagatcaggagcccagtctacctgctcgggcgtccactcctgtagtaggaaaggggaaagccatcttggaggagcaagaagactcgttggatgatgatgccccattaggtcttgctcgagcagatgcttctgccaatgttcaagatactccatcttgccttcaactttcctgattactatctttcttatttctcatgatttttcctaaccatgttgttttaatttcatacagacatgtctcagaaaatgctcgaagcttcgtagaagagagtgggaggaagctcgggcttatctcctccagccaagaagtccaggggcggtgagacaacccctcccagtgagaaggcaccggccgaggcaattattgatctctctgaggaaccaaccatcgtagacccttctgccccaaaaatgactatgtccaaagactctcaaggagggagctcgaacaagccagagctgtcaaagggcggatccgagctggtcagaagcgaatctgagcagatcaaggcccctaccccacctccgttaccgcacccagagacaaaaagaggtagagaaatgctcactcactatgtgactcggtcagtccttgaggtgaatgagaagttggcgatgggaggagttctgaaggagttttcaagggtaagtcctttctgacagtttctttttgtctttcttcacttagttcagattttaacattctttctctgtacagaccggtctgaagatggcttacacttattcccgagctaactcagctgcctctaagaatgtcgccatttccaacactatgcgagcggaagtgcactttgccaggaaggacaccgatgaagccagggttcagcttggggctgtccggatggagttgggagaggtcaataagaaacttcttgctactcagaagaaggtggcagaactgaccaaggatctacaagcctccgatcaacttgaagccgccatttcctccttatttaaggaagtgaccagccttcaagaagaaaaggaggttctccgtgctattttttgcaggttgaaataagagaagaagacaaaggaggaggagcttagagctaaggttgagaagtataagtcagaggtcgggcaatagagatcccaagtggagaggctcggagggga

SEQ ID NO: 28447 - DNA, 3483 bp, Cannabis sativa
gtgaaattaagagctattactattttatgtcattatggttttaaaatctcttattgtcttcttctatatttttgagtgctatataagtgttgagtatatgcttatattaaggcaatacttaagttagtgtggaagactacatagtctttcacatcctgaaggaaaactgaggttcagttcttaattacactctacgacataaatgatcaaaggtaagagaattaaatggaaagagacattaatttctgttgcaatcattgtaagattttcttaaactcatgtttattacaatttcttttagtatccatgttaggttgttaaattagatataatttaacatacttgaatagtaaataaggtcttggttaaataaacttccaacaacaatttagtttaaagtagtggctttattttgaagttagaatagaccttgtatgtactaagtctctctaaaaacttgatttcagtttaaagacttgtaccttttggtttttcctttacattttcaaacaaatctttcaatttataagataaatttgaatgtgctggaaattgtattttattatggggtttactctaataatttacaaaacaatacaactcatgatgctatgcatgttcacgttggcactaaaagatgtgttatgaatgagaattcatgtattttatagcaccaaagattgtgacatatctccattaatagaaacaaaaggttagtaaaagatggggtactcaatactttaaattttattgactttgacatttgtgtggattgtattaagagaaagaaaatctctaaatctttcaaaactgttgtccataagagttctgaaatactataaattatacatacaaatatatatagtccatacatggattcacatgcatagtcaaaaatacttcatctccttcatagatgattactcacgctacatgtatacatacttacttcataacaaaagtgaagcattagataagatatttaaaagtaaagtaaagaaacaatgcaacaagtaaattaatataatgagatcagatagaggtagagaatgttattgtatatacacaaaagatgaacatgcagttggtccatttgcgaagtttcttgaaaaaaatgagattgttgcccaatacaccatgcctggtacacccgatcaaaatgatgttgtagacaggagaaattgaacattaatgaacatggtgcagattatgcttagcagtaactccaatctttctaaatccttgtggactaaagctctaaagacatatgtgtacatattaaaccgagttccattcaaggcattctcaaaaactccttttgaattatggaaagattggaaaaccaagtttaaaccatgtatacatttggggatgtccatctaaagttagaaattggaagtttgaatacacacactaatgttgttttagtttttttttgtagatccaaagtttgtgggatcgaagctcaaaggatcaatagctagaagtatttcagttctttcatcgcatgtacaattttgacatgcttacaattcattctgcatctttatatcattcataatgcttcatattttacattataatttcttacacaaaaagagattttattagctgatcaaatcattttattaactggtcaaatcaatgcttaaaggagtctccttcaatgatttgatttttatatcttaatttagaaatattctgcttcattacaatcaactgattacatatacattgtctttatttttttttggctacaaatctcaatatgacattaataatggaagaaggtcattacttatcattatattttatataaattcaaaacaaaattctagtgaccctattgtgattggtttaagaattaagatgataagagttgtctgacattcattggtgaaatgaaagtagtgtcaccatcaagaagatggtttgctatgatgacattagaagcatcagaaggatgatatggatcccagaacacatatttggacctatccaaacacacttttgatggaggaccacatggaatcagacctccaaacctcccggcaaggtagcagcaagaagagtttggatattcaaaacctgattttaaaaaacaaaagaaataaaataaaataaaattttatagcaaagttcaaatagttgaacattacacatctaaaaatcttaagaaaatacaatattataacaaaccatattttatgtagttctcaagaatatcttcaacaacttggtaaacatctgcataaacaaactttgaccctttgagattggcattgagctctggaacaaggctccttaattgggtgttgaatgactgagctagctcattaggcaatgctacacaattgtcccctgatttaggattcatatctctctcaaatggtatgcacccaataggtcccacattagccaccacaatcttcctagctcctaagttgtgaagtctctacaatatgtgacaaatataagtgagatataatgggtcaaaatgtttttttattttgttgcaaaaaaaaaatgtgatgaaaataagaaaaggggtatttttgttctgttacattaagttgtagtctcaatcttgaaatcatagctcccacaaacttgtctggagacattaacttctgctcaggaatagagagaattggtgttaagtaattattgatgaagtcatttgagccaatggtaactgagaagagagacttttcaaacaattgcatggtagctgggagaccaatttgggaaataatatcttgcttcgtatttgcaaagttatcaatctgtgcatcaagatttattcttcctccctataaatcacatttgaatcatccaattattgaaacaaaaaaaacttgtcaaacttactaaacaagaccacgtttgattgctcaacaatcaacaacaaattagttgagctttacaaatgtcttacaaatattttcccagtttcattaagtattccacctccaccagaagcataatttacaccatcaagaactattggtccagaagttgtgggagctaaataaggtggagtgaaatgtttgaaacccaattcttgacctgtcaaaacaaaatcaaaatcttagctgtagcacctatgagaaggaggaaaaacacacaaacaaacaaaagcttaaaagaagaaccttgcctataatgtcaattattgttcttccatttgtgtatctaccacttggtgaaccgaaatcgattccattcggaacacagttagcctttgataaggaaacaatgtaattgttgtttccagcatcaaccagagaatcaccaaaaataaaattagcaggaaaactttgtcccaagcaaattccaaacaatgctaaacttgtgtacgtgtagagtgccaaagctacaatgtttactctctttgagtaaatatccattaacacaatcaaagtatagaccttaaaattttgtaacaattttaaagttgtataggatttggagttttaatga

SEQ ID NO: 28448 - DNA, 1104 bp, Cannabis sativa
tttttttttttttttaacaaaccattagtattattttattttatttttttttaagaaaaacaagaaaactttattaagcaatcaaatagtcccgcacgagagtatcgctcgctcgagaataatacgataataggataagaaaataaaataagtagatctcgctaaaaagtgagctacaatgttagcagattgtttaataaattttaaagaaatatagctaccattcaactcaattaataattttttacggtcattaataactttgccaaaataggataacatgacagttgaacttctgatagctcggacgactataagacaatccgtttcaagattaacactcctctattgttggttcaaagcttcacgaatgcacaccacttctacgatctttggttgtgcggtacatcgagtatagacgaccctagctatttccaaacagcaagcatggttttgggccacaaatgcatagctaaaacagtttgagtttgcaaagagggcaacatcaatgtttaccttaatcgtattaacatttggagtacgccattgctcagtataacgtgcgttctaagatggcacgttacaagctaggtgatgcccacaagctggccaaatagtggtcaagtggtggcgcatgttggtgtgcatgatggtaccatgatgatgcttagtttgtacagcagtggtattttggtaaatatcttcaatattatccagattgggacgagaatttgtgttagccatttatttaggtctacaaatacaatggtgcaataagattcgagaaactcggtgatttggtatatggtgatgaccatatgtctacagagcaaaaatcaaatcatatatgttcctagtagagtagaacgctaaaagcttagaatgctctttagggggggagagtatctagtgtcaactctccaccaccccccggcaccttagtgctaagtgagttactactagttagtgggactagtagggtgggcatatgaggaccatgaggggactcatatgtctccatgagttggaatactcatggacattatcgggccgatccggtagtgcgtctaagaatgatgtcagaggttagcgggtacgattcca

SEQ ID NO: 28449 - DNA, 2358 bp, Cannabis sativa
ttttttttttttttttgtggggttagggtggggaatttatcatacgtaacttcaagatcaatctaagtctgcacagcaattagatgcaagtcttcggctccctgaacccaaatgaaatctattttgaaagaggcttagacttacgtgccttttccagaaaaatgaaaaatacatatattgttttgggagtatttgaaacaatcataaattcaacagctaccttaatattccccaaccccaagaacttcaatcaaaaccgacattgttttagggtatttcaaactttcatatgttcaacggttactgtattactagattaatgctaatgaaataagtgcattcatatcctaaaaactattggaaagtacactttcaaatagtgtggctgaaaagtcttattattactcatcttcgactatttaaaaggcacaaatgaaagcatctcaaggaggcccttaagcacagctcaaactataggttgaagatcatagatggagaatctcaagctaaaagtgattgagacaaccaatgcacctggttctacagaggtaactctaatgctagcagcttaatgaattcccaataaaatgccaatgttatacattaagaactcgagatgaaaaaactaaatgcttgaaacataacatcttaactagaagtgctcttcactatctcactacacctggatacaataaacaattctcactcttcatctcaacaccagtagcaataagctaaaatttcaagctttgacatcagccaacaaaagcggtactggtacaaatgagtatagaagatcaaagtaagagagaggacataccagcagtcaccaagcatacccagaaccgctccaagctgagaacacaactcggaggtgttacccattttttctaactgatctctaatgtcttcagcgcaaagactgagcctggacttggcactctccatattttgggcccgaaatgcctgcaagtgaaatgtagaagccagctattaataaaccaaaaaatgcaacataaactagccaataccgaattcactaaaagaaatgtgaataacgtcaagaagaccagcagaaaagcaagaaagactgaccctcatggcatgttgaaacaaaaaggcacctctctccaaagacacatcctcataaatcactgtcttgtttttaggagattcagctacaccttcctctttattattctcagtattattactatcaatttcctgggttctcttaattctagcatgaccttcaatgaaacgatccaccaagctctggatcttctcatcatcttcaatcttctctatatcagctccacacaatggacagtcgttgaactttgaaatacagcctctaaacaacaacaacaaaaatgaatattaaccaatgcccaccaaaatttaatactataaaaacaaaaccaaatattaatcaatcaatacaaagtttcttacttgcaaaaagcatgagaacaaggtacacatctgctacattgaaagataagggcttggcatatgatgcagctaagtgggccaatcttcaatttctgagaatcatatccaaaagggcattttgcctcaatcactgctggtgatggtgatggtgattgttgttttttgtggggttgtgatggtttattgtttttgtcgttagtagcagcagcagtagttgtactagaagaatcaaatccaaagggacatttctttaaagaagtctcatcagggcgagaggctttcacaaatgggcaaaccggcgtggtcatcttctgcaaatcttactcttcaattcaatccgcaactaagaagaaatacacaaaatttaatcataaaaataaaaacccctaattcgcgtaattgtatataatcttaagatagaaaaatttgtaaaagagaaaagagtgagcttgtgtgtgatcagaggaggaaggtccttacctagtaatagtataatgtttatatgagatgagacgacgtcgttttattcttgtcttatcttcgttttctggaaaagaaaatgagatgtgaaactgcggtcggtggaagatgcgagagcttaatttattgagctttctatctacaaattagaatagatatctatgatctatcctttctttcttttttccgaaatcaccccttcttttttctttttttttttttaaataagaaaaactatatataataataattataattcaattttaaatggatacaattttctaacaaaatatggagacaaataaaaaataagtattatcattatttgatcaataaaaatatctagcctgacaatgacaaatggggcttagtggggagagaatatgaggagataaataacattatttttttcttttttttttt

SEQ ID NO: 28450 - DNA, 1286 bp, Cannabis sativa
atatgataccaacaagggaggaaataacttcagctctgtttggaatgggaaaagataaagcgccagggccagacggactcccgccaagcttttatgctcaccattgggacactgttcaagatgatctctttgagatggttacccatttcttcactaactctgttcttcctaagtatatcaacgacacggcaattgttcttgttcccaagaaggattcaccagcgatggttaatgactaccgccccatagccttatgcaatgtagcctacaaagtaatctcaaaagtcattgccacccgactgaggagcatgctacataaaatcgtgtccccgaaccaagctgcctttatcaaaggaagacacatcgcagaaaatactatgatagctcgggagattattcactcaatgaagaggagaagaggtaagaaagggttcatgctcatcaaactcgaccttgaaaaggcttacgacaagatggattgggagtttatcatcaaagtcctataccaattcggctttacaagtccttttacggattggataaaggcctgcatctcagttgaggaaattaagttgctattgaatggctctattgtgggaaaattctcccctgggaggggcttgcgacaaggcgatcccctttctccatcgctttttatcatcgctgcggaaacattatctaggctgcttttcgagaaggagaaactcggtctactgaaagggttcaagatggcccgaaatggaactgctataaaccacctcatgttcgctgatgacatagttctgtttggggaagcgtcaattcgagaggccaaggttttcttagaatgtcttcagacctactgcaattggtcaggacaatcggttagtgcccaaaaatcagcaattcacttctctcagggagtatctagaaggaaatcccaagccatctcacaactgctgggcatgaaacaaatggggaggaatgccacctacttgggattgcctctctttaagtctcgcaagaaatcaaatgacactaagggaatcattgacaagacccttaaacgagttcaaggctggaaagcccgtttactatctagtgccgggaaaacatgtctagtgaaatcagtgggttcaacgttatccaattacgtagcctcctctgatgttattcccgtgtctgcggccaacaaaatagataaaatcctaagagacttctggtggggtgatacggaggagagacgaaaaatacacacggtagcttgggaaaggctttgtaggccaaaagtggtgggaggcctgggt

SEQ ID NO: 28451 - DNA, 1249 bp, Cannabis sativa
aattaattaatgatgttgtttttcaattttcatcatgaaattaaatgctgatataagctgatatggtaagatttgatttacgtgagctccaagcgaaaaccaagtaagccccaccaccgctttctctctctctttttctaaacccagaaaatctctgggaaaattgggtgactcaacaatttttgtttggaaaaatcctcaaatggattgatcagagctcaaaaatggatagtggactctgttaaagatcctttaatggaagcttttcttggctcaatcatcattaattaaaccaaaaaaaaaatgcgcaagtctttcaaggattcccttaaagccctcgaagctgatattcagtttgccaataccctgtaaagattttctctctctccttttctctgtatttatgtatatttgtatatatttatgtgtgtgtttgatatatatttatatatatatgtataatacttttttgctattattctttcaaattttggattctcatgcaaaattagaatctttttagtcaaattctttggtttctacaactcttctgttacatgttgagtatcttataatggatctccctctctctctctctcttagaaaaagaagtatcttataattgagtttaatggggtatttggctttttttttaaccctatttctatttaattcatactcatacagtcagtacttgaaaatatgtttgtttattactatatatgcacttgtacttatattagattattttttggtggggttttattctatctaattatttctttaattaactttcattgatttcaaacaatttatacattgaacatgttcactttcaaaaccaggaaaacagaacatgttcactattgatcaaatgttggctttattgcttaatcaatatagtgttctatgttgcattgtagagtattctgtcatgtatttcctacacacactttcttatgtttatttttctttacagggcctctgattaccctagagaatatgatggtgcctgccttcaaatgagactgtcatacagccctgcagctcaattttttctatttcttgttcaatggactgattgtcaccttgctggtgccttgggtttgcttaggattcttatatacaaggtcaaaaataaagcttatttgagtttattttggttacatctttagtgggacttatatattattaacatttaacattctataataattgattagtgcattaatttattacaggcatatga

SEQ ID NO: 28452 - DNA, 2928 bp, Cannabis sativa
  modified_base (2888)..(2902): a, c, t, g, unknown or other
aaaataaagagaaaagataaaaatattgaggtaaccgtgtgtaagtatttatgtaataaaaattctattttgtatttttggtgtaaaaatttcattttataaaaataataaaaatcaattttatatatagttttttccacattaataaaaatatattgtagagaaaaattattaatttcaaatgacacataaaataaaaaaaataattgatatatctatatttttttatcaaatcaaaataaaaatatattgaatattaaattattattttggtagataaatttatgcatctataaaaaaaaaatattaataatactcactactacaatttagctttttagtgacactatttagtgacacacacaaaggtacgggtcactaaagagttagggataagttttagggacatgcataattaaactctaattattcaatgttagtctcctataatgcgtgtcactaaaaatataaaatgtcactaaagagtaaaattcaaaattttctaatttttattaatttgaaaaatattgggatatagtgacaaactaggtgcgattggataagtatttgcccacccacttagtgcgtcactatatcataatcataattttttttttttgaaaaaaaaaacaaaaaaatacaactataatattaatatattttttttcttttctttttttattaaacagatattttttttccttaaaaactataatactaatgtatttaataatttaacaaaataaaaaaaagtaaataagggtttacacgaaacacatctgaattaagtatcatatactgtcgtttcttcttctccctcaagaaacgctagacgagtaggcgtgaatgttctctttcttcttgtccttcttcgcagctggtgaccagccatcctccagcgaatgacattgaggctctgcctcgtcaatttgtcatcgtctccgcctcgtctctccagtgcagggatctcggcgaccgattgtcgtctccaatcgatcggctgtcgtctctctggctcatcatccacgattgtaagggaacgtctaagagatcgacgttcaagatgagctcagtgttcgctcacggcaagagaacgtcagtgcttttcaaggctctctcggtcgactacgacgaagagatcgacctaggcgatggctgggtcttcggcaaccgacaacttcaacggagcaggaagctgagatcttcgccccaaaaatattcaggtacccacttcctcttcatcttcattttttgattcctactcaacttttatttttgtcttatcatctttcctttaattttttgtatagatctagttatatggtgatctctctctctctctctctctctctctctctctctcttgttgaatttgtgtctgattctttctctaaagatgatggaggaatctgtattgattgggctcgaaaatggtcgggcttgagtcagttctaagattgtaattagtaagggatggagatcgaaacttgaatcaatgagactaagttattttttctaattttttattcaaattttctcataattatgggtttacattgttgtattttctttcaaacaattatattttcttttaaataattatatattctttttgcttcaaatcatcatacattggaaatattttactgtaatctgttttggattttgtacttgtgtttgttcatttggtataaaaatgttgtgagtattttatttctctaatctttaaagattcagatggtagtatataaaaatttgattagttatcctataaagcattaatattcataaaaattatttctttaagttctatttaaaaaaaaaaatctgataccatttttaaaggaaatctggtaacaatataaccattctacttttttaccctaaaattgatttgaataaaaataataacaaccaattaaaaaaattataaaatatgaattaaaaagaattgaatattattatttttgttttttaaaaaaaaatctaatatagtcactctttttgtgtgtcattatatgtacaaaataataataaagaataaaaagaaaaaatataatgacgcttttttgaggttgctgttactttttcagcctgataaaacctgactctaaatgcctacaatgacgcgcaatgagtgattctaaaagggtttagtgacatgcattgaagggtaactaaacactagttttccagtcaccttcattagtgacgcgcagtgaagtgtcactgaataactttagagtcactcaacatgtgttactgaaactcgtttttttagtatactttttaactttatttatatgggagattttagtaatttggtatactgttcctgttagtctcctctggtgacatactagatgttgcaagtttctctagtttgctcccgagttaattatttcaattaattaacttgggtactcctaatttttgagtttcctatattattatgagttttttatggctaaactctctcaactattattccacttgcacttaactctctaagctcaaattttggcagtaaaatcctctaaactactaaaatgctagcaaatttaaggtgtcatccatttttcacaattaactgccaacatggactgcttatgtgtacactcttgtacatgtaacacgtttatattagtacacctaatattattacttaaaaattataaaaaaaaatgtttcaaaaattataaaacttttttgttttttgatatattattttttatttttataattatatttaattttaaaatgatttttaaataattttgaaataataatattaggtttaccaatataaacgtaccacatgtataagagtgtacatataagcagtccatggtgatagttaaccagatgatgttggaaatattttaccnnnnnnnnnnnnnnntaccatgtatgtttcattaacatcct

SEQ ID NO: 28453 - DNA, 3327 bp, Cannabis sativa
acgaacaatatactccggagccatgtaaccactaaaaacagtcaaattgaaattcagatcagagttgggattccaaaagggtggtaatcaaaacatgaccaagtccaaggaggttatatcaaacttacagtgttccagctatggcagtgctgatgtgagttttatcttctgggaatagtctagctagtccaaagtcagctattttcggtgtcaaatcttcatcaagcataatgttgcttagttttatatctcggtgaataattctcaaattcgattcttcatgaagataagaaagaccctcagctacacccaatatgatcttatacctcgactcccaccttagttgtcgaacattctttagagctgagtttatccaaagataacaaacaaaggataagtaaaaaaattatatacaaaagatcattttgcttcaacattgaaaaagttcagattttggagaattcagtaccaccaaataaattatcatgaagactttgatttggtacatattcataaacaagaagactctcagggcctgtaatgctgcatcccaaaagctcaacaagatttttgtgtcgaattccgcttatcaaattcacttcgttgaagaaatgatccgcccattgtcttgtattgaagaaaagcctttttactgcaacaaccttgccatctggtaaaacaccctaaaagaaagtaagatagtgtcattccattgagtgaaagacataaaaaatggtactttggaaaatcaaatatttaccttataaaccgaaccggatcctccttgtccaagcttgttggaatcatgaaagtaattggtggcctcttcaagaacttcataagaaatattcagtttggatttgttcacagtatccaaaagagcacctagttgcttcttctctgatgaaataagcaatagtttttcaatgtacaatgaaaggagctcagctcttataataccataattgaaaaatagcaaaccaaatcaattacctcgcctttttctcattactcttttccttatgaagaaaataactgcagccatagtcaaaagaagagccaaaccagcaaatgttgcagctaatataacacctaactggtcgttccctgagaaacatcaggattcaattcatgacaaataaatcacattaaattttacccttttaaatataattgatggttgtgattcaaattacaatgtcacaaaaagccaagtgtgtgaaaaaaaaaaaatcactaaaagttaaatcttggaactttccacaaaaaaatgaattaaaaactcacgaacatctccttgtcctgaagcactagttgaattgtaatagaacttttttgttgaatatcttaagtaacagccagcatttaagatcctcccttcttcttttggagcacaagaagtaacgttttcaacagaagcagccaaacatttctcacaagcagttccagtcacaaactcccaacactgagccaacccaaaaacacttacattcccctgattcactaaccccacaaaaaacccatcattatttggtgcttcaatgctcaaattcctcaccaacttcaaaacattatctctaaaaacggtcaggttcccactaaaatcaccattagaacaaagggttctgtcttgccaacctaaactttcattgaagaaattgtaagaatcgtaccttagataacagccatcaaagaaaacacgacccccacgaactgccctctgaaaaggtaagcaccttaagatttgggtcttacagagagcaaagcagagattacaatcgtcctgagaaaggtctttcatgcactccccaaaagtgtaaaccgtggtattaccagtcccattaatcacagttgcgtatttttgttgagcaattaatggactcactgctgctaaggtggctaagaaatttgtggtaaagggtcttcgttgagccattgaggcagtgttattatttgtacatattataactgggtcggtagctcgaggatcggaaagaacagagtatggtaataataaacagagagaaagaagcaaaaaatgtgttaaagacattgaaattaacaataaaagagttggcttttcttcaaaagagatgattttggtacaatggttttcttctgtgagtggcttacaatggaatgtttatgcaattttgtctttaatataagatttgaggagattcgaagaaaacatgtgctggtagaagttgatttagtgtggaatgagatgacatgttgggtcttccaatttccaaatttggagagaagaaggactactttggtttgggatgaccatttaccaactccgtgtgtctcaagttacgtattacaattccaagtttccaacccctccccaaaaaaaaaaaaaaaagaatttatttgcaccaaaatgaactctattattaaagaaaaataaatttatatatatatttttaaaaaaattattacattttttttaatttcaatatttattttgattttatttttgtatttttctctaaatcatgtatatatatattttttatttttgttaaacaaatttgagataattttttattttaatttttttttgtcataatatttaaaacataatttattttaatgtgacgtgtatatttttaagaatatagattgaaaaaaataatttaaaaacttagtacaattaaatatataaattttatataaaataataattattaaaataataatttttttcttttaaagctaaaaacgaaattgttaaaagtttcgttctctctgctttctccctccatggcgaggaagaaaaaagttgaaaggaaaccagtcactcgatcacttgacgatgagattgatgcaggaaaagaaggcatggatgaaatcgaagaggtcattgctgatgattcacacgaaacagatgggctgaatttaattgcagagatggctcgttctcaagaaacacaagaaacggagatcaacagatctgggagtaatcgaaccaagagttgggcggaggaggttgaagatgatcgaaatttgggattggataaccagcaatctccaggatctgctaaacgaatctgggagacattcacgaaggagaaaactcagactcgagatcaacgactattgttcacggaacccttaattcgggatggcatcaaaatcgcacaagtcgatttggaagaagtgcaaaaagaggaaaaaagctggaatacaacagtaatttgcaaagtgctgggagctaacccacgtgtgacgatttttgaagggttcgtgaagaggatctgggggcatttgggtgttcttcaggtaagcaaactatccatgggactgattatggtaaag

SEQ ID NO: 28454 - DNA, 1397 bp, Cannabis sativa
ttttatgggcacctaaatatataaatttattataaattaaaatttaacataaagatataatatatagcccaattcaatataatacaatacactacgagccgtatcaaacaaattctaatagttttaaacaaaaataaagtcaaaagggtaaattccatacaagaaaaaaaataaaaaagaaagaaaacaaactaactgttttattaaaggattaagtattaaaagagctttctaagattatactcttggtctttccaggatattcgaaaattctgtttaaataatgctcagttgaatttaccagtatgttttccaggaattagaagcatttctttttgtttataaggctataaatataaaccatactaatactcaatacatggttgagaagtaacataatcaagtactgaattgcagaggaagacaagattaaagaacataaaaagtgcaaagaccactttgctctttccctttgaccacagctatctgctatgattcgaatccgaaatgctatgttttaagccacaaattggccagtttccaggttttgaatatgatatcaatattataattgcaaataatcagagacaatcagaactaatcaaaggtgttttgacttatgataagttaagtctcagctgcaagtgctcttgaaatcttcataagcataaaacagattttattaacctaatataaaaggaaaaagaaaagtgtttttttcacacaataaggttttaaaaatatataaactgacaaaccagcactctaggctgatcaaaactggttagaaagaaaaagataaggctcttgtgttctaacattcaagagttgaaaagctatcttagaatttattaaagctgttacaattctaatctttccagaagacaaagccaaaaatgaccacatttattagaaattgtgtggattttcaatactattattatgatggaaaaccatgacaacaacatagtgaggtgtccatactcgtattgatatgatttaaactgcaaattctccgagtacccaattaagtacaaataacagcaataaaacccagattaaaaaaaaaatcaacacaaacagaagcaccgtgacattcaactaaacatcagagaaaatacccagaaatccttttcacgaaaagatcaaaacttgtcaccaaaaatgcaaacttttcacaaaggtccacaaagttaacaacaggttaactcatctcatattatcaattcccacaaaaagaagaataatcagcaagtaaaactgtactaagatgaagagaagagtgacttactgaaggggtggaaggatcagagggtctgagttggctaaagttgtgggggttgtaagagggccagtcaccgatcatagaccccatgaaaatgctggttttccttaaa

SEQ ID NO: 28455 - DNA, 1390 bp, Cannabis sativa
attggatcggatcagatggtaaaatctaacatccaatatatgattggatcggatctggataggcctaaaaatattggatgtgatccaatgaacacccctaccagcagcaggtaaagacccagtagggacagctgggagagctatttgagaagcacttgaagtggattccacctgtaaattatgagtacctgtatgctcagcagctaaatgatcaatagagacaatggtattagtagcacctgtagcaatattatgagaatcaggggcagtgtctgtgacaccaggtgctgtaacataaggtgcagaaacaggaggcatgaaggctattggataggcagcagtggtgtgagatctgggtaagtgagagaacccagggggaggaaatggaagagggtgtctctgaggtgagatagcagtaggaatggctgcagtactgagagttgacagagaaggagatgacttcacagcctcattggcatagggaaaaatcagttcatcaaaaagaacatctctagagatgtagacacgaccttctttggagaggcatttatagcctttgtgtgagaggctgtatccaatgaaagtgcagggctgagatctataatacatttttactttgttatatggtctcaaattaggatagcataagcatccaaacacttttagggagctatagtcaggtttaacattgaagagaatttcaataggtgataaatggtgtagagtaggagagggcattctatttatgagaaaaacagcagatctgtaggcttcgtcccaaaattttaaaggcatgctagcttgtgctaatagagtcaatccactctcaactatgtgcctatgtttgcgctcaactatcccattttgttcatgtgtgtgaggacatgaaactttgtgtataatacccgactgttgacggtagtttgtgaaagcttggtactcacccccccaattagattgtatttgctttatgggcaacccaagttgaagctcaacttgagttttgaatgtaatgaaggtgttgagagcttcatctttagttctcaacatatagatctaggtatgcctaaagaaggcatccacaaagctaatatagtacctataaccaaacacagagttaattggggcaggaccccataaatcagagtgtaagagttgtaggggtgcagtatagacaatagtggagtgaggaaaatgcaatttgtgtgtttttccaagacaacaggctttgcacagatgagaaaaatcagtatttttattgctcactttgatattacaagtatttagtacatgtttaaaaattctagtatgaggatggccaagtcttttgtgccatcaagaaaaagaattgtttacatcactaatgctacttgagtgacactgtgcagaa

SEQ ID NO: 28456 - DNA, 2722 bp, Cannabis sativa
tttcttcctcttttcatattttttcaaacttaataagattatcttaatattttttttagtttgccatatttagatttatatattttgtttcgtttgtactaattatccatatttttatcatttttttttaatctctcaccttttctttttctttcctttttcttaaaactctctcagtatttttttactccattttgtgtttttaagatacttttttttttaatctctcagtattttttttttaactcaacaaaaaaaagatactatcttttttttgaagtcttttatacatttttttttatcatctgttatatatatatattatttatttctatattgttattttttttttttttaaatttttgttagttattattttattatttcttttaaattttacttattagtagataagagaaaatcaattaaaataattttcttcaataataatttatatataattaatgaaagtaattaagattaatgcgtgttacttgactccctctcctggactagtatatatataaaaaaaaaacgacgatctgccagctaaaatattgtttggcagtgtatattaataaaaggacaaagtaatggcgggcttctttactgtgaggaaaatggtgatctttttatttatttattaatttttttgacatttggcaaaggaagattattaagtaatatattttagggaaattatatattaattaagacgataagaattggacttgcatggaaaacgacatattttaacgaggattttgaattgacaaagagaaattaaggccaggattcgcggtattagtgtttcaatcatcttaattaagagccatatactaagtgtccaaacgcaatcggctacgtaactctttatcctattcattgacttgaagagaatatactcactattacttgtaataactttttaatcttcttttcaatggcttagacttacattcagtggaaggtctaagatttgtgataaatttagctaaaaaaaaatcaaattttataattatacttcaatattagtagtaaaattaacataaaaagtaaacaacaactttcaatttgtattgaaaagagtataaaaatttattaaatataagaatgatacctcaaaaattattaattacttgactaatgagtaataaaaaataaataaaaaaattaatatttattatggtgtaaatataactcatgttatattttaggaggttttacatgtatacttaatttaggggtaaatattacaattatactgccacacaacagaaattataaaaatactgacatgtcccatttttattacttttatattatacggacgaaaaagtacatatacgcctccaccttccaaaacgacgaacaaaaccagatgattaactcagaaaaaaccatttattctagcgatatggagaaaaaaaagtaaaattgacaacaaaacaacaacaaacaacttcatcaacaacataaaacaatgaatcataaaggttagaaacttaaacccaactaaattattttaaatacaaaattaaaaaaaaaatgatgaaacaaagatctggaaatcaataataaaaatggactgtagcttctgaaattatttttgtaaatgcatgattgaagtaaatgcattttaatatacataatttctgaagaaaacaatgccgattaggaattaaaatataattttaaataatctaaagttgttctagagtcgttcttgtttaattacatgtaatttttattgggaaatatggaaatagataaaatttggacactcaaatgatagttggaacactgaaacaaaaaatacaacgtcaataattgttttatcgttgtcttatgattatcgtctgtttgtgaaaatgttgaattgttgaaatattgtcaaaaaaaattaggttatggaatttatacccgttctcttaaagagcgatgggcaatgggaagaaggaaaaatatgttaattatgaggctagtggagaattcttaccaaaggattacaaatatgaacaacgcgtacatattctactctcttcattgtaatgcgacccaacaacaaaaaccatgcaaattcagtaccaagtaaaagaaggaatacctccgataaaaatattcaacgacccgagcctattttttttacttgcaactgaagatcaaagaaactgatttcaccacatccattatgtgtcaacacgcagaacaacatcacagcaatcgcaacaaattgccttctataattagtttgtaatttactcaaacaatccatagattctggttgtaactttttgaaccattcctctacagattctcccaaagtcagtaggaaacaaaagcatttggcatcatagctgaccctcatgactgttgtgactctgttgaatcttgataagtgatcacttggatttgtgtcacccgtgtacatagtcatttaagaaatttttaaattctttgggaattcagcctccagtatgtttctcgtacagagctcacgatcctcacagtctaatttcgagtcatctcctttttgcctcttggagatccttgctatgccgtttcggaagatagcaaattcagccaggactccttcattcaggatatcctcaaagactggtgcaactttcttcctttggtcaaggcgtgcccttaagtctccatgtttggcattgagcttgtgtcgtaaatcgatagggagatctttcttggcagacccctt

SEQ ID NO: 28457 - DNA, 4453 bp, Cannabis sativa
atcataatttgaaaataatgataattgactcaaagtaaagtaggcccgaacaaatatcatagcagaaattaataatgaaaagaatcagaccttcactttgtcatttttaggctgaaaatttcctttagctgatgctgccttactagcagccagaacttcagaaagcagaatagccaaccacccttgggacattggtatagaatatggtccatggtcttcaagaatgcatgtaagaatttttattgctgaagaacgtaaggaatctgaggaatttttttcaaaaacccatgaaagcaatatgccagaccacttttggctctcttcaagagaaaaatgcatgtgcccagaacacaccaattctaaggctttagccaatgcttcttgcacatttttattctttcttgtccttttagcagtgtctctcaataaatgaagacccttctccatcactttcttttgtgctctttcacttctttcaatagaaaccgaaaatgctgacaaagccatctgagccagaggaatatcctcatttttacttgcctgatgaatggtagaaagaagagtagaactccaatcagaaacataatcatttaggggtagattatgatccactaagagtaaccgagcaaccaaactcccatgccatttcacagatctctcaggtgccattaaagcagtcatgacagcattcccatcttgatccagctcttctattagagatctattaccagccgatgccattgcccaattagctagtgcccatgcagcaaaaggaacagcaacatgttcggaatgcaaatcatcccacaacccaggaacaacagcagaattcaggttggtttgagcaagggaattctcgtgcttatgttgcaaaactacattcttcctagtactttctaattccatttgtctaggaatagtatttctcaactccaaaagttcatttgttcttgaaaggcctaaaactgttgtacccccgagaactttaatgcctatccccttcattccccctccaccatctccatcatcttcatgttcaactgactcatccagaaacattccgccttcttcaataacttgaatggcagctgcaatatcccttgttgcagcatttccaggcaatgaaggcttaaaaacaatattttccgaactatcacaattggatgtgacaatatccataatggcagccacgagcatgctcctgcctttcaaagaatcagaaacatcaagtgaactacgccttgactgctgctcccacagaaacgcttgatattaatggtaaaacactatgaaaagcatctacaagatcaagaatgaagcttttataaccttaaccccaaatctttaatccatgaaattggaagtgtctattactgcagcttaaccaataaaatgatgacacgattatgttatgtgacatctacatattaaaccacattgaatttaatgcttctataaagtaccaatatcgtgcagcccatcataagcatggaaccttagcacggtcacaggcctaatgcagagtttacataaaatataaatacactattacatctcccttcaagacaccaaacatcatttcctaattcgaagttcctacgaagttaaagatacattctaaacgaaagatttgtaggaaataaacttaataagggtatgaatcgagacaaaatatatgcttctatttcaaagttttcaaattagaaacatacttcttcaattcatcccttatcaaacacatttcctcaaactttcagtctcaagtgcctcatgaattgtgtataaaacagagagcttctaaaacgttggttggtactaattgacataaacatttcaatgtgaaaagttcactaaaacttgttctctcaattcaaatttaagcatacctagtattactattaacccattaattctagagttttgataattgtgactcagttaacaaataataatcaagaaattgaataaaaatctcacctttttggacctctgaggttggcacgagaaaatgaacctcaacagtttgggaacagcaccaggcctcccaagcacagcctctgaaacattaggatcagaaattaagtacgcaagtgctctggccgactcggcctgagtaccaccggacccatctctttgaacagcaaccgactcaagcaaccaatcaacaacagcaccaccaccaccagccccaacaatagcagccctacgactctcattagcagaaacaatatcggccaaaagagacgcaacccttagctcgaaccccgaacgtacctcgtgattagccgaagacaacaccgacctaagcgattgccagagaaccgaagcagcaacaccggtttgcttaaagtgaacgaaaacgttattgatcgaatcaccgtatttgcgaattccgtgttcgattgcggccttatgatcacgatcatcatcggaggagagaaaggcgtatgcgacagcggcagcagcggcggcgagagaggagaaggtgagaatgttatttcgcgagagaccggaggaaggagtggcggtggacggtggttggagttggcgggaaatttggagattgttttgggttgattggactggggttttggaggaagatgaagatgaagaagaagaagagaagagacgaggaggaaggtgtcgaaaatggtggtgataacaatggcgacgagctcttctgatacagagacgaagcatcatcttctctcttcctctttctctctgagaagaaggaaaatgttgccaaagtcaaagaaagatgatacagtttggtttctttgttcgtgggcttgggtttacttttgggcctcttgtaataatgggcttggttttaatcttgggccttaatgggtttggtttccaaaataagaaaaggactattaaatatggaaaaaaaattgatatatgtacaaaatatggtatttttttaaaaaaaatcaaaatatgagaatttatcgtagataaaaagtaccataaaaaacttaacagttcgtatataaattttacttctatattatcaaaaccagtttcttgatgaagaaattaattcttcatgaaagatgtttggtgaagaaaatatattgaccgaaagtgaattattttttacaataaaaaataatattttgttcttaaaatttttgttttttgtaactttattttttgaaaactgtttttaaaaaataaagccaaacaagtttaattatttttaaaaaaacaatttctatttttaaaaataaaaaataattttttagttataatgtcaaacaagcactaagtttttctaagcaattctaaaaataaatttaggggtgtaacttttaaacctatgaaaaatgaggcccctatatacttataggaaagatgatttgagagatatttacaatgaaaataataaatatttaaaatgacatattctaataatatttcttataggcaaataattaggacactaaatgtaatttttttgtcttgactgtagaccttcaaggcttgatctcatctgctgatcatgttgtttcatgttgaagggttgacatttgaaattgttgagttgaatatgatcgttcattctgagatttggttagaatttaggatagaaggagtccattgttatatatcaaattatcacttattagtcaaatccatgagttgtgcatcatattaattccaagggaaaatatgatcgagcacctagctaggtggtgcccacttcttgggcacaaccaactaactacaaaaaagtacatcaaattcttgtacaaattaagatgcatatcatattatggtaattcaaactattttctccaatcaaaagaaaagaagcaaatatgattcttaattgattggataagattatttcgaactgagttattatagaaccgcaattagcagacaaaattagttgaatggtctaaccaattatggtattttcatcacttatgtactgtaacaacaataatcgaaatgtcacttttgtcagcacacttttgtgctggtaaaagttagtattgagctggtaaaatagaatttacctatgatgtgttggtaaaaggggttggcaaatcaatgttggtattagaacttttgccagtataaaatgaaaaacgttggcaaaaaagacttttcctagcgcgtaaatgtactggtaaaagttagattttagccactgtaaatgtacgctggtaaaactttgatctctttgccagcacagtttgtgaaatgtgctggtaaaagttacttttaccagtgcagtagcgaactgtgctggtaaaagtgacatttcttttaatgaatataaggtcaattataaattgatgttaatgatgatgaagagtgatgaatgagagggtgtagaatgagactactcatgaggacaaaatgtaactgaggaagattaagctttataaaaaatttacagtcgacccacttatcagcaaaatatttatataaa

SEQ ID NO: 28458 - DNA, 2287 bp, Cannabis sativa
caaagttttggaagagaagggagatattagagaagaattaccaatgttttcaatgtcaagaccagtaccattgcatacaaagaattgttcttggcccgagtagctgctgcatgaggcaatattggttccatcaggagtgaggtgatgcgtagcacctgaatccaggtaccaactgtcatcttgaacagtttctggtgtggttatacaagcttgcatttctgcaacattggctgaggcagagaactgattgaagcactcgggaccagtaaaagatttgtcgaatctatagaaacattgcttgattgtgtgcccgagtttgtcgcatagctaacattgaggtttttgtgtcaaagattgagaggctcctcgacctgtagaagcataacctctgccactgttgtgaggatttggaccacgacttgaattagaaccacctcgagacagatgttgcatctgagtttgattctcaacagatcgaaagggatgaccacgattgtatccaccagatgtttgtgagttggggaaaaaaggtctgccattgttatttccataacatggcctggtgtgagctaaattagcctcacttttactgatgtcaaaggatttggcattcttttcaattctaacagattgtgccattaataaagcctccatttctgcaatagaataggagtcttttcttgtagtaacagaagtgacaaagacatcatattctggtggaagtccattgaagatggcttcaatgtgatcttaagccaattttttgtgtccaatagtagcaagaagatcaattatccctttgatctttaacagataatcattgagagaacctgtcatttttgtgtttctgagttgagtcttgtatagccctatttgaattgttgtttcgcaccctatcatccgatttgttgttttcttcgacatcgaagaaagaagccatgaaaccagtaagttgtcctgttgttcccaatcttcgaaggctgggttgatgttcttgttggtttcatcagtgacattaagaaacttgggaggaattcgagtattatccaggaacatctgtaaccgacttcctttaattgaagcaagaacctggtgtttccagggtaagtagttgtgctcatcgatcttgatagactgtgagtgattgaacgatacgggttgtgaacgaggaagaagagcagtgttcgatcttgatgctccaccattgccaccattgccgctggtagctgaatccattgaagagtgatcaaggctctgataccatgtcaaggttaaacaatagagagagaatgagagagaaacgttgaaacagaattgtgtgttgtattgattaatgacagagtatagagatacaagccatttatatatacaattgagaaataaggggaatcagtctaactaaacactaacaattgtaactaactgtattaaccaccttaactaactttatcacccttaacagtggctcaccatcttggacaactcgaccataaatcttgaacaactcgattataagtggctctttttttggctcactatccctaatcacaaatgactcttttttctctactttttagatcggtatttttttggtagctctccttatttttcagctcactattcccgaattacaagtggattttcttggctgttggtttgatttgctctgataccatgttagaatttgggataagatgagtggagttccatctcaaaaccaattggcaataggagtagttgtccattcctcatatatattctattatttttccatacattagcgatgtgggactatctaacactaatcgatcacttagtgaatatgatttcttttttatatcaatcatatataataaatgtataatatataatttggtcacattcaaatcttattgtgtatttaattttatttttgtgtttgttaatttcagtaaaaactaagaactaaggattttaagcccatacaacctaaggagtttataatgagatgttagttgaattaattcttggtttatagcatttttttttttaaaatgtcagttcatagcaaccctaatctccaagtacaaaacatgtacattacgtttttttttcctgaaaactcattattacttgataaataatttcctgaataaataaaacaaagactagtgacagttttaatttcaggttataatattttcaaaaaaaaaaaaaaaaaaggttataatctatatatattaaactcttaatactattgaataattatgtttaagggtgttcactaagtatccgatccaatccaatc

SEQ ID NO: 28459 - DNA, 2767 bp, Cannabis sativa
  modified_base (34)..(35): a, c, t, g, unknown or other
  modified_base (201)..(204): a, c, t, g, unknown or other
ttaaaattctgtgaaaccgtatttttgttgtttnngtgcatttgtgaaattaacccttgtttttataaatatttagggctattatattttgggcttaatttaatactaactattatatgtacagtgtatgttgatatttagagcttaatttaatactaattttttttttttgaaacaattaaattattattttttaattannnnattaattaatatttataaatttaataaaaaattaaaaaagtaattaaaagaatgaaagaaaaatcaaatagatgtattttaagtaatttaaaactgtttatacctcaacatatagatatagatcatagataatatacgtaatcctaattcaaatcaattcagagaagggtcatccgattatagcgggataataataaactcatcctttttagttaataatctataaacatctttaaatatgcgaaagccatgaataataatgatgaatgaatttatgtatacgtattattatgtatatatatatatgcatgtatgtacagctcagttcgttggattctctctctactcaacctatatttatgaagaataattagctgtgtacagaaccgtgtttcttccgccacgtgtggttccgtgcatggtttcataactcaattgttaaaccctataaagtgtctcgcgttgatcccttcttcttctttaaggtctgatttgcagaggaaggaattgtataatggagcttttggggctcttcgttacagcatctatgccagtcttgaaagttctattgcttaccggacttggttcttatcttgctttagatagcgttaatattttggggaaagatgccatcaaatatttaaacacagtaagtcatcaaaatcctaattaatccatgaaatattacatacatatatataattatgtttgtgttgtgtttaactaattaattagcaaatatcacagattgttttttatgtattcaatcctgcgcttgtgggatccagcctcgcaaataccgtaacatatgatagcatgatcaagttgtaagtaatgaaaaaaaaagaaagaatctttgttgtttttgtaatggtgatgaatttgattcagattttttttttttttttgtgtgttgtgtgtaggtggtttatgcctgtaaatgttctcattacatttattattggttcattacttggatggattgttattcactttacaagaccacctcaacacttgcgaggcctcattttgggttgttgtgctgcaggtacttaattacaccattcacttgctctcaattttattattgttaaaatttaggatgagatgattgagattccatctcaaaattatttgttaatgggaggagtagtccattcattttatatatggttataacggaaactgtcacacattggccgaaagtgatcaccgaaaggtcccaaatggaggttaaaggggagatagtggaagtttgactcgtctttttggctcacaacagaacaattgataccatccatattagaatttaagataaaatgaatgaggtttcatctcaaaactaattgacaatgggaggaattgcccattcttcttatatatgataatttatttctacacgttagcaatgtggaactaactctaataattataccaagtctcgatttgatttgattttaaacacaatacaggaaatttggggaacttgcctctcattataatcccagcactttgtaaagaaaaaggaagcccctttggagactctgatgtctgttattcttatgggatggcttatgtttccctttcaatggctgtaagtttctttcttttttgctttatcatttttgacatcatctctcaaagtgttacagatcattactgatgaattttcagattggagctgtatatttatggtcttatgtgtataacattgttcgtgtgtcttcaacgagtataaatgataacaagtctttgagggaatcattagaagaaccactagtacttccttcccctgaggatgttacattgcaggtgaagaaaaagtactgccaaagaccgtacacaatgatgatcaatctttagctaaattacaattagtcacattaatcatcttcttgagttgaattgcaggtgggggattcagaaagttcagggataaaacaactacgtttggtgaaactgtttagagagttaaatctcaaggctttgttggccccttcaactattggagcggttaggcaaattttgtctctatatttggcatttagttagttattgactttcttaactcttgacactaattactttttgttgtgtagattattggatacataattggagtggttcctctattccgaaaatcattgataggaagtggtgctccacttagagtgattcaggactctgctgttttgttggggtacaaactatgttatatatatatatatgtactattttagatttggtattttgtaaaaattatcacctgaaccctcttgttttgctaaaagacaaattaaatattttatttttcaaaatgattcaataataacttgatctagatgtgttacaataaaactcattatattttctgtttctgtgttagaaattgtctttaacgtgattatattaaaaaagattttcaaaaattgtgttaggagtactattttatactattttgagaaagacagggtttaatggtccgatcggtaatttttgcaaaatacagaattcaatatagtattaaccctataaatatataatatcttattaatcatctaaa

SEQ ID NO: 28460 - DNA, 1726 bp, Cannabis sativa
tgtcctctgttatgtcttatgtagttggaattaattgttctgaagatatttcctttttgacttttctttttgttctattttgtggtctgtaatgcctttcatattttttttcttgattttcctttaaagttttttttttttctctatcttagttgattgagtttaaagagatgaaattcatgatcttagtttagttgatttagttggttgaaagattgatattttattttttgtctcatctaaattaggaaagtgaaaaaaaagggactatttttaccatttattaattaagagattttctttaaagcttatcttcttagaaactaggtggctttttttttgttgttggtattttaaagtattaaaatgttattctaatggaatgatatttttactattttgatggaatgattactacaagagaaaaaatttagtagtttttttattagtttatttttatacatcttaaatttatttcatttttattctcattactattcttatattttcgttctttcaaattaaacgccacctaaataatatattaattgaattaatcaacatcttggttttcttctaaatctcaattattttctttacgtttacaaagaaaaaatctcaagtattttccttttttagctaatcatagtggttggaattaaatgattagtttaatgcttttaaatgatcattgatcacattaattctaccattatttgatttcaaagttagggatcaatagggatattgagctatgacattaaagaaaatcaataaaaattctaatacctgatactaaatgtgaattgaattttctaccatggtttttaataccttgatattttttctatgctcaaaaagtatttacaggcttgacaattagctatatttggtaaatgtaggtggtggtggtcctagaattaaattattgttttttcaaatcaaatcaaagaattttgtgccaaggcactttaaaagttagggtgtttaagtgggtaaaggttaagacaaattccttgggtcccttcatcccactaagccatgttgtgttagtgtctcgtttcttctagctttcaattttcatatcatttaaactaaactctatgtgctcatagtgacgtgttagtttccaaatttgaaaaataatcatttctcaatgctgatataattttatttattattattattattattattattaaaaatagccttctaaaaacaccacctccaagcaaaaggctaaaggtaaaatgctatagtcaaaggaaagacattgattatgatgaagtatttactctaattgcttgtcttgaaactatcaaattaataatttcttttaacaccccaaaatagatagaagatccatcaaatggatgtaaagtctgattttttaaatagtttcctcaacgaaaaagtctacattcagcaaccattgggctatatgaagtaaaagggcatgaataaaaaattttaaagttgaagaaggctttatatgacctaaagcaagcgtcgagagcttggaatacttgaattgacaagtacttcaagacaagaatttctcaagtgttcgtatgagcatgcactctatattaaaattaagaatggagatatcttgattgtatgcttgaatgtgtatgacttgatcttcaccggaagcaattcaagtttgtttgaggagttaaagaaagatatggcaaaagagttcgagatgacagatattgggctc

SEQ ID NO: 28461 - DNA, 2635 bp, Cannabis sativa
cagtacatcccttttaaggggctgcatggtagaattaacctatatattttatatctatttataaagaaaaacacaaacattacgatgtggcaatttgcatgatttcttcatcctattatttgatttcttaattttttaatttatttataattttatttatttgttgtatattattaaatgatcaatgtctcctttcatttttataacttacacaatttatcgatatccattattactaactcttaaatgaaaaatagtttttggtgtgttacaaataatattatggctctatttatgtgtatacatatttatcttaaagtattatcatagaagatcaatcttatcctatgtttctaatggtcaaactatgaatacgaatagccattcttaggatatatttatctatatatacaatcatgcatatatatatatattaagaggatgttgtggagtagaaaattaaagaaaataagattatgtcaatgctttagattactatttttcaggtttttactctctttcaaataaaatactaatagttgatagccttgattttgattcattttctctaatgtaatatatcaacgaaattttaatgtaatcatgttaaaaagtacggagccgatatgaggttttttcttttattttcttctcaagatataatttaaatctccatttttatgcttatatatatatatataaatatatatattaattatgaaaatgtatttttattaattgagttctatattgtaggtagtttttcaataaacaaacatggattgattttctaccttgagttctatgttatttttttttcttcttaatattttaattattattagatatattataactaagtaatctatgtaaatactaaatcactaatcaattttatttatatatatttacacatatattattttattgattagaaatccttagccttgaaattaatttattttctctattgtaaaaaatcaataaatttttaatataatcatgccataaggtatggttccctgaatttattgaatctaatgtttatttatttttttattttcttcttaatatatcatttaatctctatttttatgtttatatatatatatatattcaattatgaaaatatacttttatttattgagttatatgttgcaagtagtttctcatggaacaaacatgaataagtttatagagttttatgttattcttttctctcaattttttaaacctatgtaattactaattcactaattaattttatatatattacatatttattatgtaaaaaccgttattataccaatatgtaacttaagtaattactaaatattataatataagtaacttatgtaattactaatgcactatgtttactaatatattataatccaagtaacttaacatagtttacctctttttacatatttgaaaatagcaaattatatttctaatttcaaaattgatactttatttataatatacacatcaaaatattatattacaaaatatacagctcaattggtacaaaaataaataaaaatttccaaatattattaaagttgggtcaaacccgtgcaaagcgcgacttatttccttagtatatatataaagaaaaatattaaggagttgaggtggcaatttgtatgagtttttcaccctcttctttgatttctcaattttttaatttttcttatttatttataatttcttatatattatcaaatgattaatgtgttttttcatttctataacttacactattatctactctctattattatattactttgtataacttacactattatataatctctattattactatattataattggtatataagtgacttttgatattgtattttcttaaatgcaaaatatcataaattttgaccatttagtttacaaataataatattatgatctctatataaatacatatttatctcaagtttttcctaattactatcaccataatatactaatcctcctaaattacttaagaccaaattatgagtatcaatagtcattcttaagatacatttatacatataaaatcatgcctatacaagaggatgcaccaaagtggagagtcaagaaaaatcaacgaggttcttttattctctgtcaagtcaaatacaaatattttttagctttgaaattgatttgttttctctaatacaaaatttaaatgtaatcatgctaggtatggtcacctaaccatattagatattaagttttttcaatttcttctcaaatatcatttaaataataaatctttatttttatgtttttatatatttttttttttgaaaaatatatttttattggttcagttctatgttataggtagtcttttaaatggacaaacatgaattgattttttatggaggccaccaagtatttggagaagactaatatatattaataaaaaataacattaatagatcaataaaaaatatgagagaacatcgtatattgtatatcatgaatatatgcatatttatcgagtgtgatgtatagaaaattttatttatatatataattataaatattatatatttttttattaaatattaatttatttattcttcaattgtacataatattgtatttgaaatttact

SEQ ID NO: 28462 - DNA, 5479 bp, Cannabis sativa
  modified_base (44)..(62): a, c, t, g, unknown or other
tgtgaaccatgcaacatagaatgtgatttctgatctttattaannnnnnnnnnnnnnnnnnntgaaatgggttttatttaaggcacaaaacccaacacattttgacacagaatggatttgaaatcaatgacttaagtttcaaatatagatcttgggattagcggggagcatgagagagacgattggggctttaatctaatcattctcgagggctttgagtggcaattatcatgatagaatccaaccgatattcttctacaaaagcttcgtcgatctcgaagttcagtgctaagcctgagaatcgatcttcgacgaaggtcttgtcgggctatgtggatgattagggtttcacgagtttaatttttatttttaaacatatataataatattataaaattaataaagaatattctgttaattaataggatattctgttaaagttaacgtagaaactcaaaaagtatcgttaaaccaagaattcagttatataaccacattttatatagaatagatatgtaaatatatatatatatatatatttactactacaaaaatgactttttgcttcagtttgtaagtgacatattaagaattttcgtcagttggagtaaccaacgttatacgcaaatgttgatattttttacttcacttattaactgatgccaaaagatttttgctttggttcataaccgaagaaaatagtaatgcatcgatacaaggtttttgcttcagttcataattgaaacaaatagtaatgcaccaacgcaaattgatttattgcttcggttatgaactgaaacaaaaaaaataaaaataaaaataaaaaatctgaacgaccacactaccaccatatttataccaaaaatttaaaaatcagacaaaagattatatttattcaaaaatatacacaaatctaaatttatacattattattctatacaaaaagtaccaccgcaccactaccaccatacattccaccccagccctgaaaaaaaaagaagaagaagaaagaagccaacatcagattaaaaaaaagtctctatacacctaattacttgaaagccaattcaaagaatacatataagaatcacaagtcttcatttatgttttttttttttttttattgaaatccttagcattcatactagaaactatatttctgaactcatgacttgaaacgtagttatacatgtatattgacttgacctagctagacgcatatcaataaaaaaactgttttgaaactaaaaaatcaaataagacaactgattggtagttaattattcttgtattcatttacaaaaatattttgatcaatccaataaacaatcaacacattcaataccttgaaatacaacattaaattaaaaagtctaatgacaaattttgttcaaaggtaagtttttaaaattcttctctgcaattagcatatggaaaaagttttagaatttctaatttgtacaatattagattattttggacattgagaacaattgttttcaatagaaactttttatatataaaaatcaaaccatatcatataataagtttctctgttcagtttttcattagtagcctcttaaacttaatcttcaataataagagcattttgactttaaattcataatggcaatacaattttttatgtattttttttctgtatctactaatttgctaaaatgcttattttatttatttattaaagaaagagtgagatgagatccttccaaatatcagccaatgatattttttatgcccgagagtttcacttttttttttttttttttgaaggaacaataagttcattactggcaaaacaagttgggcactacaggggatgccttcccctacataatcaccagcagccagtgtcgaaactcttaacacttttggccaaaccatcaacaaaagacaagttcgaacgcttaacaaaactaaaattacaagctttaaaacttttaactaaatgtaaaatagctagagaaatattgaaaaacttccaatccggcacacacttcccatttgacaaggcctggatagcaattaaacaatctgaggctatccctattgaagcatctgtcctgagtttaatccaagatatagccatctaaattgctttggtttcagcttccagagcagactctgccgctgccaactgaaccttgaacctccaagacccatctcgcatattaatcaaaactgcccgtagactctgcccgagagtttcacttgaataactagtatgatgatactaaacatgacccctctattcaacctaaaaaacatgttaccaccattgatttcaaattaacaaaaaaaatatagagtaataataaattaaaatgatctactcaaccctcaaaatctaagttgaaaacttaaaccattttatttctaagaaaatactcaaagaaattgatatttaacaaatctaaaatgtaaccaaggtgatacagaatattataggtaactaataattatcactcaaaaatttcgaatattagttctaaactaatctaagagtagtacaattggtcactcttgaggtttcatttaactgaagattatactatgcataaaaaaatagaagtttcatctttcactaatataatttattttcaaaaaattaaatcaagcatgatcagagctatacctttgttatatgaacaccaaggcttcgatgtactccaaagcacttgatacaaatgagtactccaaaatttaaggatctggtgcacaatcaatcaaagtaagagcttaagaatctgtagtaaatatgcaaggaatagctaccaaatcaattttttggtatcattggctatattactccaagatatattttagtacaagtttctattacaattttacaaatattcaataccatcccttccaacaaaactaccaaagaatttaaatgtcaatgatgatatgtaacataacatctcaaataaatagttagaaaaaagtcacttaattaatgaaacttcaggtaattaatttatttaatgttatatgttgtttttttaataaaaaaaggttatgatatttaacagtttcttataagaaatactaatcacttattttgtataaaataaaagtttaataccctaaattgagtaggcaattatgtgtgcatctctttagtgcactattctctctaaattggaaatgaccaacttaattattttgattttttcaccaaataagtttgtcatacaatcttttcacttttctaaaaaaaagtctcaagataattgataattgataatagattggattgtagtctgattttaggtgaggtatgaacaatatcaaagttaatatataaagagctagggaatgaaacagaagcactgtgcaaaaaagagattaatcctaatgtaaaggtacaagtttgagatatatattaattctcattcgtccctttctactttccacgtatcatactataagaatatctcatcactcacaagggtaaaacgaaaaagagtaagtcgctaaccgtgtttaatccaattctgtaagaaaatattagctaccactttttattacaaatggaatatattatttctacagtcactcgcaaatgcatattatttcctttgtaagtcatctacatactcaaagcaacatgtaaactcaaaatgagagcgccaaaaaggatcaaataacaagaaacttatacctattttggatctggagtaccacaatttgcataaagttgatttccatcttgttgcaagaaatttttcatcgtttgttgtgtacctgttaaaggatgatagaaatcataacagatttgaagattttaacatttttagacgatacattctgaagagcacaaagagtaaaggagaaataaagggtaaagtaaatagtttattaattgaatctaaaatcacctaaatagaaacaaatattagatttatttgattgatccttcctgttaatctatttactttagaatcttaaatccaatttgcataatctaaaaataaacttttgttatattgtgactcaaactctggcgtaaacagacacaaataccatccaatgcacattaaccccataaaccttatcaaatgtttagacaagtgtctctaccaaagtagtatattacaaatataacacaaattacttcaattataaacaagcaaatcaaacttgtttttcaccatcataataatatcgatgagcaagttcagtgtaacaattcaacccaaaagttcaaatcaaagtgtgaacaaatacatacaataaacaaaagaagctagttcagataatgaaataataataataaatgtaatttttttggggttgtcccatgtttagccgactacatgatcacttgcaaaatggagttcaacctatggttaaagattataaattagaacataatttgctgggagccaacaactttacttgtttagacggtaggtgaaggagttctactctaatcaaacaatcacccaccacttaccaaacaataaaactaatcatatatataaatacatacacataccagtcagtcacagtggagccatcgacgttgggtcttcttgggtgggtggagccgtcgacgtcaggtcttggctgagaaagaaatctgcctgtactcgacggattcttggaggatgttgcctgtacttgctgtcacatgtgggttgttcaggcgagagagggagagagtttcagacaagagaagaggtacgtaccgagagaaagagaatgtcggtggacggacggtgggtggacgacagtctttcgacatggtggctggcgcggttgtgctgggtttcaaaatgggggatgggtctgttataccgaaattaaaaaaacaatgaaactagaacgaattaccgatagaataatctggctgagtcgcggacaatattgtcgctttctttaagacgtttcgcggctctgctcgaagtgtgcacggtagtctagtaaccacggcgtccccaggataaaacagcctctgtaaaaatacgatacgttctgctctaaactgtatcgctctataacaccctaaaatttgctctgagaaaaatcgtaaggaacaaagaaaagaatttttaatgttggaaaagatgtattcttacgttgttctgatacgacttatatagaagtcgatccaagaaaaacggtaagaaaacggtaatgttatcgttcgtggaggagttggatcgtgggagtaaaaggcggatcgttgattgatcgcgttttaccacttctgatcacgtgttaaaattaattaataaataaataaataaaaattaaatctttattttagtaaataatttttctttaaaaaataaagtgacacctcacccgctcgccaacccaaccctgctcaaattggtcgatcggacggacggtggcagcgcgcacgcgcgtgtggtggtctagtgtgtgagtcctcacccatgcgcacaaaactgggtacccctttaggcccaaacccatatctcaaact

SEQ ID NO: 28463 - DNA, 1927 bp, Cannabis sativa
ctcaagtttcttgttaaagatctacgacatattttcattgagaaactaagacacatttggctttaccaagccacttccattcccaaaaaatactttagttgtcctagatacttgattttcaactctaccatttcctcttcgcatttgccaataaacactatatcaaccacatatacaatccattatagtgagtttccagtgtgatcaaatcgacggtagtcatcttgccttacaactcttgtgaatagtgtgaaatcaaactccaggtgattgcttgaggccataaagaaatttttgcaatttgcacacttttcctttgctgaatttgtattcaaaccgaagaggtatgtccatatacacttcttcaacaagatttatgttgaggaaatcatttcccacatcaagttgaaacaagagccatttttgatcaacaacaaagtatagaagatctcgtacaatattcactatttagcttagcagtaggagcaaaagtccctggtagttaataccaaaagattgagtgagccctcttttgccacaaaaggagccttgaatctctcaacacctccatcagccttgtgcttcactgagaaaatccatttgcattcaattgtttaagttcctcaagggagacttgtgggagtccatgtcccattcttttcaagagcttttatttcttctaaagtggcaactttccattctagatcttgaagggctttctgaaaaaaaattaggaatcttcatttgttccagggatgtcgcaaaggctctataaaagggggataggtttgagtaagtcaagtagtaatgaagtggacactgagtgcatcaatgcagcccttttctttcagcagtaggactgtccaaatcaaaactaagagcttcaattttttcttgtgtgttttcaaaggtgattgaattcgagtcaagttcttggctctaccaaatttattctgatgttttcctccttgtgtaaaccttgattgagtatagattgggacttgtgtttttagattccattggaggacgctttataggagcgtgggaggacttatggtagctgaaggacttaacaatgataagataggcttgggcaagtgagatttggtgatgataagataggctcatgcagagtggtgtgaggtgatgaaaatagactcatggagtgaggagtgggatttagtgattataagacaggctcgtggagaattgtgtgagttatgataagaggctcacgaaggagggagcaagtgggattcgatgatgatccaccaatgccaataagagatgtccaatctcaattttgtgattcttgtgcatttttctacccctggactgtagaattggagtaataagattggtcctcgaaaaaggtcatatccatagagttgaaaaattggagtaatagagttgaaaaatttcttggtaatgggacaataatatttgtatctttttttgtaagatgagtagcagagaaagatgtattttgtagctctaacatcaagtttgcttcggtgtgagtgaaaataggtagttagagaagtttgcattggtgtcttataattaagaacttgtgatgacattctaattctataaatgagatatgaggtagtgagcacagcttctcccataatctttttgggacatgagatttaagtagcatagagcatgcaacttcaagaaggtggtatttttgtgttctaccataccactttgtagaggtgtgtctacgtgttaactttgatagacaattccataagattccattgaagaagtcacgagcaatctgatttgagaacctaaatattggctagtaaattgttttggatcattttgtgaaatacttggtggatttgactagtttcaaatttatctttcatgagaaatgtccagcttacccgagtatgattatcaactgatagcaaaa

SEQ ID NO: 28464 - DNA, 1978 bp, Cannabis sativa
acctcatttggctctgaattaaatgaggaactaatagcaactggtttttgtaattcttttcaaatcacctcttttattgtaactgcattcataaactcaacctacttgagaaagaaattataaaatttatcatccacattgacatgccctgggggattcacaacaatatcagcaacacaagtacactcttcaagcagctcttcaattttacacttctcctgtcttgaagattgctctcctttctacatctccacaacttcagcagcctctttccactccaatgctaattgtggatctggtagcaccaaatacacattagcctctgcataatttctacctaccaaatgaggacaacaacaaccataaatcatcttaatctcaagtatgacaacaaacaactaacatatgtaaaaaaaattaaaattatacctgtcaaatcctccaacataagttgaattgtagcattgtttacaaccattaaacccatgttcaaatgcttcccataaggcttgtataggaaaccaaaaggaaacctatattgaaggcttcttgccatgtccttcaaatccagtctaataaaagcttcaaatttacagttattaaaatactcccaagaccctccctcatatcttttattttcaaatggagaaaaccatgttcccccatgcataagcttaactgtaaattcacccttttcattctctggaagaataataacaagctataatgacactgaacataaaaaggcaaacctaaaagttaattggaacaagctaggcaaaacccccaaacaaataaccccttcgcaaatagagataaaaaaaaaacccatcccccatgtgcaaattaacacattttggtcaacttaaagcatgtgaaatatcaaaagcatataccacactaattaagacaataccctcgacaatgagaaaagattcttcttttcctcagaaatttgttttttactcaatattcaaaccacctttaatgctcatttaactatttgacataacccatttatcccaacccattataaaaagtcattctttctgctttaccccacatgtaaaccacaaacaatcaaaaccaacactatccaaaatcctagaaatttagaagctcagaaatcttaccaggtgggggatcgtgtttacctcgctttcgatattttattgttgttgcctcgcctccttacaccgtcgagtactcaacaaaagttcaaatcgtcgcctaaaggggttggttcctctaggtttgggttttcaagtttccagaagtgaatggggaaacgatgaggttttttgccttagagattaaaatgttttagacttttggttttctactttttttttttgattttatttttcaattttcttttaatacattttgtaattaaattttgttttaattttatttctattttcatttaatttgagtaatttttttagttagatgtatattgaaagttttaaattcaccgtggattttaattttaattttggttttctttttgtcttttaggttttatttagttttatttgagtaaattaaaattttatttgttttttattttaagtccacagtagcattattttctgaagtagatcgtgccacgtatgttaacacttaaacgtagtttggaggatggaatagtaataaacaaaatagaatctgagttcaataaatttcactttcaaaatttaaatttttatggttaatagttaaaaaaaatataaaattcatgtagttttgctatcccaaactcaatcacaaatgttgaattgggtcgctgagcaaattaatatttgaccgtatattgttagtttcttcacgggtagttaaggatagatttcgaaatcgaagcacacttttcctatttttgctgtaagagcatctccaactagactctaaaacattaaatatagtgtagttttacactatatttactccaataagacactaaaactatactcataaa

SEQ ID NO: 28465 - DNA, 1385 bp, Cannabis sativa
ttttttttttgaggaacaaaattttatctattctaatcatctttgatcataagtgacaaacgggtatgtattatcgaagtcagagcagctgggttgtaataatcaaatatgagaaataatctagtccattgtgccgtttaatatatatgacattttcatttctaacgattgtgtacagcaacaatgtcataaacatgtacttcgaccaaatgatttcttttattgacattatttattgtcattactattaaggtatgtaagatggagtgttagttgaaatcggttaggagttagttaaaggtttgttatgtttgttgctagctgtcttgagtgattttgtttagtcctgaattgtataaaatcagattgtattgctctgttttcaattaatgaagaatcaatttttggtattcatcttttctctcttcttcttctttattcattttttctctagtttatcaactaaaatggtatcagagcaattcgatcgccatgctcattgcttccgcttcttcttctgatccttctttcttcttcctataatctgatctcccatggctcgagaaggaggaactcaaaatcgcagtactcaaaatcgtggagttgaagattccaatcctttttcagctctcgatgaaacaaatagattttccacgatcgatccacgcagtccttatttcctaatttctagtgcagataatgcctcaccgtctttagtttcaaaaattctcactggagcagataattacagttcatgaaaaaggtctatgatggtggcgttgttagtgaggaacaagattaagttaataaatggataattacctgctccggatgaagatgataaagattacgaagcttggatcagatgtaatagtctggttatttcgtattttgaattgtgtttcagctgcgataggtgacagtgtcatttacgtgaatgatgactctcagatctggtctgaacttgaagagagatttcacaaaaaaaaaggtcccagaatttttgaggtcaaacgattgatgcacagtttgacacagggatccagtgatgttacctcttactacactcgacttaaaagtgtatgggacctgtttcaggaatacagacctcaaccagtgtgcacttgtggagctatgaagatcatccatgagtatcaagatgaagataaggttcttgagttccttattggtctcaacgagtcttatcttaatgctagatctcagattcttcttcaagatcccttgcctagtgtgaataaggcttttgcttccataattcaggaagaaaagaaaagaggaattatcgttcctcaaggtgaaagttcgaagtcttctcttaagaatccagctcagtttgctggaagtgcacaaggcaatcgaaacag

SEQ ID NO: 28466 - DNA, 1428 bp, Cannabis sativa
catttttataggctaaataaataagaataaggagaggagagattagaaaataatcaacaattaagctgccacatcaccctcttcaaaacactcctttatattgatatgatattgatattgattattatttagtttttattattacttaaaaataaaaatttataacaagaaaaactattcatatttctttatatataactcttatcatcattaatcattaatggttatattaaaaagaaaaactatttatattctttatataatatttttcatttatgtttatattaaaattctaatattaattatcaaaattatttgtattcttccattaaaaaattaaactattcatattctttgtataagttattatggttatatatataatattccaaacccaagttgaagttttgtgtccggttttaagtttttgttatgttttttttttctctctctccttaattcttgatgtttatttttatttatttggcaacaattattattttgaagtttttgtttctaattcttgatgttctacttggcaatggttatgaattcataggtttttctccaataaaaatattttgtaacaaaactactaggtaatttttcttttgctttgaaagagtatcgttaaaactatcattatgatacatatgcatttagattcaattttatttcattatgttgttcttcacatccttcaatctcttgcatgtataagagtaaatattaacattttccaatctatatataattatttttcaggtacatattttcagacatactattatatcagtgagagcatttatattctttttatcataatatttattctaagtaatcttttaccataaaatatattacgtatttgatatatatatatattgatattttttttagatacaaattgatcgtgtatcataaaatcacgatgacataattctttttcacaatctttatgaattcactaaagtatatttttatttatttgttatataaaaaattaggatttagtcatggctatatattcatcaccttctaaatacacaatattttattattaattgttagtcactaaatttctcaattttttatatgttcataatttttacataataataataatgatgattgcaaattataaaatttatttaatatgtaaaaattatacagaaattattaaaaataagaataacttaacaattcattaatttaatatagttatattaatattctattttctattttgtaatttttttttaacatttactaaaataataaagaagaaaaaaataattagtcttttcattttatagcccccacttattatgtgtgcattattatatttattgttattgtgatatttatattcccatatttagtatgtattttgttaaaaaaaagtgtatatactgtattttataaact

SEQ ID NO: 28467 - DNA, 2926 bp, Cannabis sativa
tatggggctggtaagaagatatggaccacaaatggagaagagaaagagggtgggaaaagggatttgcttgagatgttgaagcttttggaaggagagcttggagagaaggattactttgggggagagagatttggattcctggatgtttccttggtgggattctacagctggttttatgcttatgaaacttttggaaatatgagcatcgtggctgagttcccaaaactcattgcttgggccaataggtgccttcagagagagagtgttgccaaagctcttcctgatggtaaaaaagtgtatgagtttcttgttgatgttagaaagaagtggggaatcgagtaaaagacaaattaataagcaaaaggaaacctgaagatctctactctgatctttaaattgaatgctttaattgctttttttaatttattttacgtttgttttctttcacgcatgtagtccatatcactacattatgtgtttttttttttcattttctctgtgtgtttgatcgatgtttaaggcttcttaatctctaattatcttatatactgaaattaagaaaagttatgagatttttttatctaagagcctggaaacaaatttatggactacatcattacatttacagttttgaaaaaagaagatatatagcctcgaaatctaataataaaccaagtacaaagtctagtataataataaaccaagtacgaagtctataattaaaaccatctcaaaagacatatacccaagaaagtcatctgtgaagtttccattaattaatataatattgttaaaatgattaaaaaaaaattatattaattaaccaaaggagtgggttcagtgtaaatttaaagtattattagatttatgaaaagtaatttgtaaatatatatatagctcaaacttgattaaataagtgctccatcatgtttttttttctgaagctgtaaattatattcactcgaattcaacaatattaataatattaaaaaagagattatactctgaaaaaatatgatcaatatataatcataatgctctagccataactacctttccaagactaattattttatttaggacttaacatttaattagtaaatgtacctcattataactttagtattgatcatcaatcttgaaaagcacagccattattaatttcataaacttctttgatctacacatataagaaaaaataagagagtttaggtaaatacacactactcttccattctctaacaccgtagccacacattatttatggatttttttatttttacacttcaaaatacttttttttttttttgtattttacagaattctatataaaaattcttattgcaactagcgctgcaacttaaattgcaataaaaaatcgtacaaaaactccttttacaactagcgctgcaaccactttacccaaaccgtaaatttaaaaaaaaaattaaaaaaatagcatatggagtaattcccttttttttatacattaataaaaaaaaaactctcatattatattttattaaagggtataatgggaacatcatatataaaagtgggtatattttaaagaatataaaaataaaggtaaaaattaaaataagtaaagtaaaataggtatgcaatgtaattttttcatgtgaaaaaattaattcttgacttaataatggcctgaccaaagacgcccatctcattattcctcataataataatactgattatatagttatcattatatattaatattgatctgttgagtaaacaacatttaattatattagtccatttctataatagacatatataaatattttatgtctaaatgcatatttaaatgttgtttgtttttttttaaaaaaataattaattaatttaaagtatattataattatatttgatattatatataaataaatattaaatatatagaaaatattattgatgatgggataaaatgattaaataaataatgtatattaaattatataatatttaaatgagatataaaaaaaaacatagtgtaatgtagaataataattttaaaaataaaactttagtgagatattttaataaataaattagaaactaatgtgagtgctttcatgatatataatgcttcaaggaagaattctttttagtgtagaaaaaattacatttttagttttggtatctccgatcataaaagaattttgattaaatttttttaatacggaaacaaataaaatcttctaaaataactctttaaagagtttaatacaaatttttttagtattaatttgatgatttttcgtcttcagtgttaatcatgaaattttaaggatgcgtgtatttggtaagccgtataaaggtcgtattgtattaaataataaataacattatatttagataaagcaatacattgtattaattattacggccaaaacttttaatacaatataaactgtattatttaatacttaataaatagtttgtatcaacttgtattataatatttataaaggattcgggatcaatccaattttctgacctagacccggaacccagactcggacccggacctaaacctggactcgggacttggacccggaaccgaacccggactcagacccagacctggaccctagactcggacccaaacttggacctaggacctgaacctaaaccttgactcagacctaaacccgggacccggacccggacccggacacgggacctggacccgaaccctgactcccgactcagacccgaacttgaacccagacccagacttaaacccgatacttgggacccgaaccgggacctagacctggaccaggacccggacctgaaacccgggacccagaaccgtgatccgaacctagactcggacccaaaactcgacccggactcaagacccagacccagactcggactcggacctgaactc

SEQ ID NO: 28468 - DNA, 3092 bp, Cannabis sativa
tggtggggctacaaggccccatcacaagggagttggtactggaacaaggtagtggaggccaagaaccaggttaaagacttggtagatgtacaacagtttacccaatccaagtactacatctccctcaggtataagttacttgttcctccccaacatagagtccataggagtaaggaagtatgggggaggttcaacactcttaaaaccagtttcatcatgtggattgcaattcaaggaagattgaggacaaaagagagacttcacaggttcggaattattgatgacctcgtgtgtgtactgtgtaaaactcatgttgaaacttgtgagcatctcttcttttcttattcgttttcaaggcagggacttcaaagaatcaaagaatggttagggtggaatgcatccactttgaatatcacaagactcacccgatggattgaaagaagcaaaggcagcaaattcaggaagcaagtgctctcggctgcattgtcaagcttagtctaccatgtttggaagactaggaatgatcaaatatggaactcgaaactaggtaatgtagacagagttgtatgtacagttaaagaaatggtaaaacaaagaatatatagtattttgcctaagaaagttgggcatcaagagttggaatggtttagatccttgtaagttcgtagagttatactcatattgtgtattacatacaaagttttgaggtccctcaattgggatgctcttaggttgtaaattggtttattggagtaatgaaaacactgttgattcatcaaaaaaaaaaaaaaagatgttttgggtgccttacttttgcctctaccattacttctcacacaactaagtttgagcctcggccaagggcttgcgtgttcttaggttaccccagaggagtaaaaggctacaagttgtatgatcttaattccaaacaaattttcatttttcgcaatgttatatttcacaaacatgttttcccttttcacaaacttaataccgttaataatgttgttgatcctttcttacctattgttctccctaataaacatgtaactaacacacatattgatgattatccgaagcaagatattagttttgttcctcctaatcctgttttgtaggataatgctgaagaaacatcagtagtaaatagtgcagagcaatctgaatgtccagatcagctcgattcatcaccaccacctgctactattcctagaagaactactcgagtctcatggccacctagttacctacaagactttgagtattataacttgttataggataaaacttccacatcttatcccatctcaaaatatctttcttattccaaactttcaaaagcttacaaagcatttgtttaagcagtaacgattgagttcgaaccacaaagctacaagtaggctattcaattcaagaaatggcttcaagctatggataatgagatcttggctctcatcaccaacaacacatggaatgtgctgcctctcccaccaaacaaacgggcaatagggtgtcgttgggtatacaagattaaatacaacagtgacggtatagtgtagagcgactcaaagctcgccttgttgcacaagggtacacacagcaagaaggattggattttctttgacactttctcaccagtggcaaagatggttactttcaagctcctattggccattgtcactatcaaacaatggcacacattgcaactcgacatcaaaagctcctattggccattgtcactatcaaacaatggcacacattgcaactcgacataaataatgcttttctaaatggtgatttagaagaagaagtttacataaaaattccataaggtctcaagcttccttccactgtcacaggtgaaaatcttgtgtgtaaacttcataaatcaatctatggacttcgacaatcttcacaacaatggtacaagaaactcactgatgctcttttagaagaaggattcactcaatctcatgctgactacaccctttttactctaggaacacacaacacatttgtggtccttctcgtctatgtcgacgacatcatacttgttggacccaacattcaggttctacatcaattacaagatgctcttcagaccaaattcaaggtcaaaactctaggtcctctcaagtattttctttcacaacgcaagtatactctataatttcttgctgacacaggatacaccagcagcaaactagccaaagctcctatggaccccagacaacgcctcaatgatcaagaaggtgacattctcgacaacctttctcactatagacagctcattggccgccatctctacttgaccctctcacggccagacatcacatttgccgtcaacactctcaggcagtttatgtcttgccctcgaacgcctcacttgacagctctacatcttctcctccgttatttgaaagggtcaccaggacagggcatactctactcaccaacatcctctcttcatctccgcggattctctgactccgatttggctgcttgtccaatcactcgttgatcaacaacaagtttttgcatttttattggtgactgcctcatctcttggaagacaaagaagcagctgactgtctccaaaagctctgctgaagcagagtattgtgctttagctgccaccacgagtgaaatcacctggatacaatatttactcactgatcttcacatagatcaaccaactcctgctttcatatactgtgacaacctattagccattcacatagccaacaatcttacttttcacgaacgaaccaaacatatcaaattagactgtcacttcattcgtgaaaaaattgccaattcgacaatacaactcatcccagtcagcagcacacttcagctagcagatgttttcaccaagcctctcccctccaccacacaacttcacatttgtccaagatggccatacatgacatatatggtccatcttgaggggggcgtaacaagactaagactattttcctttcattttgctcttttgatcagttagattagttgactgttattacaatttatattgttggttattagtctgttattacaattttttcattcctgattttgtggtggttagt

SEQ ID NO: 28469 - DNA, 1620 bp, Cannabis sativa
  modified_base (929)..(931): a, c, t, g, unknown or other
atctctaatggcaatgtaagttaaataatattatggtttagtctaatttaattcttattttaaattattttaatatttctattgtttattaggagtacttttgattactacaatgcttccaataagagacggctaaaaaagtttggcattacatgaaaatttataaaagttagttgtaagattaaaattacattaagatattacaatatagtaattattctacaaattttttattatctatgtgtttttatttcataaatatgtgcagtgtcctccacaaatatcgaattttgagtgtgggtcatattatataatgagatacatgcgtgacttttgcctgaattctagacttatcaattggctaaccactcaagtaagctatatatatttggggtatatatactatgataaaatatttttctatcctattacaattactactatatatatgtacaaatatttatctatcattggagtgcaatgggaaaaaaacttatacaaaacaagaaattaataaaattcgtgtagaatgggctgtccaatttttagaagaaattacaaaaaatggaatgctttaattgagtgatcacaatgaaagaaactttgttatatggtgctatgtaaacatttcatttttgaaagttgttttagaagtatttgtgctcctactttttttttttttaattttattttatgattttttatagctaatattaatttattttcagatagtaagtgctttttttttcctaagatgcttttatctattggtttctttggttttttttactcatgagtcttactactactaaagagggtccatgtagtatctttgtttcaaaaaagttatatgtatcctatatgagttgtttattacattattttctttcaaatttttatggcgtttataatttttttaatttagtttnnnttattcatttattataaatttaattatttctttttgcctttatttaatattaaaacaaaatatgatttgtatacatattgttttttttaagataatatagattagtttttttttttggagcaagtaattatgtttttatgtttattattcttatatatattatattatattttgcatttatttactaattattaatacataaaacattttaactagaaatattttatttgttagtgtaaaattatgatataatttagtagtaataaatttataattacaataaattccaatatatacacaaaatgcatcaattttatattttaagccaatatataattttagctacaaaaaaatattagtagctaaaagtattcatataccactaaaacttttggtagtaagcatatttagtgtcatttgattaaaattctctattaactcattttgttactaaaacttagtagcaaatttttatttaatgctcaaaatattaactaccaaagataattagtagctagaaatataaatctactactaaaatatttagcagaaaactcatataatattttttattggaacttgctacaaaatcattttactaccaaaatttagtaactaatattaattaactaccaacaatatttggtagctaaaattttgtcccaaaaaatgtggtttcttgtaaaaca

SEQ ID NO: 28470 - DNA, 1536 bp, Cannabis sativa
aactcttataaaactaactaactcaactactttgacttagtttttgtctagactaacatcccccaaacgaaaagggatggaagccatttgaagtttggacttgagatagttgaaatgatcagtttacaataatagggacatatctcacagaaatcagcttgaatttacacttggattttcataagaaaataaaggagtacgaaaagatatagattatgaacaactatagtggtagttaaatgacattgccgagatgatttttgttgaccaagtttattacaagtaggtaaaggccatctttaagctttattaggctacttttaacctgttgttcggattatttttagagttaatttcttcttcgttgttattttttgggataaaattatgcttgttttctttagttttaggttatgacacttggaatgtataaatttgtcagatttcagaaaatgatgatttataaaataaagaaaattttacaagaaaataaagcttaaattagagtatgttctgatcaaattttggaaaaagtcaaaacataaaagttttagatctcttttttatcttttcaacacatctttaatcagcctatttagagtttgtatgtgaaagttatgtatattttactaagagaggtccaagtaggaaataattatggtcgcaactaaaattcgtggccgcgacgagagattatagaaattccgtttttcacttttctatagccttcgtagcaacgactttgtacgggacatgagcaatttcatcttttctcaattttgagctgaaaaactctattttaatgaaggggatcgagaattttagagggatattcaggaaaagaaccctagaaacaaagaggacttctagagcgagtgtggtgacccggatcaagttcacaatctagttctttcttctccctttatattttcttatgttttttatgtttctaatttgattatggatttgagtttagagattatgaactaaacttccaatttagggatatgatgaatattggttgattttatttcatgagttaatgttaattgttatttcttcttttgtgattgtgcatttattcatatttctgtttaatacatgtttgagattgaaatctcaatacaaattttgagtattgagaatgctctgattggataaacttaggtttgatgtgaaacgagagtatttgcatagcctttgtgactttgaaattattatttaatgtaaattgtgtgttagtctatctcataggtgcaataaataatatatggtttagtacctcaatgaactgaaatgagttttggttaattttataatatgtcatcacataaaaaaaaaattatcatcaacaattgagttattaaaacaacaggattcgtatttcatattcttaatcgctcatccatatttaaacaacattaaaagctgtttctaaattttctatcaagttttattatttttttcttatcacaattatttcgatttaccaaatagaaatataaatctagtttggtagttttcaatttcaatttt

SEQ ID NO: 28471 - DNA, 2316 bp, Cannabis sativa
aacaaaacagagcatgtggaacacttttagaatttaaacttaaaataacattgttaaattatctactgtaacggaaggaaaaggatacaaaccgaaaatgaaagatcacgcagcagaattgataagtcaaatcataagaacagtagtacacataataaacaactacacaccataagtactaattactagtaatgttgtaagaatacaattatgtcttaacctcaaaacaaaatgcttttatctttgttttgcttggattattcttgttactaacagccaaaaactgacccataaaatgacaagactgattagttaaatggtatattgtgctagactgctagtatggaagaaagggaataaaccccctgaaaccatatccattaagtgttacattgttaaggaaaagggagatgtaattaggaacatacctgcatgacttatcacaagtgatgcagacctcaaatggtctgcaatgcttgatgaaaaagtaaagtagtctaccgctaatgacccatttcctccactctgcattataaaatcagaaacctttacacaaaaatatatagtttgaaggtttttcttaatgtatgacaatcagttgagtgttttagcaacagtttaagaatataaaagatgcagtttgcagataagttgtgagtatactagcagtgaaacgataactgattttccttacatactttatctccataaacataatcttgtcattatgagtggaactctcattcaataagttatgatttataaggattatggtattattttttttttgaacaaggattatggtattattatgtttacacacttcctagttaattttcctttgtgattttacgaaggatttcctccattagctttaattaagttagaataatgaagctagcagaacgctgccagttcctataaatttcttcaaacttagaagttttcattgaagaaattagagaaaatcagtttttccttcctcttcctctaactcttgtgtatgaataactggtaaaccttgacaaaagataagaactaacaaaaaaagtttttgacactttaatgaatatctccctttttgttcaacaattcacttttagaaattgttaaatcaaccaaattacaaaagtgggataatagtttcattcaggtataaaagcataaacaattgcaacggggaaaaacagtgataccttagtggggacgtaagagccacggcccatttgaataagaaggtgagtataccctcttctaaatagttcttctttaactacttcagtgtccattgttttaacgagagcatcgaaacaagttgttcccacagtcacaaataccatcttcttcttagaatctatgcaatccatggcatctcccattttagagctgataaattttcaaaatgaaaattattaatgaatacactactctatagcaattaaagataataacattaattgacagagataagttaataaaaaattgaacatttgatacaaaaaattgaattagccaactttaatctaaggcaacattagcaaaccaatggagcaaaagcaatagataaacccaaaactcatttgatgacaggaaaaatgtttatgaagtataagaacaatttaatactcaaatgttaaaacagtaaaatgtctagctaaaaactcataaagatcatttaatggctggaaattcatagaaaacaataataaactagaggaaatacatattaacaaccacagtacaaaatttaagcaatcgagagtcatactgaaattgaatgactggaaattttaaagactaaaaattttactaagttgattaaaacccaaattgaatatcatcttaacatcaaaatgaagagaaaaacttggcgaaatacgtaatggattgagattgatatgtttccctgagttttaaggtcagccaaacaataaaataattgtaattaaattagtgtttgggagtagagaaaaacaagaaaataccttccttctcctgccttatctttctggtgcttaattgatcccttggaagtgagaaaggtgaagaagaaaaggggtaaggaatttctgaaattgaaaagttcacattctctcaccaacgaaacgaaaaatataaatatttgtatcttcaagcttaatacgaaacacaaacccatataaataaaagactgacagaaattaaagctctttttttttcaaatccaatctgaaaacgagatgagatgagagcttcgttgtggaggttcgcccagatcaaactttagtgggctgtttggttactcaggattaggaatttaaagcccagcccatgttt

SEQ ID NO: 28472 - DNA, 1685 bp, Cannabis sativa
  modified_base (1505)..(1507): a, c, t, g, unknown or other
ttatgacacccacatagccaacggttttaggaaccgttgggaaatcatataaaagacagttataaaccgttgggaatagccctttttgtagtagtgatatttacctcactaagcatcatctaaaagttttattattagagatgttctagtaggaataattatgaaaaaatggaactgcatgtagcgttatgtttatatacaacatttgttgactcaaacaagaaacaaaattaaaatattggttgacagacaaattttgtcaaagtaacatatttaatttccctttttctctctatttaaaaaaaaaaaaaatagaactcattattgaattttttatatgaaagctttctgttaaaccttagcattagtcatcccttaatcttgctacaaaatatttattaataacaacattgcacttagctttatatttggcaaccggccaaagataaaagtcaataatatatataagatatataataaaataataacgtggattcaaagtagagaataagatcatagcagagagaatagaaaaatgtcttctcaatattctgcacgttcaaaaccattactaattaaaaaaagaattattttatctcttggaatttaattaagatttgtttttctttctccaagtccaataaaacacaggaaattacatcgatgcaaacaaaagtatataatccaagttattctatattttgtttgaaatatttaggatcatatacaaatgataaatatatatatatataatattctttctttcttggaaagatcaaagaaggtgaacatagatggatacgattttgttttgtaatgtacttttaccgaatatattctgtgatatattagatagatttcatgatacataataatgggtctcagggtacattactattttttaaccctaattatcactagatcaactccagtcctcagatcaaataacttctctatctaactgtcgtacatcacggaatacatttcgtgaaattacatcataagacaaaatcgtgtccctatatatatggttcttatttaacttttttcttttttttcctttagtctcaagatatctattctatttttgatcttaaccctttgatagtctttgagagatatcaatactgaatattgttatatatgcatataattatactattacattggcatggatttgggtgacattaatcagaataatatatttataacttgtaagtcctacatacatttttggtgcaccgctacaatacgtgttggtgtgggatctttaaaatcaggccatgtgaagtaggtattttctcatgttactattaaatctaagctggtatgtacatatatgggcatgcttttaattggtattatttatgaatagatattctattattagccattggatcaaatctaatggttgatatttatagctattaattaaaattttaaattaaatattttttattttaacctattacctgatgtagaagtcattttttatatccattctnnntatttttgtcctcattccatatatacattaatacattaatactttacaatttaattatggtattttaaaaacttaatcacaccattaaacctcactacaacaaatattttcattctaaaatatatatttttttttttgaaaaggcataacatatattataaaatacataataatttat

SEQ ID NO: 28473 - DNA, 1612 bp, Cannabis sativa
gttgtcagctgactatatataccttagtgaacttgtacaatactcaagtcaaggctccgggtcaagcctccatcctcctcattccctagagtcttggcttgatattctattagtaaagtgtgtcatatatattgagggaaggggaaaaagggcggaatgacatgaaaggtctttttcaaaacttagcattaaaggcattacaatgatcatatttatcacttctcttttgcttaaaacttagagaagtgtatagacatttactgttaaatatgagtttcttcctctgtaaagagagaagaaagagtgtaaaaattggtaatctagtccattcatcgatatctatataagactattactgctacatgtgagtttctcagttatataacctagttttagctgcaattagctactttaagttcgagcttgttgtttttgtttctttgcaggttgtaagctagtgcacatggcagcaaaagattcacagaggagtgtaaagaatcggaagagttatgaaactgaattgattgtgtttctgattatgttggaaaaaagtcatagttaaggagttggcaccaactcagtcacaaaaaagataaagattcaatcctagtggataggctagctagtcataggggttctgaattctagttctggtttcttatcactttcagccttctaaggaggaatgttatgtcatctagtagtgtaggaacttgtgtcattgtctcatttaacaataataaataaactcaccactgttattccaccactaagtgcagcacgggcagcttccattgccaactctgcactacaagaaaaaaagtaactagacattgtctacaagttaacttgagaatttaacatattaatttaaacaaaatgcgatgcaccaacagtaatatggccatgaccaattgactagtcaccaacagtaatatgaccatgaccaattgacagtagttgggagtcaagtgattgaatggattagtggtccggtttcatgtactaacgtagataagtcaagcaacatgttcctaattgaaacaatatctagtaacaaagtatcgataggtcatatgtattggcgcaaaggcaagcaatgatagtagaggtctgaattcgcgtcaaggtgtggtcggcgtcagaaagacgagaaacgttaatgcgaggcagaagtggtggagctgtgttttggggtaacagacatggcggtggaagagcttttcccttgaggctcccaatctccattacctaacaccaacttcgtttgacaaaatgtattacattttaactccaaaatatctcaaaaatagagatcaaacggtgaaagctgagatatactttgttatggtataaataagatatactgatttttgtttgtgttgttcctttggatttcttaaaattacaaatacacccattatcctaaaacataagattaaaaaagagagtagaaaaccaaagtggctgagtgagtaccattccatggctactttcacttcacttttcttaccaaattctattcatttttccactaagaataagaaacttgttaccaatcaatcttttttctcttcttcatcaccagattacattcacttcaaatcaagta

SEQ ID NO: 28474 - DNA, 2325 bp, Cannabis sativa
  modified_base (661)..(666): a, c, t, g, unknown or other
  modified_base (1928)..(1929): a, c, t, g, unknown or other
  modified_base (2074)..(2075): a, c, t, g, unknown or other
gttttgttgttttgcgattgttttttttaaaaaaaaaacagtatttttgtaaaaaaattccgtgtgacagtaaaattgtaaatttttaccaaaaaattaatatttttgtaaaaaccttttttatgcctcctcactctctctctctctctcataatttttatcttctttattcttttattaatttttattattttaatggttttaacaatctttctctctctcacaattttttttttttttaaaccattaagagaactctctctcttttacattcttttactgtttatcggatttttcagaaacttataataagaagagattaagcaaaataaaataaaaataaagagagaataatattggattaaaatctttgatgtaggcacatatgtatttgtgtgtattgctatataaagtttgacccaaataaagtggttattttagtaaggggtttttacaccacatactgaaatttccaaattttttacttttatactgtggggtggaattttttttcaaaagtattatgttttttttcaaatatattgtgtagactttatactgtatactatattaagttttcacagttgttccacggttgtttatttagttgttttactgttattttaattgttctgctgtgttgttttacggttgttttatnnnnnnacagtatttttgtaaaaaaattcgtgtgactgtaaaattataaatttttacccaaattcttatatttttgtaaaagcctcttttaggaattgtgggtcattaggtattaaagtgtcatgggctaaatgtgtagataccttaagagatatttctaatttattgaggggttaaattataaatattaaaattaataatctattaggttatataatggtagtgaccttaagaaacaagagcaactctattctcatttttccccatcaagacaaaaaattagagaaccctaagtcttgtattcttagaagatcattgccgaaagatctagtatgcatatggacatcactaaattaattatctctatcaaggaattgaagtacactcccgctattcatattcttctctttgaatcaactaaggggttatttagatctatgtttttacactttaaataaaatgtaatatgtatatctatgaaattaatcttgatattgcatattggtatgagtgataaaaaaatataaaaagtggcagcaaagccatctttaattgattttttgaggatttaaggtttatgttcaagaaacttggggatttttcgattttctaaaagtttagagttttgatcttctatttataattttgggtcgtagttaatggttatttattttttatctaccctgtaaagtccttttttggtaagttagatgtcaaaatattttttactttacggtaagatttatttgcattcctaactgattttcttaccttgtttattcggtttttattgctcttttctatgttaggaaagaatcatttttcagctgaacttttctttgtttggaaaattcttgtaagagaagaaattctcttatggaaagttttcaaattttgggaaacttgactttttctttttctaattgatgatttcgactttgcatttattagaacaaatcaaattatctttatttggtaggtttgaagtcaaaattcatgatcttagttcaatttagaaagtttcctttctggtcctgatcttctactgcgaaatccgattctgatgatgcaaatcaggaatttttttaagaaagttttgtacagctgagaaatcattttgtggttgtctctagggttactatgttctataaataggacctagagagcagccaaacgattttatctcttctagtcttatattttcatatctttcttggtgagaagagtgttttatttgtaaaaacctagagtgttcaactaggtttcgnntttcttattatgatctcatactattcttagaataggttgaagagaagctttgaacaagcgtgagtcttcgggagaagacatttccaagtctcattttgagaggaagtgagcatatatcttcgggagaagatttgtttaagccttnnttcgggaggaagtaagcacacatcaatagctgaagggagttcactactgggtgtgtttcaaagatcatattagcaaggtggattacaaagggttgcgacaaatcactagagggagtctaaatttgtttaagtcaattgcttttgtaatctatttgatagtttactaattgattttattctctgggcgtggccccgtggactagtagtgtttgaaaacactgataccacgtacaaatctcttgtgtcaagt

SEQ ID NO: 28475 - DNA, 2086 bp, Cannabis sativa
ttaaataatttataatatcaaaatggtataaagagtctttttcttaaaaaaaaaaaatatatatttatttgaatgatgttttattttcttaatttgtaggttaattaaaggataatgcttttactaaatcaaggaaatgaaagcataatgttgattgccaaccatatgaaaggtttataaatttaggtacatttatagtcactatttatgtatattaattttagtgataaatttattaaggaaaatatattattggaataaattatgatatttgatttggtaggttttagtgtttgacacctgtaatgtgatgtttctatcagacattattttttttaaagtggaaacttccttattaaagttttttcattatgtttatttataattaataaggaaataaaacttagttttgttcattctaataatatttcagataattttttattattctaataattttttttctttgaaacacactctattgtgtttgataaaataaataaataaataaataacaagccatattcataacacgtgcccctctattgtttatttttaatataaaatacatagtatttgtgtatttttgaagtaaatgctattttggaccttgtattttataaaagttactgattaaatcttttgttttgttaaataacaaaataaatcatgtattttctgaaatggtaaaaatagaactatgagcttaatttttgacatattttttttaacataaccaacttgaagaaaattcttaacacgaacagttacaaaaaaaatatatacagttttgtcataacacctttagatcagattattattaaattttattttgacaaaaaatcggtccagggttctatttgtactattttagaaaatacaaaatccattttatcatttaacaaaacagagtctaaaatggtttgacctattttttatattaaaaaaaaatctcaaaattattattatttatttttaaataataaaattcaagtttgtcttcatccctgtaatattggatgggtcggaaaatattctttatttaataacttatttatatattcaaataattacgaaaaaaaaaactatattcaaatatttttatttgaatttaaatatttattcagacaatttatcaaaaaaaaattattcttacaaaaaatgtatatatttactcaaaaaattccactttaacgcacattttttatttgaatttcacttttttatttattttcttgatatgaaatgagctcgaaatagtttaaccactaatatattttcacaatatttttgtatcaaatgacattaagaataaaagtttagacatatattagactttacaaaataaaattttagaatattattaacaataaaatattttgttattaattatatataaattgcgctcgctactaattcattattttaaaaatagaattttacactcttttgataattattggatctttactctttaattaaggttattgttagattttttcttttttaaaggattcgttaaatttattattgtatattcagctctttgagcaatttattattatgtaatagaattttatttgatttataaatttcatttttctcttaaaaatataagagaaataaataaaatggtgtttagatataagtaatatagagtattattattgggtagtaagtattttttagacgtgttattttgcgattgactagtattaaattatatgatttgatacttagttagactaataatgatattaacacgtaggaggatactaggtaccactggtttcttttagtatttctcgcaatatataatagagtattgcttttggataccaataatgttctacaccttctaaatatggctccttatgattagttagtaatattatctaaaagtaaaagctattatattaaattatttaacgatacactaatgctgccttttagcatttctcttatggtagatattgtttaacataaaataaatagtaaagtattaagctatatacaagatcatgagattaaggctgggattaaggctaattaggattttcgtcccttaaactttgacatgtatcaa

SEQ ID NO: 28476 - DNA, 1419 bp, Cannabis sativa
ttccttgtttatgggttttctacgcatgaaaatgtttccaaatcagtaacatcctacgatctctaagttctcaatcaactaaagattatacatcaccctacacggcgttgcatgcttttctaatcacaaaaaatccagaataaacctaaaacccactaccccgaagcatattccaacaagtaaaaatagaaaaagcccgagaaaggttacctacttatagtattaagagcttggggtgtcaatttctgaattgctaccgaggttcttgcctaaaactcgcttagcctcctcgtaagctcattaggattgcttcagaagtccaatgatgggatccccgagatgatgaatagtggaccaacgaatgggtataggcgttcaataatcttcaataatccctggagaagctcagaaccgagatcaaatatccattagatgatttttgggtttgagaagtttcttctttttcaaggttctctttgaatactaaaaaatgtgaggaaatggctaaaatgccaaaaattctatcagcagagtatttataaggagaatggtgattcgtgtgcctcttatccaagggcttagattaaatttgtgaaaacacaaatactacaatccaatggtttaggaataccaaaggttttaagtaatgcaatccatagaaccgagggggcgtgtatttatggtgatattcgcctcaagtaacacactaacatgattagccatcagtacacaacccaagatgccacatgcccaatagactgcgtgaggaacacgcaccaacgatcatttgacacgtggactacaccaacataataccaagagtttggaacacttctgcattgttccacgacagaatattaagaggccgactcaattcatggccccaaatacgatctcacatttggatgaaggtagcaagcctccgtgactctcaagccatcaagacttggggtaaatattatccatatttctggatagctaatatatgggtcattgcggaggcccagcaaggaaaccaagcccattcattgaatccataaaggtcaacaataaagctagacatcaagtctgaatcaagaacaaccgttaactggtgaaatggcatgaactaaaggggatactcacaggaatcatctggaaacagaatacgaaagagtgttcaagattacttagtgtgtacttaatagttggcctaatgtaggagtatttatcaaaccgctcacactgcacaaattgccagcaccacaccacactgtagaaaaatgcagtttgaaattctttacggtgcggttgcggtttgcattttttccaacccatgcggtgcgatttacgattttgaatttaataattgcggttaaaactgcaccgcactatatattacaaagttactaatttttacaatatattttttattctttt

SEQ ID NO: 28477 - DNA, 9289 bp, Cannabis sativa
  modified_base (9264)..(9264): a, c, t, g, unknown or other
taaataatttcctgattaacataactaactgctaatttccaaattaactaagcgggctttacacgggcatagaaggccatttaagcctccaggctcagacacccttctactctaaaaggttctactgcacaaaaaaggactggtacgaaagtacccaggcctagaggaaggaaaagccacccgagtgattttgtaaactaggacaatgggactaaggaacaatattctgatgataattagtccacagtagatctctgaaggtgtcttgacgccaagtatgaaaaggctaaaagtgaaagggcgaggccacaagggaatgacctcaaaaatcatctaaatgacaagtttcgcgtatgagatctcctggacaatgacgccaagaggttggaggagcaaatttctgctctaagacaatttgtcaattggtccgaaagtaaggcgagaccctcatcgattctgaggatgaggacctggaaccatgtgtcaggaggatcacagaagcaccactctaggagaactttaagatgcccagattaagttgtatgataggcgcacaaatctgaagacccacctggccaagtacaataaatgatgcaggtggcgagtttaagtaaagatgccaagtgtttgtgcttctccctgatgctcaccaagtttgcagaggactaatgaaaaaggttggctctcagatcaattcatagctagaaggaattgtagtctgccttctggaagcaattcatagctacccacaactatgatatggaaacggtatccatcaccaatgttaacaacaagtaggagaaagcctcaagaatttcattcaatggatgatggagacagctgctaaaataaaagtgattgatgacatgaagcttgtggccttacaatctggacttgtagtttgctccttaatatggggagagatgcaaagaagaagggttgagacattttttgagttcattgctagggcacaaggttttatcaatttagaggatacttttcaataggctttcgaagtccctccagcatttgctccttccgtgaccactccatgctttgttccacaagcctctgttcctggaacataatacaccctgacagtctatggaccttatgcatccatgcaacacctacacaaacccatttttctgggtatgaagcggcacaaatcagatgcagtattgctcccagacagtcaaagccccaaatggatgttatggaacaaaatgtaagtcattctcagagtaagagaagtggaaagaatcaaggtaaaagtgaaactttgaaaaagccaaggaaggattatgaactgaagtacagtgagtataccagcctggttgatacttgggaaaacttgtacaatgtaacctggaatatggttcactacatgaaccccctaagaattctttaagggggaaagcttaaaagagatccaagaaagaggtgtgagtatcacagagacgtgggacacataaccaatgaatgtggctacttaaaggatgaaatcgagatgttggcaagaattagacacttgggtcaatagttctgcattcctattgtctatcctaggcggggttattcacggaccgttgatcattttgggacagtaaggtaccataaactctttgcaaggagtagatcaccctcaagctcctaaatcacaacttttagccctacctgctctgctagctctgccagctcaggctgcagtagcagtactagctccaagattagggaacttataccctccaggtttaactctaccatcggtagatagacatgtggccacgatcttaggaggaccgtatattgcaggaactaccaaaatttcccaaaaaagatatttgagggaattagatggagcaggggaaacatgtgtagtggtataatcaccagcccaacgtcctcaaactgtaaacttgcccatcaggttcacaaaggatgatgttagatatgtacattttccccataatggccatttagtcattgaagcccaaataaccaataagagggtttccagagtcttggtagataatgggagctcagtgaacatcttattcaagtttgcattctaagagtttggactcatagaggctaacctatcaccttgtcccattcaattacaaggcttagtggggatgctctaatgcctatgagaaaaatagatctctgaatcacgctcaaagaagaaaataatgtttgtgccttcaaacactacacctttgtagtggtggattgtcccacggattacaacaacatactaggacgaccgttcttagtggactttggggtagtaacttctataagacacttgtggatgaagttttcctgcgacaatgggtacattggagtagtcagaggtgatcagaaaagtgcaaggagtcgctacaatgtttctgtttagaccatgttcatggtcccggaagaggcaattattactctcagaatggatactcaagtagaaactgaagccatctgggaggattttaaagatgagttggatcctatagtggggatagaaagagtaattgagctgctggaggatgtagaagaggtcaacatctgcgacatagatcccactaagaccattaaagtggggaaaaacttacatccagttgtgaagaagaagattgtggacaccgtcaaagaaaattaagatgtgttggcatggatccattctgacatgatggggatcaaccccaataccatttcccttgacttgaacatcaaggaagatgcaacaccaattcgctaaaagtgaaggctcttagattcggtaagggcagaggtagtgaaggcagaggtggataattaactacgaatgacttcctataggattcattgtatccagtatggttggaaacctagttttggcccctaagaccaatgacacatggagaatgtgcatttattttaaggaccttaacaaagcttgccccaaggattgcttcccccttctgcgaataaaccagatggtggatgccagtaccaaatatgagttgctgagcttcatggatgcatacttcagttacaaccaaattaaaatgcatggcacggactaagaacacaccaacttttagatagataaagggctgtattgttacaaagtgatatcatttggattgaagaatgccagagccgcatatcagcaacttgttaataaaatgttcaaaaactaattggagaggaatatggaagtatatgtgaatgatatgctagtaaagtctaaaactttcagagaacacaatacagatctcaaggaggcctttttagtcctctagaaatatgggatgaaacttaatccaaaaaagtgtacgtttggagtttcctttggcaagttcttgggctttattgtcaactcttaggggaattgaggtgaacccagagaagatcaaggcattcatcaacatgcctttccccaagaagcacaaggacgtgtagagtgttactagaaggatcacaaccccctataagttcatttcaaagcccacagataaatgcattccattcttcaatttgttgcgaggaaataagaaaattgaatgggttgaggagtgtgaagaagtcttccagaattaaaggagcacttgacttaggctccagttagatcactaggggtacgacacatcttcaatcctctttcccaaaatggaaggattgcttgaagtctgtctcactcccagtgatgctttcaccatttgatctttttaagcgaagtcatcgcttgaatttttaggaaactctagccttccctcgcggaagccaaagtctacctcacaaaaattcaacatgactctcgcatgcacgttatttttcgtgcaagaaaggtcactaggggtgcaatacatcttcaaccctccttcctagaatggaaggaacgcttcaagtctgcttcactcccagtgatgcttttaccctctgatcttttcaagcgaagtcattgcttgaatttttatgcaactccagccttcccttgcgaaagctagagcttgtttcataaaaattcaacatgactctcacatgcacattattttttatgcaagaaagatcactaggggtacgacacgtcttcaaccctccttcctggaatggaaggattgcttgaagtgtgtctcactccaagtaatgctttcaatctttgatcttctcaagcaaagtcattgcttaaatttttatgcaactccagccttccctcgcggaagtcgaagcttgcttcataaaaactctacatgactctcggatgcacattgttttttgtacaagaaaggtaaatggaggtgcgacacgtcttcaatcctccttcccagaatggaaggaccgcttgaagtctgtcatactcctagtgatgctttcaccctttgatcttttcaagcgaagtcgttccttgaatttttatgcaacttcagctttccttcctggaagtcgaagcttgcttcataaaagttcaacatgactctcgcatgcacgttgctttccgtgtaagaaaaatcactgggggtatggcacgtcttcaacactccttcccgaaataaaaggactgcttgaagtctgtctcactcccagtgatgctttcaccctttgatcttctcaagcaaaatcatcgcttaaatttttatgcaactcgagccttccctcacggaagtcggagcttgccttataaaaattcaacatgactcttgcgtgcacgttttttcttgtgcaagaaagatcactaggggtatggcacctcttcaaccctccttcgcagaaggaaaggactgcttaaagccttccacatgcctagtgatgtcaccctctagctttggcaagcaaagtcattgtctgaatttttttgtgcacctttagcctttcctattgaaagccaaagtttgccactacaaaatttagcatgactcttgctaattgaagcggaccttagcacatgatggttgcccatgtaaggacgcaggaccatctttccctccaggaaaccaaaagtttgccatgccgcaagagcctatactttcccttacgaagtccatgtcatgaaggaaccgtttgcgaccagccatccacctaggttcctgcctaaaatcctacggcttttccccatgaaagctaggagatcactgttaaaccttcaagaattttctccaagaaatcatggagaggcaagacatggcctagatgaatagtatgcttcctggagcaaagcaggactgcacctggacctcctcctcaaagacaagaataaaaaagaaacaagatgagttagattccagaaaaatgatcgagaatttgagaccgaaattcccaactcatttgggggtatggtacgcttgattgctgacacccataattccttacatccatttgccaaggttattaactcaatgtacatatgcaaccaaaattaggaaacattttcaaccaagtcttctcgagggaaacacgctagaattctttcctcaaaagataaacttaagtacgaatccggggatataagatgcgtatttggccaaaattcttgaaaaaaaaaatctgcccaaattccttcttacaaatctctatgaatttcttagaagtttagttcatcaagttgcataaatggctaaaactttaggctgacaagaatcaaagtaagaaaaatgcctaaaagtctaaggcggttgcgggcattactcccggaactcaacctcgtaaaagaactaaagcttgaagaagatgtgtgaaaaagcaaaggctcctttttgcaaaggaagctatctccgagcaaattctaagtaagtcatcttcccaagcaggaggtcaagtagcgagaaaaagtaaaaagtattgcagctccgaggacgaaagtgtaaaacctaataacaatccctggatcgacaaggagatgactaagactaacaggacaagttgaaacactggtcgttggaaccaaatgtttcaaagacatgaccagcccctaaaaagtctaccaaaataaatctccaaaaaggaacatcaaaaaaccctatatactatttcgaatagcccccgcggccagggcaaagtcagattgtcttcgcgaattgaaaagtgcagtgaaagggatgtttaaaaaacaacagacaacaacaattcaaaaggcctgctgcaattcaggattggacgccactagacgggttagaggactccgctctagacagtcgcgctactgtctcccagtaaaggtcatgaatggccttcataccgtgtatgaggtttgtctgttgagcgtaattggcctccaacagctgattctccttcttcaagctctaaatctgaagcttggcctcggtaagcttggccagaagggtgtcattagcgttgcgcaagtcacgattgtcagttttgacttgctctagctcagtcaccagtgtgccagcctcgtgggcaatcctcttagccaacaaggccacctgtctaaataagctgaagtgaaaaagctaaatgtcagaacggtggtcagaatctaataaaagaatgaaaggggcaaaagaatatattgaggccttaccccgaccgcctgggcgaagacatccacgatgctgcatgacgcccaagtctccttaggcaactctaaagcaatccaggccacttgattcaggtgtttgatggcaaagggggcagcctctctccctaccttgaaagcgaggcacttttctaaggcctccacctccacggtccttccagcagagggcaaggtgtacaggccatccaagatttcagcctttcgcactgccgagagcacagtggcccgtttacaaatttgtaccttctctgcctcctagcgctcctttagtgccatgttcacttccctctccttctacatatcaagaggattaaatggaatggtcttccttcagaaggtgaaccctacggagggtatttttggaatggtagaagggtagtacgaccgtggctggcccagcctcaatggtggatcatggcgctgggggtgggcccatgtttcaaaagtagttatctcaagccattgcctttttctgtcaagggtactgtcgcatgccgctttagaagaactgtcctctccatcgcagacctaatgtacctgccagacattagtacaaaaacaaaataggtcagcataacgcaggatcccaggactctcaaacaccgtaggcacgatgccaatattcccaagtagatagtcgcacacaacatgcaccatcacaactcccaaagaacgctacatcaagtaagtcgtgataaaagaaaacttctcggttgttaagaggaaatggggtgggtgatcttgatgttgcgtcttagctagcaaagtgtgtgcctgggtatggaattaagaagatggctttataagacaaaagaaatggatgaaaccaaatgctataactctagtacgacaggcagtaaagaatgttaagtgaaaaatggatgctgaaagtatttattgggtaccaggaaagggtgccttccacgagaagcgaatggtttgactcgttcacctaagggacatccgacgattgaatgagtgagaagttatgaaggtgtgtcgactcccaacggttggcctccatcattgcatgcatcgtgagaagtgctcaacaaatggaaagtctcctcaaatctaattgcccctattttttggcatcccacagaacacgcacccagcacgcgcgcaaaacttaaaagttagcatttaaagccctgacaaaaaaataaaggagatgataccttctaatagtgacacttcatttgatggctaatgacgtgatgtaataaatagttcgtatttatcgcacgtgccagggagtcacttaggaggagatactacaagctctcggaccatggtacgcccaggaagcttgggggtaaatgttatccgtattttcgtaatcatgacacgtggattttaatcaagaaaggctaagaggccattaactgaccaactttctcaactaatgctctaggaggataaaaaccccaacttcgctggaagagcttccgtgatagggagttccttgactgctagcaacacggagggtatccgtgtcccgaagtctttccaattctaggaaccaaagccatcttctcccgagaggagtatgggttttccttgaagggccaagacattttgaaaaacgtcgaaccaggctacactcttagctcggggaggctctgcctatacgtctcggactacggacctagtgaccagactttatcaggtacgacatcagaggtaatctctcacgacacgctatcatacagagcatgtgtgtccttatgtacctcatcaaatgatccaacagttagggataaggggaattcaaaaaggaaaagccttgggacgatacgcgtaggaggtttagctcgtacgatttggcacccttaaatgccatatgagaaaaataccacctaccaatccaatggttggatttggcccaagtatgatcccttcatgccagcacaagaagataagttggcctaaaaatgcccctgaaaagctcaagggaaaaagagaactttttgcagagtgagaagactccttttttctgagagaagactcattctttgccattttcgggcaaacacatttgtattacacctaaaaaattctaaaaatattcctacttagcttcctcttcttcaagaggaacacgggagaaaggagtttcagtccattgtatctctacttgtataaacagttaccggtagatgagcctaatagactcatggactaagaatcgttaacgcatgaaccacgtaaaaatctcttatttgttattctattatttacattaccttttctttcttaatatttaaaaatatttagttaccgaaaaattcggtaaacacaaaatattttaagaatataagaatacttagttaaatttaacagtgttagtagggttagttttataaatatacataaatattgatattaattattttaaattaacttaaatatatatataaatattaatattatctgttttaggttaattgaacttatatttattttagattaatttaaatatatatataaatataaatatattatttataatattattattatttttattaatatatgttcaattttaatatttttaaactttacatttattttctttaaatttttaagactctattatttaaaataaaataaaaaattaataagtagttttcttttaatatataaaactttaaaaatacacataaaaaaataaaaaattaaaaatataattaagtatggaacacttcttaatgggtattacccatgantggttactaaacaaatttaactata

SEQ ID NO: 28478 - DNA, 2269 bp, Cannabis sativa
ctcaaaacattcgcagtggccgactaaagctttcgccttcgccaggcttgagagctaatgctgccttaaccttccttggatgtctgagatctgtaatttgatcttcttctttgttgttaatttttccataacatttgctgtggtctaataattgcttagtttttattgttaatttcaatgatgataactctaaggcttgtttctcaaaacattcgcagtggccgtctaaagctttcgccttcgccaggcttgagagctaatgctgccctaaccttccttggatgtctgagatctgaacttagttcttctcctttgttatttctttattataatttcgattggtatttagttcttgtgtcatattttgacggaggatctctgcgaagaaatcctttacaatacgggagcaaacatgttatgtttgtatatttccttagttaacgtcaaatatcaatatcaacattgtgatggttttcctttttggatttcctccgttttgatttgtctcatattccatcaccttgtagagcggctttgctgccattactactttggacttgccatgggccttacattttgctattaagtttttatctttttctatttgctactgtttttgtatgtattacgacagtttcattaatttgctttgatgttttacatgtatatatatattgcccatgatgatatcaatcatcaattaccatctttcgggactgaatggctctttttggccttgctgttaatatgcaattctgaggcattttcattaatttttatttctttatagtgctaagttgtacaaacttttacagtaccaatgaggatatcatttaccaattaacaccatctttcgggactgaaatggctttttaagccttgatgttatattctgcaattctgaggtacttagtgtgtcataatgatttttttttttcaaaattttaagctttgcaaacaggttttactgtttttcaaagttctaacaatgacttttctgtatgtttatatcagggagtttgttgactgtactaagttttggcagctgtttagatttcagtttgataattctattattatgggtttatatattttgtttttgttgcaggatcgcttcatcttccgatcatcccatcagtgtgttgttgttgatggcctgagagttattcatgattgtagactgtaatttatactatttattttgtaacttttttgtcaaatttcaaaattttcttagaaatttatatagattaatgtctatataaatttctgagaaatttctcagtgaataaaaagtgtactagttgagatatctttactgtagtaacatatctcatttaagagtaataatgtgcgttcatttatataatataggttcttctattacctcagtgtaaattatatttgtacaacattttttcttatttaaatgatgaataatttttattttgaaattaaacattatcttaatcaaattaacttttcttgctaccaaaaatgtagtaaataattacatttattagttggattataaatgtgtatggtaaacaatcaaaaaatagctttttaagagcttaaagcgtaaagttatagttgctgcaatttaactttatattcaatttcccactgaaaagtgtttttgttatacactggtctggtaaacgttttcatctgttagaaacattttcaagaaagatttctaattgttaatttacaattgtttgtgaataattaatttagatattatataaataaatagtcaatataataaattttagaaaattctactgatatgctgatgtatttttatttattttagtatctacaataattttttagttaatttttttttatattgtaaaatttaaaaatttaaatagtcaatataatttttttagtatctattttttttatatttttatcaatttttttttagttaaatttaatttatatttagtgtctacaattgcgtttaacctgatatttataaggtattcatgaaaaagaattagactggtattcatgaaaaagaattagactaaaaaatttaaaaggtacatttaaaaggatacattatagaatcactcataaatttttattcttaaattttgattataatttaggaaaaattattggatatatacatggtgaaaaactttttcggaaactgaaataggtgagggggcgactagtttcggaactagaaaatcttgaattctatttggagcaagtggtgttaatttgtaaattttctttattaaaaatatat

SEQ ID NO: 28479 - DNA, 1989 bp, Cannabis sativa
ttttggggctatggaggctggcccggaagagcctccagtggggccatgaagattctatcttggaactgccgtggtctcgggaataccacgacagttcgacatttggcagccctcgttcgccaccacaatcccgacgagatagtgttgatttcagaaactcatctaactgaagatagatttgtaagaacttgttccaaacttaaatttgctaatttccattatgttccccttttgggatactcgggtgggtttggaatttgttggttgcagggagtcgactgcaccatccgtgactctaataagaataacatctcctgtgtcatctcctccgaccctcctgggaacccgtggcacttactaggcatgtatggcccccctcataattctgataaagaagccttttggctcaaagttggagacttcacgctcaattgccaggaccctcttcttatgattggcgatatgaatggtacgttaaaagactctgaatgtttcaactatgccaatcaaggtaactcttcccgttacgcttttgatttttgtcagatggttaatcgggtggggttagttgacttgggattccaagggcctggttatacatggtctaaaggtagaaacagatcgtcccaaggtgggggtgttaagagggctagattggatcgtgggcttgcttccattgagtggcgtatcctgtttcctaattctattgttcatcatctggctgcttcgggttcggatcaccgccccattctccttgacacctcggggggagtgaatggcagagggcgttcgtttaaatatgagaatatgtgggctcgagatcctcgttgtttttgggttgttaaagaagcttggtcaaaatgtctccatgccaattagatgatcaatttctacagaaaggttaaagccacaagtagaaaactcaaacagtggaacaaatctcaattctgtcacctcaaaaactaggttcaagaggccacaactaagctgaggttcaccgaaagtcatcaccccgataatgccatggagattgaagctgctaagaataaactctcggaagcacttcttagagaagagattcattggaaacaaaaatcgagagtccaatggatggccgaaggggataagtgcaccaagttctttatggcttccacgattgtaaggagacgaaggaactttattcaaagtattaaaccaagccctggggaagattggatcagtgacccgaataaaattgcatcttgctttcttaggaagtttgaagatctattcaaaaagaactcaagctgtgatccttccatacttgccactttattccaatctgagatctcagacctagatagcaagttacttaatgctatccccgacagggatgagatcacttcagcccttgcagaaatgagtaaagataaagctccaggccccgattgcctacccccaagttttttcagtcatcattgggatacggtgcacgctgacttgatcgagatggtcattcacttcttcagaacttgtgaactcccaaagttcataaacgacacttcctttgttcttgtgccgaagaaggatggccctgcttttaccaatgactatagacccattgtgctatgcaatgtggcctataagatcatctccaagacaattgctaacagattgagaggcttcctacctcaaattatatcccgaaccaggccgctttcgtaaaaggaagacatattgcggaaaatacgatgattgctagggaaaattgtgcactctatgaaccgaagaagagggaagaggggctttatgatgatcaagatcgacatggagaaggcctatgacaaattggattgggacttcattctctcggtgttacttcatttttgcttgcctgataagtttgttcaatggatcaagctattacttaatggggctacggtgggacaattcaaacctgaaagaggccttagacaaggagaccccttgtcgccctccctctttattatg

SEQ ID NO: 28480 - DNA, 1852 bp, Cannabis sativa
  modified_base (831)..(832): a, c, t, g, unknown or other
tttgtagaaccaaaataatgaattgaaagagacaaatggaattttatcttggaattaaccaataaattgatcaaaaatcacaaaacattcgtatgtatgttaagatttaaattgtaggagctagattcagtagtcaataatttaagaagaataaaagaaatgataaattttacagaggttcaagaagaagaaattctttataaattaaacaaataccacattttcttgataaaaagttaaatcaacacaaacctaactatgaagtagagtagagtagaggagaggagagaagtgtctcactatgaagagtactattagagtgagtaatgtaaacttagtaagccaacttccgttacaatttccctcgccttctaatttcatgtcccaaatatgattgctaagttaacaccaaaggtaagaaagtgttatttatgaaatttatttgcattgttattaggtaactatggtgaacaatattttataaattatgtgggactccataattgtgcagtccgttgctaattattgggtttgttagaaaaacgtgattaattaaaactttactcaattaacctttaaatgaaaataaataatctttacataatcaggatcacgtatttaaaatatttacaattgtattgcaatatattagttacaaaatttcccgcttagcgattattgaaaatatagtctgttgtctcgaagatcgtacgcttcaagtctaaccgtcccgacatgtacaatcttcatgtgctcgcatcgcacgcacgcgctgctcagccttagccttgcccttacctacatatataaacaataactgtgagtcgacannctcagtaagaaaagtataatcatatcataaacataaattgaattataattaggtgcccatacacccaatcgtaatcctatcccgtgtcccacgcgtagtgagtctagaacgttcatacgacagtactattgaccataatatcaacctatactcggtactctagtcgtactgatgtgatagcctcaatcagtatttaagccaaacatacaatcatcggtatccaatataactctatgtatactaatacctctatctcagtatgttatctaataggcattcataaatatgaatgctaaacatgtaatcacatatgcatattattatattaatcttacttcgatcccgaactcaggtgtgtcggtggaactactgcttgacggtttattggcccctaagtcacaatatttataaaactaataagtgacacgctaaatcacttttcgaggacttaaaatcataaattaaagtttcccaatcaatggttaacatggcaataccctaaatatcgttaaaacatgaaaatctagggtgtttaaaattgccacaaccggtaaactagatcccaactggaaaatcagtttctatggattctgcctggggggaatcgatagaccggttctacagggtaaaactgaaccggtcgacggttcagtgtagaaaaccctaaaaacttcacacctgattcaattcaaccccaaattgattcaaaccttctagaccaccgaatacgggcacaccaaacataattcatgcaatcaaactaagcaataccctctgaaagtgaaatcaccatagaagagcaaagtttgagctctaaagctcaaacttttgaaaagctcaaactttgttcaaacacaacaataaccaatcaagcttaaaccaacttagacatcatcaaattaacaccagaaaacaaaaccaaactcaaacaacttctacagcaacctagttcaaaaaatgcatggaaacctaaattccaacactaagaaattcaaagaagacacagagagagagagagag

SEQ ID NO: 28481 - DNA, 1610 bp, Cannabis sativa
taaaaaagtaaaaaataccgccgggcagtatttttgtaagaaaattgcaaaagttagtataccatgtaaatttccctattagtatgtattaataggctaaataaatggatcatctataactctattaaaagagagaatgttgtttttgggctttcttaaagtaaatgacaaaaatgtcattgattttcttgattaattactattaaatatacaataaagtgagtatgtagttatgggccaaattatagggcttcgatgaaataaataataataaagtaaaaacttattaataaataataatacattacaaagtaaagtcaacattgagagagaaaatatgggttatagtattacctgtagtaatgaaaattattcatataaaataagattaaagctttaaacttaaatgaaagtgggacaactgactttttgttccatgcaattttgaatataacaattaatatgtataaattaagttggctaattatttattttaatttttattatttcataatatgcctgcacttttaaatgtaaatacttatttactttctattttttaatacacaaattatattttatttcacttctttaattagccaacttaattatattttatttcaattatttcttctcatatattattttatttcacttctcaaaaatctcacgtgcgaagcacgaagattatactagtcacaacataagaatgataatttataattagtcacaattttgttacttttatagccaaaagttttgtcgtgactaaaaataaaaaattttgtagtgaattggtattaagagctaggggtctagtgaagagtgtgatatgtatttgacacttgattttctgattatttgtggtctctctacattgtttatacattttgataatcgtgatgagtagatattttattttaaaagctaactttgcaagaatttttattaaaccaaggatgtccttttgatattattagttgttttcctattaggctttataagctcatcccctattttctcccattctagaaacttagtttgatgctagtggatgaggatggtaccgttgaagaagaaagtcattattagtttcatcttattttactttattaaacttctaatgaaactaattttgtatttaaactggaatggacggtctgaatgagttaaattagctaagtgttacttaaaaatgaaaaatgatggatgctagatattattttggtattttattaagttattaaatttctctattcggtgactacttaactttgggaatattttgttcttttatattaataagtggtcttgattttattactaatattttttattaatataggagttaatccattttttttaaattagtcttctttgatatatataaatttaaggatcatttataagtgttatttttaaacaatagtcaaagtgtgatcttttaactaccgatattacatatttgtcacggcctatgacacacaatatatttatatatttaatataaattaatgcatgttctatatatatatatataactaagtatgtatcattacgtaaattaattaacactgatgagagagagggaaatagagatatagtcttgc

SEQ ID NO: 28482 - DNA, 4683 bp, Cannabis sativa
  modified_base (1442)..(1442): a, c, t, g, unknown or other
acactactttccatatcacgaggtccttcggtgtgatgtactcaagtacccatcgtactatataaatagtactcaattttgcactcaagcccgtgataaagctagaaaaacacaaaatagcggtgttaaggtagttgctaagactttccaaatatcttattcaaatgtctttttacggtgtaattcaagaaatttggtaattagattataatactttttgaatccctatttttctttgtgattgggttaggagtgataatggggttaaagatgatgaaatcgagttcaagttagtagacttgaatcgaattggacacaagtctaataggtttataatggtgtcccaagccagtcaagtgttttacatgagtgatcaattagatgcatgctagtcagttgtcgtaacgatgcaaccaaaagattatgataatcaagagtctaatggcaatgatctcatgcttagttaccaaattcatcaaattactccaccacctgttgatgtaatcgttggagatgatatcatatcatctcgtgatgatggtaaaggattatagttgaacgaatctatcaatacatgattcatatatcaaacacgtattggtatttagtctttttgatatatttatatttagctattaattttcatatttttgtatattctaatgtatgattttaaatttgtgtggggacgatgagtgaagtgcttgattagattatgatggtgatgatggtccatccgtgccaaaaggatctagtcttgatcctaaacaaccatccattgaagaagaaggtagcggtgatcctgaccaaccaacacagaaaaatataagcaggagaagcaaacgaagcgatataacaaaaatggttagcaagggaaaaaagttggaggttgagtacaataactacaaacaaaactggggaaagagagcgacaacaaaagttacccaaattgaagcatggatgtgacttaatgttccactttgagacatatcgtggattagagtgagtgaggacattaaatctaattgtgggattacataaaggtaaaaataattttattattcaagttctttactattgattataatttgtacttataattaggattatcaattagacaggccgcgttcgatgtaccgaacacaaataggaaattaaccaattcaaaaggtggagagaggtggaaagattagaaaaataccctaacagaaggtatttttacattcaaatatgtggtttcccatattctcgacaagccacccaaacttcatgaaaaaataattgatttgcaacaatggagagagtttgtagctacaagattaagtctagaatttgaggtgaggaggaaaaagatccaaaagagtagggcttgtaatatttacaaccattgcaccggacaaggtggtgtaaggatggttcaagaacaaatggagaaagagacnggccaccaaattactgaatttgatagatctaaaaactaaaaaagactttacatgaacatgaaaggcgaggtggagggcccaactgcagaaatcgttaaacggaatgtaagtttaaagtttaacttcatttttattaattgttatgcttcataatttatttttaactctagttgttatgtttataggacgaattttgtaagcaagtggaagagggtgttgtaaaagtggaaggtaaaagggatgtgttgaccatggcactggggacagatgagcatggtggctgggttcgagctatgggtttcggtgcaactcaaatcaaatatttcaacaaaccacgccctaaaaggaaaaaagctaataggtcaaactaggcatcatctgatttggagagacgcgtgtgtgagacagaggaaagctacaggacaaaggggatgacctcatttgtcttattagttcctagcatagtaacattgtatctggtttcggtgttggaggagcatcaaatgaataaccccatgttgaccttgtctccgatccagtagaaaaaccaccgggttctgccaatgtctatactccactagatcccatagcacaactgtaggttgctgccaatgtctctactccatcaccactgcattttagaaaggattttgctccagcaatagcaccgccacctactgatggtagttcagaagaagtaatcttaatgttattttatgaattgatctaatgtaaatttataaatatggtctactgacaaattgaattgttgcttatttaatttggatttgcagaccttaccgtgttggatgcactgtctattggaacctagtgggatggtactaaaggttgcttcgagccacattgtgaaggagaaatatttgaaagagaaaattttccattgacaatgattaatacctacacaaagattatcatcaggtatttatcgaagaagtcaatgtgaagaatacactgctcctgtgtcccatacccaaagattcattgacaacagtaggtcaagctataaaatgttatgtagcatggtcaaaagactatgttacacctgttggaaaacacttggtatgtttcaatctatttacttaacttattgtgtttatttattaatgaaattgctaactttactgttttatccatatatatagatacagccacccactaagaaacttcagaagcaacccatgaagagaagcaaaaaagcctctaaagatttactcgatcctccaaaaagcctctaaaggcaataggccatggtcattatgtccaaccacgccaaacttcctcaatcattaccttttggaactccatcaaaaggtggcccaagtcgtctataatccaattctaggttggttatgagctatttggggtcaaagatgactctatttggcttcttaaaagtgacattcaggaattgtgcactatgcaatacgtgggagcccaacaaatagaagtttggtgcaagtatgatttctaactctttataacaaacttgataatgttcttttgacagcgacgattaataattatgactttttatcaggtacatgaaagaaagattattgaacatcaacgggctgaatcgagtatataaatttctaaatttgagtgcgattgccaccgatgcaggggctgataataatcgatgtcaagcatcagtcactcgaatgactaggatgacttatttaaacaaatggcttattgccccatataataatcaatatatgtagatttaaaataaataattttaatatttacaactcttcataaaatttattattatgtatatattaacagttttacacatatttgttcgtgcaggaagatgtttcactagatgcttgtactcatccagccaagtatgcagacggtggcatacttggattcaggcaacggcgacatatcgaatgatttgaacttcattatactcacgtaagttctatatctaacatcccaatatgtatgcatgttctatatttataaatttataaatgctaattaactttactttttgtgtagatcattcaccatatataatcaaatgataggacggtctcatcgacctatcccctggatgactcttatttttcctgaacaactggacaacaaacaacatggatactatgtcatgaaattcattgaaagtttcatgactatagaagattcaatacaagtgttgacccaatatgataggttctccactgcgtacaaaaatgatgagataaatgttatgcatgatcagtgggttcattaggggaaagcagaagcggagttacaatagttgtcgtgttaatcagtgtgtatgtatcttgatttattattactatatagatttgtaaatatctttacatgattataattagcgttaagttaattataaaattttaaatatatttagatgatattagcattagtttaattattatgactatacagaattttaaatatatttagataatattagcgttagtttaattattgtgactaaatagatttgtaaaaaatttaaaaattaatgtatggaaaaattgcaaaaaatctatttttttccaatgtaacgattgaaaaaaaaatcttcattgaaaaaactaaaaaatgtaaccagttctataaggcacggtttaaaagcatcgcttataatagggtataggcgacagtttaaaactgtcaggaagtccacattggcgacggttttgaactgttgcctattctgcccattttgtgacagtcatataagcaacggttatgaaaactgataggaatactttaaacgactgtttaaaaccgtcaagaaaaacaatttttgtagtagtgtgtgcctagaagtagggccttagctttctgaaagccaagagcaaactgtaagtcagcttctccatgagtgggtaccgactttcagcgtcgattagtctcttgtcgttgtagtatacagggtgttgtacattgtcttcttctcttgtgaggacaacactcacagcatgttataggactgttaggtacatgcctagctcttcattgtctaagggtttggacaacgtaggtggttgagccagctgtttctttagctcttggaatgtgttttcacattcctctatccactcgaatttttattgcctctaagtatgttgatgaagggtacacatttatgttgggattttatgccctaaataaagcccatttcaatataatctgatttgttatcaatgaaagattagaagtcatttat

SEQ ID NO: 28483 - DNA, 1349 bp, Cannabis sativa
tgtgctaagaaatttttaagttttagtgcctataattttttattatttttataatatagctgatttagttataagtgtaaaagtaaataaacataatataataatatttaaatatttgtgtattataaatatattatttatatacatgaggtaaaataaaaaaaaaaaataaagttttaatgagatattttgaacaataaaatagaaaaacttgtgttgggagtacttttacaagtatagttaataattttttttaagaaaattactccattactattgttttttaactttttttcaaatttacattttgagtttttaaagtagtttctccggtagtttctgtgtcggttgctatacgatttttagttgcgatttagattactccgctaggaatttctatgtaaaatttcgtaaaaatacaaaaaaaaaatattatgttgaagtataaaaataaaaaagccattttctttattattattaaattaaaatatatggaactcatacaatatgtaattcttaagatatattatcataagtgtttttaagaaattatcatattaaaaaaaatattattattaggtaccaataatatagtataacatattttaagaataatttataatttttttataataattatcaatttaaaatatgtgagacttaatattaaaatgtgaaagtaacactctactacctttactattaggataagcaacaaataacatgaaaatgttaacaacttattaatcactacttatcatgtggtgatgaatagcttaaggtgtccaattcctaacaacactttattatatagaataccatttataattatgctaagtaccaccacaccttaataaagccaaatcaacaatttattaaagagaaagtgaaatgctaaaagatatcaatcgtgtttagtatatcttaatatgttaatattattattggtgtaattaagtataagatcttatctaatttagagcattagtattgagcactagtgatgcttaacaatttttataggtagcaccctatgattagttagcgatactctttaaaaactattttcttaattaagttatataaaactcgataattaattcaactaatagcagtataacactgcaaatggtgttagacatcaataataccttttagcaattctctataacttaatgtaataactttatcgctaaaaattacaatgtgacatatatagaaagtgttagacattattcgtgttcaatgttaaagggcaactacggtacttaacattcttatgagatataatattaatattagcacaatttaatattaaatatgacttattttattttaataaaaatgat

SEQ ID NO: 28484 - DNA, 1402 bp, Cannabis sativa
  modified_base (554)..(560): a, c, t, g, unknown or other
acatagtcttatgatttagggccatttactatatttttttaaaaagaggacataaactaacatacttctataatttggagctatttactataatttccctatttttaatgggtcatatgtaattatatttgtcataaaaattaatatatgatatatttggtacaatatttatcataatgtactccaatacaaaatttgaaaatttgatacgaaaataaatttttcattagtattaatttaatatttattgaaaacaatattaaaaaaagtcaccatttatccatattttattggtggtactaccgagtttgacataacatttgcacacactattggatttggagcaatgtaaatttttctaaaaatgagacatattttaagaaggcatcactgattcaaaacacaattaatgctctaataataatatttgttcctataattgtatgtaaatataagagaaatattaaaaggcatccgtagtgcctagcaccttgctacgtgtcaatattattattgatcaaactaagtatctcccatataatttaatataatannnnnnngggagtatcgctagctaatcgtaatgcgacatatcgagaaagtactaggcaccactagtatctaataacaatgctctaaatataaatatgcatatatcgtgctacaatacaatgtgatatatcgtgctacaatacaatgtgatgtgccaccatgttattcatgcgggaaattggatgataaattgactgatctaacgtctaatatttaaagccacacctgccaatcaagttaattttgtttcacatcccaaatataaaagccaaccagcttcaactatcaacatctccaaactaaataaatgggattattttacaaatacataaaaataacaaaatttacaaaaatggttgtatagaattttaaatatttttacaattcttatgattttatttacagaaaatacaattttttgtattgtactattattaatttattgattttttgtaacctgtatgttattttttgttgttgttttgatgttattttcttgttgtttttatgaaaaatcgtaaaaaaatataaaataaacttttataaacgtaaaaatataattttctacaaaaaaaaaagaataatgttttatgtaattatcctattgcgttgaaaaacccaccaacctgtagtataccactcagggccaacccaagcatatgacaacttgagtgattgcacaagaccttctatattttgagaacttgaaatttgatgttgtttctattgattattgggattaagagtttgatttttcatacgggaactaaagttttcattttcgtttcattgattgaaaaatattagtaaaaagtttatagaatgtgaattttgaatatatgaaaatata

SEQ ID NO: 28485 - DNA, 3873 bp, Cannabis sativa
taagtattgatataaaatttatatatgttcgaaattggtttttaaatttagtattgtttgtagaagtttagttattagacattgtgtatttttcattattttattaatgaaattgtattttttttgcctcttttaatgaaataattagtttcttttaatattgatgaaactggtttttaatgttagtatcgtttttagattatagtttttttcattattttgttgatgaaactattttttttttatttttttaaataaaattattagtttctttcaatgttgatgaaatttgtttttaaagtttttattatttttaaattattacttttatattgttttttttaagatgatgttaataaaactgagttttttttattttagtaatttaaaaaaaaaaataaaaaaaaatacaaatctaaagtttttttatgtcgttcctctttatatgcagatatatgcagaggccaatgagggggagtttgaaaagtttggcttccgcgttttgcatgagttttgtaagcataatcagagtgcacggtttgattgattacctttctttcaccgagctgaaagagttcatggacttctgcacagcctaagaatcaaacatacatgcatgtataaaaagaagaatatacgcatgaatatttgaatcttatcataaattattgacatctgccgtaatattttaggaaaatcaattataaatttaaaaaataatgatattccccaatattttttacattgtttatggttggagtattatgggatgggctggagataccttttttaaggtttttgtattcacaactgacagaaaagaaagagacaaatgggaatgaaaaacacgtgtgtagtacccttttcatgggaccagaattcgccgaatggtatagaaattatttctttactagtgtaaaagattgaaatttgaaactacacgtctttacagtaagcaagatcttgttttatcttaatgtgagttatcccacgcctcaaattaataatgtatttgtacttcgtagtgatccctgcattatatttttattataagaaaagtcgttcagtgaagatggtcagggttgacccattcgatgccgttttaataaacgaaaaaaacaccaacactacacagcctcacttcgagttggacatatgtatatatatatctaatcctgaaactaaaatcacttataataagagagaaaagactgagtcagaccaaagagaggtaataataaagcgagaaaattaatggaggagactacacacagtcacagatggtctcttgatggaatgactgctcttgtgactgggggcaccagtggaattgggtaagaactaagaagctcttttccatcttcttttattttgatttcaagtatttttatacaataataatatgtgatatttaagttatgttgtggctgttgtatcattgttattaggtacgctatagtggaggaattgtgtggactaggggcaatcgtacatacttgcacttttaacgaagctcagctgagtgaatgcttgagtacttgggagagtaagggatttagagtcactggttcggtctgtgatttgttgaacccatcacagcgcgaagagctaattcttaaggtctcttctttgtttgatggaaaactcaacatccttgtaagtggcctaactatgtctaactccaaggttttctaataaatttaattatgcaaaaaatctaatcattattaggagaaaatttttattagtagagtcaaattctgtagttcgtagggaaatgattccgtattttaaacttggaaaaattatttatttattatatatataagtgtgtgtattttagttatattaatttttgagaaattctatacaaataaacatggtttaatctgttgaacatgcgaaacaagcacataccaagtacctatttgaatcatgtaagaattaaataattttttgatactggtgaaagatcgaatataaataagctatatgctttcataattgtcattataatttgttcactctttattaattatcaagggcgaaagcatgttttttcttatagattaaaagaactcattacatatgttatattaataacaaatatatatgcatacattaattcttttagtttcatttctttcttaataattttcttgtttctcttggtagataaataatgtaggaacgacctatataaaaccaacactggagtacacagctaaagatgtgtcatttctgatgggcactaattttgaagctgcgtacaatatttcccaacttgctcatcctcttctcaaagcttcagggattgggagcattgtgtttgtggcctcagtggctggagttttagcagtaaatgttggatccttatatggtgcagctaaaggtattgaattctctttgttgagtacttagattaagaaccaaattagaaaagaaacaataacaataaattcataaagatagacttatgtaaattgcaggagctattattcagttgaccaaaaacttggcatgtgagtgggcaaaggataacataagaatcaatgctgtggcgccttggttcatcagaaccccacttgttgaacctgtaatactcttttttatacgttaaatactatctttgtttgtaggattaacccataatagtattaataattattattattattttaattttatgtttttctttgtaatgataaactagcagaaagtacataaatttcatacatttattgtgtttctattgcagttattttctgaaggatttacaaaagaagtgaatgcgagaactcctcttgggagaattggagagccaaaggaggtgtcatctgcggtggcatttctatgcatgcctgcagcctcttatataactgggcagactgttggtgttgatggaggaatggcagtgaatggaggattattttcttgaaaacaatcaaggcaaattaattaaaataagtttttctatttgatatggggagcttaaataaatctttatcttgtcttgtcttgttatgataatttgtttgaaaaataattatctacgccaattagaccatcttaataaactctaaggtacattttgtgttacttagatcctatgaatgtaatggttggaatataataccttagctgaaactatatatgtttgttagttgatttgtttctttgcttcatgttttgtttggatattttaattgatgagtaaattgaataatctgttaagaaatcaagtcaatcaacccacaaaatatgagaattgagatatcttttcattaggacaattgattataatccattttatttatatcctgatttcttttaattatatagctatgtcttaaataggcatttattagagtatataggatttgatttagaatttaagttgtattgtatatatatttatcgaaagttcaataaaatacatatcaatccttactgatttttcatggtaccagagcaaccatgatcctaaattctatattttccacatacaagaaatcttcttcttgctgatacacatggcaggaaaagatgaaatccaaaattcatcaaaatctgaagctaataagtttgatgatcctaatgatcccatttatctccatcattctgattatattgggttgtacttgtttgtcacacaatcaataaatgaagaaaactactggacatggagtcgtgccattatcatggctcttaaaatatcaaacacaaagaaagctttgtcaatggagctatcaaacaacccctcaagacttccaccacaaaatttcaacagtggaaacattgcaacaaccttgtaaaagcttggagcatgtttggtattgttttctgttttttgttttaaaaaattgtttttag

SEQ ID NO: 28486 - DNA, 2488 bp, Cannabis sativa
actaatggaaaaactaaattagtttcaacatataaacacgatcacagcattaaacttaattaaggaatgaactccttataattctaaccccaaaaaaaacattaaataaatttaaacttataatagtaaattactaaatgaaaacaaaaatctgaaactgagaacgtcgttgagccgaaccgaaccactctcagacaaacaactgttcttgaacccctcattattattaaaagtaattaaagatattcaatcatattttgattttcattattcttgtaattttggtcgatcggtaggccaatcaagtttacagacttctaagttttttatagcataaccataatttaatttgatataattttacggtacataacttttcatatattgataaattaaagaaaaaaaatgaatattttttttatgaatgttcctatattgtatttatcataaaacaatatataacaaatttaaaaaattgaccaatttttgcttcaattggaagtgtctgcgcaccatgttaattagaactgtattgtctaattaagataaagttggatattcttctcaaattattatatataaaaataattaaaaaaaaacgtaaaaaatgattaagattacttaattaattagttgttacatattaactttggacagattatatatccagtgttaaatatatcagcaactaaaattaattacataaaataactgttcaaaaaaactgtgaaactttgtttttgtttacatcgagattctacttatataaattatacattttaatatgatatatataaaaaaaaaaaaaaattattgcatggcatattatttaatatttttatggagacgactttctaattattgataaactacctgacttctcaattaatattataattattcttatgttcctagctctgtgattatatatatatatatatagctatataattatgattaattatatagaggaaatgactaatttcctacagtaaatttttttacattttttttaacataattaaaattttcacattttagtgttaaaagtaattgctcgggacaacttccttaacacacggaatattattttttttattatattttattttttggttaatgtgatacatgtccctttctcttggtttatgaaaatcacaatgataacttaatataatagattattaatataattatgtgaatatttattcataatttcataaataattttaaccttaatataacatatttttatgttataaactaattagaattaaatatcagttttttaaactaatatatatttttaattataacaaaaacattatttttatttatatattaaggagaaatttaatttttttaattcatattgtatgttaaaaataagaacttaaacctaagttgctcaatattagtagtataggcacattgtatacctcaaattttctcagtctttctctttttcccatcagctcgttctctctttctctttttttggttctcaccaaacttctcgtcgaacatcgatgaccaccacccacgtctctctctctctctctctctctctggtgcatgaccgacgacccacgacaaccacagtcgaacggacagacgaacaatttgtggtttctttgtattttttgtttattgttttttgtaagaaattgagttttgatgaaatttgtatttttaatttgtgattttttttatatggtacgatagtagtgcaatctggaagttagggatgaaaattcgataatagtacgacagttaataaaggtacgatatggtgtgatagtagccagataagtgcttaaaatttatgccataaaagaaaaaagaaagtgagtgaaatttttaatataaaaaaataatttggggagatatagaaaataaacctacattactagtagtaatttaatttttgtttagataattttttttctaatgtaatcatactttatcaaacttgtcatattaaagtaaattgtttgcatggccttttatatgtctagatagggctacttaagtaattttaagatttgtataaatttagattatatttgctaattgctagttttgtgtcagctgtaagcactaatcagaatgatgcttattttaaatgtaattaatttttaattaaatttacatattatacatttcatggattaattttactatatatatagtacaaaccccaataacatgcaatccacagtttggacaatgcatatgctgacacgtgtccatgacttggtcggtcaattataaaaaaaaacccaaactcacaagcacatgataggcaccgactctgtttggttacagtgatatctttttctctaatccaatttatataattaataataattatgtattacctatacatacaacacgtggctaattaggtcatcaaaggcaataacttaagggacaaaaattgtacaatcaatgctgttttttttaaaaaataaaatcaagtcaaaaa

SEQ ID NO: 28487 - DNA, 1762 bp, Cannabis sativa
accatgtaacataaaatgatttatgatcttttattaattagtaaatttgattattttgaaatgtgttttgtttagtgcacaaaacccaaccgtcgatctatatttataaagtcaataaaaaaagtattttctttttatgaataataaataaaaaaaatcttatatataatgaactgttttccgtgattttattattaattaccttcacaataaattttaaattttgtattttattcatcattatattaacatgaattaaggaacctaataattttttgatataattatttttaaaaatcgtccatatattaatcgagtaagtatgtattatgtatacaagtcttcaagcgtatgacctgttcatttagttgttttccacttttttaaatttaaatttacttgtgatcttgatagttctttataataatacaactaaaaagaaagtatgataagatatataatgagagtcaaaaattagaaaattaagaaagaaaaaaaagtagaaaatcttgtcgtatgacatgttggtaaaagttctctcaagtttttaaggttgttttgttgtcttttgttcttcatggcttctagtagtcacgattcttttgatttgaatgagcagtatgctcagattagtttggaagatgaggaagcaggagtcttgattggtggagatgatgagggtgacgagacgatttttgacgatcggtggtgcttggtggggaaatttcttacaggaagagcggtggattttgatgcaatgcggcatttgatggcttcactttggcagccgggtaagggtgtttttatcaaagagttgggtacgaacagatatctttttcagtttttccatgagttggatgtccaaactgttatagacggcagcccatggacgttcaatagatgtcctcttgtttttcatcgactgagaaagggagaagatcctaaggaggtggcgttacacaagattgatttctgggttcagattcatgatctgaaatccggtatatgttggaaaaagtggttcggagtgcgggtgcctatattggtacgtatgttaaatctgatccaaagaattttaatggcatttggcgagaatacttgcgtgttcgtactacggtagatattgaaaaaccattgaagaggaggatgaaactctgtaaagagaatggggattggatttgggctaattttaaatatgaacatcttcctaccttttgttttgtttgtggaataattgggcattcggaaagattttgtccaaaacgttttgatcaacctatagaacaattggtcaaaccgtatggtgcagctttgcgtgcggatacgaagaagaagaattacttagttggtgcacagtggcttcggactgggaatgatggtggcggagcagctgcaagccgtggtggtgggcgctcgaatagtgccggtcatggagttaatgctgtcccaaaaatcatggatgttgattgtgttgaccatgttggtgatcatgatcccatgagtttaggaaagtataaaatgaaagagattattaaggaaagtgggaggggtaatggacaatctggtattgagggggattcacaattcatggcttctgatgatgatattaataatgaggagcatttggttatgttaatggaaagtaagaggaggcgtactgggcgggtgggaattcctattagtgtggagggggttcagctatgttggttagtggggttgttggtgttaatgggtcaaaaaacgattcactggtgggccatgg

SEQ ID NO: 28488 - DNA, 1977 bp, Cannabis sativa
aattgggcttcgtaaaggcttgaattactgtgaggcaatcagtttcaagtattacattcatccattgtcacgccttgatccaacttagtgcctcacgaattcccattgcttcggttgttacaggaggaaaatggccttggaaagtcttcatgcaaccctccattaataatcctcgagtgtcccgagccaccaatccaatcccaacttgttgagggtccgaaaacaaagcagcatccatattaaccttaactctaccgacagttggggcaacccaatgctcaaccgcatcttctggtagaaaaccaaataaagtggtctcaattactgttttttgagcattttgccaatgattaaggaagttttttgctgacgaaactatgctatccactcccacaattttaccttgccacaccttatcgttccttgcattccacacagaccaacacacagccacaagcatttcttttttctccttgtctgcctgttgaaacacctccatgcaccaaaccagaaaacttgaaatctggtgtgtacccgtgcctattccagtccgttccgaacaagcagcagcagccagacattcaaccaaaacatgtataatggattcttcagcacaagagcaaaccagacacaaagatgcaacctcaacatgctttgaccgaagctgaagcatcgtgggaagacagtccgtacatgctctccaaaccagatttttcatcttggggggactttcagacaccagaaatttttccaaaatttgttcaccactatctcttctaaatcagcaacaccattaagacttgtaattgcttataagcactcctaaccgtgaacagacccgatgtctccattgaccaagacaagcagtccattattgttgaaggttggagaggaatttggatgataaggtctcggtctctaggctcaaacaagtcactcaacaactcaacatcccactccttaccatccatagtcaacaagttttctactctaacattcacaagacctggatgggaagacataaccattggattaacattgtcaggtaaccaaggctcccctaacaccagacttttactaccatttccaacaatccatctaacaccactagccaccagcttttgagcttcaagaatactttgccaaacatagctcggattaggtcctagagatgcagaaagaaaagagccattaggatagtatctagctttgaaaacccgagcaactaacgagttagtgttaacacataaccgccagccttgtttccccaagagcgccaaattaaaatcctttaaattccaaaatcccattcctccctttgatttgtgatggcaaagtcttttccaagacatccaatgaatacccgatttagtagaagatgaagattgccagcaatatctagccattaaactctccatttccttagttatttttgttggaagcaaaaagacattcatggcataacttggtaatgattgagcaaccaccttgataagcacttctttgcccgctcgagaaataaacttggttccccaactttgcaatttctttctaatcttttccttcaaataacccaaggtagccgtcttattccgactcatggagctagggaggcctagataaagacttccttcaggagcaattcccatttccatggtcatacaaagatcatgtcgtaagttctcctctacattagagttgagaggcaaaattaacttttgacccgaaaccaattcaaatttttggagaatttcctttatacgaagagcttcaactttggtggctttacaatacaaataactgtcgtctacaaacagtatatgagaaaaccttggcgctctatttgcaactttgcacccatgtattcaatccctttgctcatatttacgaagtaaagctgagaggccctccgcaaaaagaataaagaggtatggtgagagggggtccccttgccgaatccctcttgacagaacaatc

SEQ ID NO: 28489 - DNA, 2549 bp, Cannabis sativa
  modified_base (1974)..(1987): a, c, t, g, unknown or other
aaaaagaaaagctctgccttatgaactctctctctggtctcttcaaattcaatacaaaatcatagaagaaatggtaagaaatttaatttatatgaataccaatatcttatttttgaatgtttgtttttctaaacaataatttatgtttttttgagtatcattttctgggtctttagctcttttctctgtttttcttttcatttctgataagaaccttttgatattccatataatttatttatgctaattactcttttttatggcttattagaaagaaaaaaaacatagctttcatcattaaaaaatggtatttttactttattagaatttatgatatttctattgatttttctttttttcttcaaaaaattctgacaaccccatatgcttaataatgtttttaaacaaatttctcaaatgggttttttgaattacataaaatcatcatttgggtagataaatttttccatattgaattgtaaaaaagaatacttttttcattttggtactaattgttttgatatgggatttgtttgatttcagattggatgcaatttagtgataaagaaaaagaagaagaaaacagattggctcaacactctattgagactaaaattctttgatacatgtgttcatcatgaagaatacagaaaaaatgagaagaatttattctgtatagactgtaatattgggttttgcaggcactgtgtaacatctcattgtctccatagaaggcttcagatctgcaaatatgtttatcataatgttgttcgtcttcaagacattcaaaaacaccttgattgttctaaaattcaggttataatctaatctctctctttgtttttagcccaatttgatgtgacttgtttttgttcataaaaattcccaagtattatattggtgtgagtgagtgatttggttgagaaaatataatttgtgtgatctatgttacctcatcaaatcattcaattttatttttttaatttttgccttttaggtagtggatgacagtctcattttgtcaaataataatgacagtcaaagaaaaacagtacattttttctgtgaatcttgttattttttgatgttgttggtgtgatatattatgaactatttgagcattgttattgagcatcagtagcagtatgataccgagaagaatgttagtccccactcgaactatttatatcctatatgccctacttgtttgtattcaataattttgaccattattgtaaaagtgtttttaacttttttcaaacttcttaaactaagttaattttttgtgttttaattttcagacatataaaatcaatggtgaaaaagctgttcatctaaatccaaggcctcaatccaaagatgctaaaccatcaactaaatctctttgtgctggttcatgtgaagcttgtaatagatatatacaagatcctcctaatagattttgctcaatttcatgtaaggtaagaaaaaacattatatcaaatctctctcatatattcactcacttaaatcattcttatatcaaattgttcaaaattgatactaatttgtaacctttttcttttcttttgcagatcacaatagttccattgaagcctaaagagagtagcaatttcataacatatgaagatttgtcatgcaaagaaaaatcaattaactcagaaacaatgttgagtgaaattgaatcatctttatcattggctgaatcatctgaagaaattcaaccttgttgggttaattcatcattgaagccaagaaaattgctgcacaagaggaaaggcatcccatttagagctcctctctactaaaaaaaattaaaaataaaaccaaataatgaaacttttcccatcatactttgatttgtcacctttttttttttattattattattatattttttttttcacattattggtttacattttggtatttaagaaaaaaaaaaccacagttaaattattattattattattnnnnnnnnnnnnnntattattattattattatctatttaatgatgaaaaaaaatcaatctcaaggagacccccattttggaatttagttggggttagttgaggacttgagagatattgtctgatgtgagttctttgatgttgtacagcataaaaaagaggaaatggtaatggtggaagcaagctttttgggtccataataatcaaccaaattagctttatataattatttgttaatttttattaataataattattgttatctcttgtggggttcacttgaacaatttattatacttacttttcaatatttgttgatttagatattcttttaataaaataaccttttttatcactaaataaatatactataattacgccgaatagattttgttctgcttaggtatccattctttttcctcttattaccatcgttaaattaataatttaagttgatcgaacataaagtatattaaaataaagagaacttactctatatactattttttgactttctttttttaaatttaaagtttgaattatttcgatagttatttttccaataatttttatatgta

SEQ ID NO: 28490 - DNA, 2523 bp, Cannabis sativa
acataatccatgcaataaaacaccacaacacatctagaatcacaaaccaccattagagagcaaagcttgagttcataaactcaaaccttgctcaaccatcaaagcaacacataaaaccagttcaattcaacaaaaataaccttaatctaacctcagaaggaaaattcaaacaaccttaaaagctacagaaccctaactcacaaaatcatgcaaaaaccttaacttaaaacttaagaaatccaagggaaaaggttctagaggggttacaattaattggaaacaccaagaacttgctagattatccagaaatgaagctaaagattccaaaaccttgctgcttctagggtgctcgagaaagagatagagttggagagagaatggctaagtgaaaatgtgatgtttttgatttcttatctatttggataaaatgaataaaataattgtatttctaacttaatcaaataaaaaataatcagattattaactctacataatccaacaaaaggacaacggatcaaaaagtctaaaaagaccattctacccctcactaaaccaaaaagcttctaagtcacttaggggtattttggtcatttctaaacctcaaataattcttgacattcccaatatctaactcaattgcctcgctactactaaaatactaaaatgtgattctattggccaaatgccatgttctaatattgtcgggcataaaacaagcaaaaatgcaaaattccatatatggcataaataatacaccctgaattcaaataaatctccataaaattattaagcataagtaatattctagtttcataattaagccctaattatctgctaatttacaagttaaaattaagcagtctttataattatctgcctgttaaaaggatttcatcctcaaaatctaacctgaataactcttgatactgagtcctcatgtcggcctctaactcctaggtggattcctccaccttatggttcctccagagtaccttgaccaaagctataatcttgttccgaaggactttatcttttctatccaagatctgaattggtcgttcttcgtatgataaatttgattaaagttccaggttctcataactcaacacatgagtggggtctgaaatgtatttctataacatagaaacatgaaacatgttgtgaactgctgaaagtgctggaggtaaagccagtcaatatgccaccaatccaaccttctcgagaatctcgaaaggtgctgtaaacctagggcataacttgctccctttttcggaatgtctgatccccttcattggagacacctgtaggaatacatgatctcttacttgaaattctacatttctgcgcttcggatctgcataactcttttgcctactctaagaggcaagcattctggccttaatcttttctatggcttcattagtccgttgcactgattccagacctaggtatttcttttctccagtttcatcctagtgaataggagatctacacttctggccatacaacatctcgcaagggccatccatatagtactctggtaactgttgttgtaggaaaactctatcaatggcaggtacttgctctaggatccttcaaaatccatcacacaggctcgtaacatgtcttccagtatctgaattgtcctttcagactgtccatcagtctgatgatggaaagttgtactgaatttcaatttggtacccatagcctgctgaagactctacgagaattttgaagtaaactttggagctctatccgatataatggaccttagagtgccatgtaatcttactatctctttcacataaagctctgcatactgatccactgtaaaggttgtttttaccagtagaaaatgagcagacttcgtaaattgatctaccaaaacccaaattgaatcgtacattcacgtggttctaagtaaacccaccatgaaatccatagtgacatcctcacacttccactcaggaagtgtaagtggctgcaataatcctgctggtctttgatgttcagccttaatctactgacaagttaagcaccgggatacaagttccacatctttcttcatcccgcaccaccagtagtagggtctaagatcttggtacatcttggtagtgccatgatgcaatgaatatggacttgtatgagcttcctcgagaatctcatttctaagttctgcaccacttggagctaaaaccctggtcttatacaacagcatcccgctatcagacaccataaaatctttagcttgaccagcaaaacctcttcttgaatcttcactaattccgaatcagttaattgagcaactttaatttattccaaaatatcaaattgcaatgtcaagttatgaagttttcctacaacaaactcaatgcctgatacgaccatgtcatatgctaactgaggtaaaatcttaatcatactagttacttcccaaggacccttcctgcttagggcatcagccaccacattggccttcccgggatagtaaaggatttcacagtcataatccttaaccaa

SEQ ID NO: 28491 - DNA, 5972 bp, Cannabis sativa
aacatacgagttgataacgtgtgaaaaagtcacacacacatacactaatatatgaatggaaaaaataagaataattcaaacatcttgggtatagccaaaattagaaagaaatattgttgttatatatgcaactatagattagattagattagtttcacgtgtaatctgtttaggcatcgtaatctccaatatcttggcctaatttccacataaaggaagtcgaagatattgtttagttgacaccacttgacacttaattattaataccacattaatgggtatttcgatgcaacaaattaatatagacttgtatacaagatgattagcacttaagagttaaatatataataatataactaagacgagctagtgttatgagtttttctgaaataatatatatatttagcaacctacaaatggacagacaatgactacagaaataatataaataaacacaatagagaatttagaaaatattgatcaatgaaaaagggtggaacatgataatgttttttgttttttaataaataaatgtgtaaaggcgttttctttttgctgcgtcttattgtttggacaatgaaacaaaaatgacccttaaaactttgaagggacatattattaatttaataaggctcttccacgttacagtacgtatatatctttcaaaattcaatatatatatatatataatatatataatttctgttctcttcatatatgcctagttggaagaacatcatgatatggttggtgtattctccatgttaaaatgatcaccaccgcctttcatcacaaaagaataatttagattaaacaattatctaaaaatatggtaaagcttcaagaaatatttagaaaacaattgctataaaattctagagtagtacttctaaacctcctagatgatactagctttattgggccgtccattgccatgtaattgtgctatacggtaatgttggttgggactatctataatacgaccttgggtcatttatagtgtgtacacaaagtgtgttgttataagttttggtgtaattaattttaagttaataaagtaattatgttttttacatattgtgttgttcaacaagtgttatcagaggctagtcgagttagtttatatcaagggttatttgttgaatttcttagtgtagtcgtgtgtacttaagtactacaaagtttgtttcataatcaagctttcttggtaaaattaaaattttaatcaagacacgatagatgaccttcaagtggtcggtaaaattaagaaacttaactaccaaaattacaacgcgtaatcaatgcttatggacgcatatctctaaggccaagactttgtgagagattgttggtggcaatgaagtcacacaaccagagaatgcaaccgctttgaagaaatagaataaagcgagcaaagccatgtttgcgatttagaccacagttgaagatgaaatattggagcacatcaggccagggaagacaccgaaggaggtgtgggatactttctcatcactgttcaacaagaataatgatatgagactgcagcttctggagaatgagcttctctcaatcaagtagcgtgacatgacgaccaatcaatacttcaccaaggtaaaatcactttgtcatgaaatttgtgcattagattctattgttggtatgtcagatgctagaattagaagaataattattcatggattaaagctagaatttagaactttttattactgcaatatcaagaagcgttaaattagaaacttgctagctgaccaagaagtattagctataagcaaacatctggagtctcattaaagagtgacaaagaacactctttagtagtgataagaaaggttagccttgaccgaatgctagtagaaattctagaaaatatgatgacaaggatagtcatcatgaaagctcccaaatagggaaagctcagaagaaagacaaacggggtgaaaaactaaagaataacaataaatttaatggaaaatactacaattgtggaaagtatggccacatggataaaagttgctgggtcaagaagaaaaatgtagaaggaattgcagcaacgtcaaatccagaaaacacaagtgatgaagaatggaacgcaaaagcatcatttgcagtggatgaataaaaattagctctagcagctactaaacatggaattatcaactacaataatgattggatagttgactctggatggtcaaatcatatgacaggagaccaagagaagatgcaagacatgatcaagtacaaaggtggtcacatagtggtgacagccaacaactcaagatttctgatcactcacattgataaaacaacaatgatgttgagatttagtctgaaagaagtttcactccaggatgtctaccgtgtactaggaatgagtaaaagtttagtatgagtggcgcaacttatgacgtcatgccaccatgtcgtatttggtcctcaacatgtcaagatctaccaggatcttcaaatctctagaacaccgatgatgagaggacaactttagaatctgtctatgtaatgtcagcaaaatcaacttatgcagacaagattcgaaagaaagaaacaacaaatttatggcataaaaggctaggacatgtcaattatcacaaactcaaggtgatggtgaagaagtttatactaaagggtcttcctcaactcaaggttagaacatagattgtatgtgctgccaaccaatatggtaaggcgcatcaattaacgtataaagattcaatgttcaaagctaaagcaccagtggagctggtctattctaacgtgttttggtgagtcaagcaaccatcaatcagcggcgtgagatacatggttacattcattgatgacttctcaaggtatgtatgggttttgtttataaaagaaaaatctaaaactttttcaaaatttaaagaatccaaagaaatagcagaaggaaaagtcggtaagaaaatttaaagcctttgaatatacaacaacggaaaatataccttaggtgaattttttaagtggaattctgcatacgccatcaatttacatgcgtaatacaccccaacaaaatagagtagctgagagaaagaatcaataccttatagagacatgtcgaagcatgctacattcacaaaatgttctaggtaaattttgggcagaaggaatgaaaacaacaactaatatcgtcaataaacttccttaagaaaagttatggttcatttcaccctttgagaaactgtggggctataaacctgcagtaagccacttccgagtatttggctgtgtgtgctatctatacgtgccaagatacctacatagaaaatttgataagaaggtgatacgttatatctttgtgggatatgacagccaaaggaaaggatgaaatattgcgaccctacaactagaaagtgctatacatcaagaaatgtggtatatgatgagggatcattatggtggtcacctcaaaaggaagagttaccgaattctaaggaaatagaagaaaatttgcaaaaggagatgggagagtaaattgttgacgtacatcgaagtctagaaactgatgatggggatcaaagtaaaactttcaaggatgaggcagcagaaaatccatggcaaacaggtgtacatcaagacagataactagaagagtaagcctaaaacttcaaagatcaataagagcacggaagccaaatcccaaatatgttgatgatgatgcagctgaagaggagaagttcaaagagcttgattatatgaggaggcatatcataactttaagtggcttgaagctatgaaagaagaaataaatgctctagagaagaattaaacttgggagctggtgccaaagtcaaagcaagtaaaactcattttgcggaaatgggtataaaaggtaaaaaaaaaactcttcctaatggttcaattgaaagatacaaggctcagttagtagctcaaacattctcttcgaatgggagctgcgatgaacatgaatttaagggagagaaggacagttgggccgaggaagtagagcgtgaggattttatgtcaaactcacaacaataatggaagaaatttactgaaagtaagtctctaatctgagaagcttaacttacatgtactaaacccattctgaaagatgggataaaaatagctcaagttgatgttgatgaggttcaaaaacaagctgctaattggaatttagcagttgtgtgtatggttttaggggatagcccccaattaaagtgttcgagagttttatcaaacgtaaatcggggaatcttagagttacttagattgtgaggatgaatggtggttataccattatcaaattcaatgatgttttgactgaagatcatgtcttggaggaggggattttgtaattcgatcgaaagcctgtaataattcgaccatagacgatagattttacagccttaaggttggttaaatcagttctactttggatatgattacatgatcttaggctttattactggggaaataaatgtcggctcagtgcaattgtgagtactattgggaaacatatttcaacagataaggttacaagggagagatctatggttaaatttgcaagggttctagttgagatggagataacagataagccactgagggttattcattttttgaatgaacatggccaacttattgagcaggaggttgagtatgaatggctctcagtgagatgcaaagcttgtcaaggctatggtcatataatggcagactgtaggaaagcttaaaaggtccctagagataagactaagaagatgtttgaggcgagagtgtgattgtaggaatagggaaggtggatgttatggagagtcgttcagagtgtgtaaaggaggttactgatacaatggagcagaatggaaacaacgaagaagtagaggaggtattagaacatagtaatgaagctactggtatagctgtagtaagagggagcaaagatttgaaaaagctagaaagtaggagttggaaaactcctaaaaaatccttacattctaagaaatgggaaacttcacgtatataattctaatcatcctaatacttttgagattctacattcacaatagggggtttttaagctgagattggtactaaaatatctttacatggatagcattaacatacttagttggaatgttagaggcctcaacaatgtaaaaaaataagaggttgcggtggatttgtgtcagattgggaagattagtttaggtgccttattagagactaagatgaggagaaataaagttgatgtttctatagcttctaatttaagtggctggaattattattctagtcctgtcatagaaggtcgaatgttagtcatttaaaaaattaagtttgtcaagatcttgatcttggaggaatcaagtcaatttgctcactgtctcgttaagaagcttcgtctcaataaagagttttgtgctacttttgtatatggttctaactctcatgaggagagaaagaacctttggattgggttgtctaattaagctccagatgtcagttaaatcctggattattttaggagattttaatgcaatttttaagtttggtgtcgaaagctgagactgaagatgctactaattggattgccttgggtttggttgatgctctgcatataacaggttatttcattacttgatcaaacaacgaagatgccaaagatcgaatcttctctagaattgatcatgtcctcaaaaataaagagtggttagacacatttcctaactcctctgctaatatgagtttggaaactttatctgaccactgttcttgtgtggcctgttttgcaaaagctattgatattggcatcaaacccttcaagttttttaatttctaggttgattacaaggattacaagcaataggtggttaaaagttggaacaaacctcttagaggcacagggttgaaagctattttcctaaagtgtttgagacttaaaacattgtttaagg

SEQ ID NO: 28492 - DNA, 5479 bp, Cannabis sativa
tattttaatggatatttagtttgttattaaaaaatccttagtttgtcagttacaaatcttttttaaataaatttgatatgtgaatatcagttacaaatttaaaagattaggtatatacataataaagtttatcattatgttataatattttttctaagatatttttgtaattaagtacatattattgtataagtgtgttaaatctcctataatatatgtaatttactgctcataatctgtgataactaacacatccttaatattctctattgtccatatcatttccttggtattctacctactaaacatagcctaaagaatgagagtattataagtgaataacgctttggcattgaagttgtcacacccttccatgttgtgatgtattttttttttttgttatttatgatttttgctctcacatatatattattgtgttcacttgtccattaaaaatagtttctaaactatttatagtgttgtaaattagttattttgtcacaaacgacaaataaaataataacattgatacatttagttaaaacgtcgttattatactatcttgtttactctgttttctgtttcttttccaactattttctgttatgttggttaagtgtttgtataatcaactatataaataaagaggtttttcctcagtatattcaactgagcattttgtacaattctctgtttctctctctctttctatcttacatggtatcggagcttctttgacctgcgtctatggcttcttccggcgacaactcgtctcctgttgcagtcaccgatcctcaaccttaggcaccatcagcttctgctactcaacaatggattcctttctcaaattccttaacctcttcactcaccatcaagctcgacagagccaattttcttgcttggaaatcccaagttgttcctacggtaattggtcacgatctcgacgagatcttgttcagcaatgttgctcctccccaaactctcctcaatggcaccacaaactctgcctatcttcaatggcatcgaaaagaccaactactgctatcttggctttgctcttcattgactgaagggattcttggcactctttccagttacaatacatcttatgctgtttggaaatctcttgaacagaaattctcaagtcagtccaaagctagattacttcaactcaaagcacaactcaccaactctcttaaaggtaatctcagcatctctgactacattgataaaatcaaatccatctgtgattctttagacattgctggccattctctcactgatcttgatttaattcttcacattctcaatggactcggaccggagtttgaccccgtggtctccagcattacttctcgaagtgaaaccctctctcttgaagaggtccaagctcttctcatgtcgcttgagactcgtcttgagcgccataactctgtgatggatctttccaccaaaatgacagcgaacctaacctttgggtcaagaattgcaccttatcgaccaccatttgctcaaggcagagggtccactactgaacctcattcaagaatgcctcctcgagcaaatactcgccccaacaataacaactacagtcggcctctttgccaactttgcctcaaatatggccacactgcccccacatgtcactatctctttgatagaaactgggtcactccaaggacttctgcctctcaaccccaagttcatttgacagaacaccaacctacaattgattctcaagatcatgtctctcaatttctccctgactttggagatgatgctggttggtatgtcgatattggtgctactaatcatgtagcttttgatgtggacactcttgacactgcagcaccgtatactggtcaagaatctgttgcagttggcgatggtaagacattgctcatatctcatgttggtaaagccactctcccctctaaatcttctcatcccgtacacttaaactcagttctatatgttccttctatcactaaaaatctggtaagtgtttcaaagttaacaaaagataatgatgtgtttttggaatttcataaatcttgttgctttgtcaaggacaaacaaacaggtgctgtcctactcaagggaaagctcaaagattacttgtaactcttaggagatgacagttcaagtttgtccaagcattcattacagtgccacctagccaccaccacttcttctcagtcgattgatttctgtaacaactatcaagattgtaccaatagttgtaataaaactgctactctgcagtttctcattgtactcctcatttaatatcaataaaaatgagcatttctttaatactttgtctcctacagttttcaacactactttgaataatgatataaatgtgtggcacagtaaattaggtcaccctgcccctgctgttttatccaaagttctttcccaaaacaacatagctcattcaatcaaaaatctcaaattttgcaatgcctgccaaataggaaaaagtcataaacttccatttcccttatcctcaaaaacagcttcccaaccacttgagctaatacacactgacttatgggggccatctcatgttgtatctaaagaaaactataagtattatatcttgtttcttgatgactatagcaggttttcttggatatttctacttactctcaaatcccaagcttttgaagtcttcattagattcaaaagtttggttgagaaacagtttaatctgcctattaaaagtgtgcaagatgatgaagggggtgagtataggcctttctaaaagtttctaagggatcaagggatcaaatttcaactatcatgtccacatacacatgagcaaaatggacgggttgagaggaaacatagaaatgtaacagaaaccggtttaactatgcttgctcactcaggattgcacatgagctactagtggcatgccttccaatgtgctgtatattcaataaatcgtcttcctacttctgtgcttaatcatatcagcccctatgaaagtctctttcatcaacaacctgaaacaagatcctatagccttttggatgtggatgctttcctcatttgagaccttactctcatcacaaaatggattatagatctgaagaatgcatctttcttggctattcttcaaagcacaaaggatatctttgtgaaaatgctgctggtcgtgtttatgttgctcaaaatgttgtgtttcatgaaactcattttcctgcattttccaactccagcactacacatgtacaatctaatgactctattaaatttccaattgctcagttttttaccaacaccactgatcatgctactttccctactgtgcctgtcactgtgcctgaggaaaacaaccccaatactgtccctgctgctgttgcagaacaaattccagttgctgcatctccatctgtttctagtatgcacactgctacaacatcttgtgcaactgctgcagtatcaaccttgcctgctcctcagactacagcatctgctattgctgcagattctcatgatagcagtgttgcccctagtgagtctcatgctgcaatcactcaagttgttgcaccacaaaggacacatccaatgacaacaaggtctcaaagtggtatccgaaagccaaaagcttacttggccactagacatcaactgcctgagtcactctttcctagtgaaccaaaaactttgaaagatgctcttgctgatccagcttggaataaagctatgaatactgaagttactgctcttaaatccaatggcacttggacccttgttccctatgagcctcatatgcatctcataggcaataaatgggtacattagataaaattgaaggtagatggtagtgttgacaggctgaaatcgaggctagttgctaagggttacttacaagcacctgggatagactatgatgaaacatttagccctgtagttaagcttgtaacaattcggatggttcttactctagctgtcagttttaattgggaagttcggcaactagatgtgtcaaatgcttttctaaatggtcttcttcaagagactgtttatatgacacaacctcaagggtttgaggatccatccaaacctcatcatgtatgtcatctacacaaagccatatatcgccttaagcaggccctagagcttggaatgacaagcttagacatactctagttggatggggattcacagcttccaaggccgactcttcactcttcatttttggtgctggacaggacttaatcatcttcctcgtctatgttggcgatatattggttactggccccaatacttcactaatcaccaagctcatctctaatttgaacaagtcctttgaactgaaagatttaggccaaatacactacttcctcgaggttgaaattcatagaaattcagatggtatgtatttgtcccaaagtaaatacattaccgatttactagttcaagttcagctagagggtgcaaaaccatataccagtcccaccaacctctcaaaagctctctctctctccgaaggcactgcttttgaaaatcctactctttataggagtaccttaggtgctcttcaatacatgactctcacacggccggatgttgcctttataataaacaagctttctcaatttatacatgcccctacaaatatccattgggaagcttgtaaaaggcttctcggatatctcaaaggcacgatctctgaaggtcttctgttgaaaccagtttccagactatctcttgaaacctattctgatgctgactgggcgagttgtattgatgacagacgatctacaggtggatatgcagtatttcttggctccaatcttgtctcctggtctgctaaaaagcaacaggttgttgctcgatcttcaacagaatcagagtttcgtgcattagctaatgcagtagcagaagtgaagtggcttctctcattactttctgaactacatgttcccttacaagacattctaatcatttgggttgataatcaaggcgtagcagcccttgcagctaatcccatttttcatactcgctgcaaacacattgaaatcgatctccactttgttcgtgatcaaatcctcgacaatgagatttctgtacgatatgtgccaagtgttgatcaagtagctgatattcttaccaagcctctccctaaagacagatttcaatatctaaagagcaaactcaaagttgttcaaaccccttttcgtttgaggggggatgatatagttagttaaaacgtcgttattatactgtcttatttactctgttttctgtttcttttccaactgttttctgttatgttggttaagtgtttgtataatcaactatataaataaagaggcttttcctcagtatattcaactgaggcttttgtacaattctctgtttctctctctctctctctctttctatctcacaaacatgactgctaaatcagtttccacgtagtactatgtcaaagtcgcttgtaattaatttgaaaaaataa

SEQ ID NO: 28493 - DNA, 2066 bp, Cannabis sativa
tgagaatttgtatacaaatactcttgtattaagtaaataaatgaaccctttttcagtaaaagaaaattgtcgttgtagtctatttttcttgtattgtgttcttgtttcttggttaaaaagagtttttgaacaacaaataaatttgttgatgagtaaatagcgagttcaaatttagctttgaaaggagttcgaaacttttaatgaataagattgttcaaccatagctcaagtgatcatgaaattaaatattaaattatgcagtgtaatatctatataaatgctttaataaaaaaattaaaaaaaattgtttagaataatatataaacgcttaaataaaaaaaaaaaaacatcacttgtgattaaaattctcatttctatgaacaatttttccgcatcatgaataatttgaattaactcatatttgtattacttagtttgtgttctaagtaagtcttaggttttataatactagaagtgaattttctagagattgattttcgaattgcatgtaacattttgtaaaatcattatcttgaaatgtttgaatattcgagtagcaaagttataaaatcaaacaagctcaagaaatatactaagacaagaattgaactttaaataattagccaaaagagaatcagacacaggcaatgcaatgaaacacccaaaattgacaggaaaaccaaagatcttaattatgagttgtaacaagctcatattcaaaatatcaaaataaagagtacttaagagattattagcatatgaaaactgagtgaaaagagatcaagataacaacatgagaaaagaaaatacatattcaatgcctactatacattacaagtgtactacttcaacaaatgagtaaccaaaaactgcattaaaacttttcactaagaagtataaactcattattttcattaaaacaaaacacttttttataaaaaaagtaacgagatggtaatctatcagtaaccaaaatgttatttttgaaaatccagaaaaactcttgtttcttgtatgattgtgttttcagttttcagtttttaaaagtgagaataaaaaacagtttttgtcattttaaaaatttaatggtgtttggcacaaatttttaaaaactgttttaagattttttcttacgaaaaaaatcaatattgtagcaccataccatgacattaatccatccgggtctaggttcgggtatgatttcgggtctaggatccgagtatgtgagcaaaatataaaatataatatgttagacaaaataaaattgtgtttgaaaattgaaaacaacattttaatgttttctattttttagttttttaaaactcaatttttaaaaatttttgtcaaacgattcctaatagcttttaaaaactgtttttagttttaaaaaacacaaaacagtttttaaactgtaaagccaaacaacctcatatagtgttttcatttttttagcctaaactcaaaataatattcatattttatttttgaaaacactcaactattcaagaatttatatatggaccccactattttaattttcaaaaacataaaacagttttcaatttttaaactaatcacacccttattttttcaaaagaaaataaaaaatcatagtggtatattcattatagttacaacatcatccccataaatttttttaaaaaattaaatagtttaccgtgccgaaaataagtttaaaaatttttgaacacgagtgggatactagaatatcaagagctctatttttggtactgtaaactattcggatttttttaaaaatttacatggatgatattgtaactataacgaatactgtcatgaaaaaaatttgaaaaaagattccgacatatgattttgaacgttaaaagtaactaaaaattataataagaagtaataattaacactcatctattattgaataatttaatatgaagcatatagcaatgttcaaaagaaaaagacattaccataacctatggatttttatttttttcatttttttaaatagaaaatgaaggggacaatgttaaggagttgtttagctcaataatatatataaatatata

SEQ ID NO: 28494 - DNA, 2286 bp, Cannabis sativa
ttttaccagaagtattggactgtggttggaactgatgtgatcaagctggttcgattttattttggtacgtctactcttcctgagagcttgaatgacattaatttggtgattcctaagaagtcaaatccagtttgtttgtctgatttgagaccaattgcgttatgcaatgtggtgtttaaagtgatatcaaaagtcatggaaaacagattgaaaagcattttgggttccattatttctaatactcaaagtgcctttgtacctggaagactcattagagataaaatcatggtgtcttacgaaataatgcagtacttaaaaagaaagacgatgggaaaagtgggtcaaatggctgtgaagttagatatgtcaaaagcctatgacagggtggaatgggggttcttagaagccatgctacacaagatgggcttccacagtcattggatatctttggtgatggaatctgttcgttcagtgaagtattggattcaatcaagtggacattcgttgggacctatcattccgtctcgggttatcagacagggggatcctctttctcgctatcagtttatcctgtgagcggaaggcttgtctgctttgattcaaaattttgaaaatagaggctggattatagggtgccgtgttggtagaggagctccatcaatctcacatatgttcttcgccaatgatagttatctttattgtcgtgttttggagaacgaagctcaacatattgtgaagctgttaaactactttgagaggacatcgggtcaaaaggtgaatctattgaagtcttccatatttttcagcaaaaacacagaagatttggtaaagaacaacatatgcgcgatccttggcataccagaagcgagtgagcagtgcacatatttgggcttgccaaacactatgagcagaaataagaatgccattctcgaatttttaaaagataagatgcagaagagaattgagggttgggataacgagctcctttctcatgctgggaaggaggttctcattaagactgtagctcaatcccttcctaattatgcaagagtgtttttctgttaaccaaaggaatgtgtgaagaaatggagcatatgatgtgtaacttttggtggcaaacttccaataaacgcactaagggaactcattggatgagttgggatcgtttgtgtgtctccaaagatcggggggccttggatttcgtaagcccagagacttcaacatagctctcttgggtaaacaaggttggaggctgctgtcaagcccccagtcactggttggtcatctttatatggcgtagtttattggaagcaaagaaccttgtcaaatttgggtgtcgggttgtaataggacctggtgtgggagtgagcattttaaaagatccgtggctgccgaatagagctaatccctatataacaacggtgggtcaggctattgttgacaaaaatgttgattcacatgattttgggtgacaataagtgggatgaggaactggtgagggacatctttaacacaagatatgctaaaataatattaagtatacctttattctcctctgctggttttgataaatggcattggtgttttgataagtcaggggattattctgttagtattgccaataattttttgcaagattagaaaaaagagcatttcagtgatgctaaaactcaattctggaaaaggttttggaaaattaaaatgccaccataatcactgaatcttgtgtggagagccttgaccaactgcttaccaacaagagtgcagcttattacaaaacttattagtgtgcagctgacttgtcctagatgttcaaatacagctgaaactgctattcactcactggtcttttgttcactggcttcatgctgcttgtatgttgctaatttgtcgactggtgctggtgcagaatagataatgggcagctggtttatggatgcggctgttagatggagcgatgaagattttagtttggcgataatgcttcgctgggctatatggcaagcccttaataatcaagtgtggaaaggtatttctaggccaactcgttatattttggcattagccaaaggtaatcttaatcaatggcgttatgctcaggataaaaattttgttccctctcaaatcaacttgaaaccgaatgacgggggggggctaagctatggactaaaccgttaggtaacaagattaagatcaatgttggtgccgctattttcgagagccaaaactgttatggtttcggttgggttgctagaaataatgaaggaagattgttatgggcaagag

SEQ ID NO: 28495 - DNA, 2351 bp, Cannabis sativa
aattaagtatcgagtcccatataatttaatataataacttttaaggaatatcgtcggccaatcgcaagacgacatgtctagaggaggtgctaggcactactgatgtccaatagcaatgctcatataatatcttttagagagtatcgctacctaatcacaagacgatatgtctataagtgctagacaccactaatacacattaataatactctaaattttaatgtcaaattacaaaacttatgtagtttgggacgaaatggacaaatgttaaaaaatttactttttcttttgtttatatgacaaatagaagagaaatcaatgtgcaattaaatatcacgtcaatatgctattggagttatgctctaaataaattgtaccataaagtattagaattctaggaaacctactttatttgatttttcatttctcttatactcattgtactactctattcatttgaactcatttataggagtaatgatagtagcacccacaaatgtgattggtttaaaatattaacataaataagaatctcattattttatatttagaccaagggtttgtttggaccgaaaataatgtgatcttccttgatttccattattgttctcattgtcattcttattatttttattattatatctctttccacttccacccatatcactaccaagacacatgacacatgtcactcaaaacctacacacagttaatctcaacaaacatttcttttatcaaacttaacaaaaacaaattactctactaatatagtacaccgaacactgaacatagaattcaacgttaaccgaacaacaaaacagttggcatatacaaaccgtgacacgtggcagttacccactagtctcatctcatccttttctgtctttagctaaggaaaaattcataagatgctcctagaatgtcttcctaagattccacgatctaataccaaaacccctctcttctctcggctctttgatgatgagtagtaaaagataggagagaagataaggaagaagctaaaaatggctgctttctctctccaatctccttctttctctccaaactgcaataaattcagaacccaccaacatggccacccaacaagacctctgtccctaaccttaccacgttctcgagttatatgttcctcaatcaattccaaggacgatactcttggtggcgataacttctccaggtttagtttggttaaaacttgtctccctaagccttattttgaagaattttgttttgggcttaattgtaatgtttttatttttcagtaatttttgcatcatagaaggaccagagacagttcaggattttgttcaaatgcaattacaggaaattcaggaaaatattaagagccggcggaacaagatttttcttcttatggaagaggtcaatattaaatctaacactttcatttcatttgatttttttcttcgaaatacatcaatgtattagtattgtttacttaattttggtaattttgtgtgatgatttattaggtgaggagattaagagtacaacagcggattaagagcatcaatgaaattgatgaggaagacattgaagaggcatatgagatgcctgatattccttcctccattccctttctccctgatgtggtgagtttagtggaattggcttattctgcttaataataagcttgaattaatttatatttttgggatatttgcagcataactacgaaaagttttaagtttataattggaaggaacccgttaattttttaggtgcaaaactaacttaagctctttttaatagtgtattaataaaaaaaggtaattaggatttttgtccctgaatgtattaaatcatgtccctgaactttcaaggtcgttaaagatctttaagaactattgagattgttaaatttaagaatttttttctaactttagtatgaaaagtttaacattgatgaaagtgtagggggcttgatttaatacatgttaaagtttgaggggcatgatagtagatatcaatgtctagggagcatgatttagttcatagataatcacaaaattagtaaaattgaataaatttggacaaatatccttaaattcaacaatatcaatagttcagagaaaatttttaacagaaaaaaaaaaaaattcaaagagcatgatatggtacatgtcaaagttcgggagtaaaaatcttaattagcctaataaaaaatatgtattaatcgtgttcttatacgtgtgtggacaaactcataaacaaaacctgttaggagaaaattagacagaattacacttttaatactattggggagaaaagaaaccaataggtccctactggttataaacccaaaaaatttg

SEQ ID NO: 28496 - DNA, 2137 bp, Cannabis sativa
aaataataataataataatatattattgtagataatattttagtgctcggattataattaactattctcacgttatgtaccacacaattctcaatactaactatagtagctagcctatggagtgggagtaaagtcatgttgtggtaaattttagagatattttataacctaattaattaatatctcaaatacatatattaaataatagtaataattaaatgatttcttttaaaaaaattaataaataaatgtatattcttataaattctaaataataataatttgtcattagatagtagaattgaaagatgtagaaaaagcaataataataaagatctataattagctatataacctaatgaatacgacacctatcatactctccaattatcatgtatggaaaaagctaagccaaaaaggggactacaatgagtttgagtactgaaatgaataatattagccctcccaaagaaaatgacatacaagaaagccatacagatattagaagttgctttaatatcattttttaatgttttttttttaaaaaaaaaatataaatcattttttaatttattataatcttttttacatttttgtctttaaattttctgacaattaaaaattctctctaaattattaaaattattaaatataaagactttagtttgcatcaattttaccaattttgtaattgtttatatattaaattatatttcttaaattttgatatttattaaatcatccttcttgaactttgacatgtaccaaggtacgtcattaatttttctttacaattaaaatccttaaatccaacaatttcaataatttaggaagatttttaacgattttaaaagttaagagttattatttaatacatgttaaaatttagaaagtaaaaaattttaattaatctttttttattgccatctacaccataaattatattttatatacatgttagtgaatcccatacataatgtgtatatatatatagaaacattaggatatttataaaaaaatttcttcattcaatattaagtactagctagagatagaactctggttcagaaaaaatattactagatagaactcatttattttattattgtttccaaacatactcgataaacttgaaattgaaaattctccaaaccctttattattcttgacaaatagtatatatgtatcatactgtgattataatatcgtagagtgtagactatatttttgaaagagtatttttttttttttgcctttcttagccatagagagagaaatattaacaaatcactactacaaaatgagttattgccaacgtttattaaatagagacaattataaataaaaataatgataattataagaaaaataaggtgatctttaaatatagaatttcctaataatatatctataataaattaatttataaaaaattattatttatattgagttctaaatatttaatataattacaattttataatatatattttaattttatgttattaagagcaataaaataagaatttacatgcctatacgtaattatttttaatggctaatttatcggtggaaagtaagcgaaggttattcatttttcgaaccaaactaacatgtttagatgtgatttgaatgaataattagtcaatgatcttgattttgattttttttttagaaaaaaaattgctacattagtttaattcgaaaacataaaatagagaccaaatcaatatgtgaacattacacagtgctataaacagttgctaaatagattaactaactccatttatttgtacatataatatagaggaatgatgatgactttttgttgccaaatttatacatagttgtagttgggtatgccacttgggttaacactataacagacagcaatatatatacttatttttatatctattcatatatgtatgggtttactctatggttattatccataaatggttaaaattagaaaaatttaagttcttatgcttaatttttttatctaaataaaaaaatctcccacttttacatcatatgtgctgagatttttctatcggttgaaaaaaaaaattaaaaaaaaaaaagtttttagcaaaaaaaaaaaaaagataagtaaagttgagtttcacttaaa

SEQ ID NO: 28497 - DNA, 3956 bp, Cannabis sativa
attattagtttataactttagtgtattatataaatttgtattacatcatatgttattgacaattaatttttaattattgggcactgctatgtcttaggttagtgttgcagaaatgaagtttgcaattaagtgcgagtattctaggatttcagatagacatcctgccgctacaatttgatgatgctggaactagtcgggaagaggtgggagataatgatggccatggcaatgatgatattgatgatgatgcaaccgatttgtagtagtaattatttttattttagttgagaaaattatgtttatgttagtattttgaacaaatgctcatttactaacttttagacaattacaattatattatgaatgtataattaaaacaattgaaaattatattttattgtgtaattatttataattaagctttcatgtttttttaattattatttatttaaatttaaaaataattgataaaaatttaaataaaataatattaaataaaaatatttaattgaaactagctatcaaaactgacttttccccgtacattagtgtgttggtaaaaataagatttttcctagcgcacatttttgcgggcaaaagttaagatttttcccagcgcacatttttgctggcaaaagttagagttttgccagcacattaatgtgctgggaaaagttagacttttgtcagcacacatttgcactggtaaaagtcaaacttttaccagcgcatttacgcgctgaaaaaaattatttttgccaacatttttcattttgtgctggcaaaagtttcaataccaacatggatttgacaaccctttttgccaggacaaaaatgtgctggcaaaagtaaaatttattttgccagcgtaatatccaacttttgccagcataaaaatgcattggcaaaagactcatttcttgtagtgattggatcggatcggatgacttaattcaattggattgaatagaatgggtcaaaatccattaaatgtgatccaatgaacacccctaatggtagcagttaatcgaataacaccttaaatttgtttgattcaatagtttggataattaatggtggcaaatgaaatgataaaaataggatttagccgccaataactcatttaaggaatgccaggaatagtgcattaatgtagtagtgtataattagttaagaaaaaactataatttaactaacatgtataatattgaataataagtgaacaaaacatgttagaacaaaaaccaacatagcaaaaaacacaaaactaaataataattcataatgcaaaatatggaaagtaaatatcataatagctagcatgataacataacaatataacaaccctcctacccccaaacttctaatttcccttcgagacagaacaacattaaaaacttaataacaaagtagtttaacatacaaaacaatacatgaaataaccacgattatcagcaactgataattaaaagtaaattaaaccccaaaagcctaaacccaagattaactagcactgatcatgagttcggtccatgatttgagccaagatttccttgcattccttaagctttttgatgctcccttccaacttggcacgctttgaagcaaccaaaggtgactcttctaacattctctccaaattcccatttggagccataatttgactcacaagctccctttccaaatgctcatccacaagcctatgaacactcaattgcaaatgtagagccattgagtcaacaagccttctctgtacaatgctccaataagccaccaatctcatcctcaagtcaaaagcttgatctaacaaatgaggagaattccttggtttgaccaagtcaaccgaaccaacacgctcaatagtcatagaattgtacaagtggagattcttcatgaacgcatccttttgagccatgagcttattgtattcggtttcgaattcggggttacaagtataatcagttaatttctccatctccacaatctccataacccacttcattgaattctctatcatgttctcaatcaaattaagcccagctattttcgctgagatttgaagctggtaatagtgtcgaacatggctcatcaaaacactcataacaacttcttccacataaccaaatagcttctccacaaaagccttaggaatactcgaaatcccattatccttttcttttagtatagagagaaatatattcttaggaagaaagttaggaagagaaatttctttagcttcttccaagtgtttaatctcatccattaagaaatttcgagtcggatcactctctggacacttcttaagctcatccgaaaaaccattgaccatctcaaccaacctagctttacaatgcattttcttatcattaggaaactcatcaaaatattctcctctcaacaaaactttccttaatgactctttgactccacctatgatcttcatcaaagcactcatagcttcaggcacagaagtcaaagccctaggaagtgatttaaactcaacaatgttatgactcaacttgtcattaattttcttgactatatcaggtaagtttcgagatatacttgtagcttgaatttgcatgagtttttgggacaaaacaggaattccaacaatagatttatcaatcatagaaagcaaagaatgtgtttcaaaaagcttagcttccttgaaacgagcttcttcataagattcttgaccaactctatttctaacacaaacaaaccctaatcctatattaacatcattagaagttaccttttccaaaagcccttctggagacttatctgacttggtcaccacagcaagagttctctcaccatttttgtcaacgctttgtgataacctaattgactcacacgttggaaagtcatcggtggctgataacacattgagaattatacttgttggaaattatttgttctaaccaacacactttaagaagcaaaattaatgttatatgcaaattggtatttttctaaaatttattattttatgtatccacaaaataatagtgtcaatttataactaatacaatttaccaatatttgttccaggcccaaagtgaagagcccaacaaccaatcaagtcaacattaaaagagttacaccaactctttattctcaccaaaagtctcggcccacacaagcaaaaaccagcccaaagaaaagatcaattcaaacaagattcaatgactcttactctctctctccaatcactcggtcaaaggtgaagaaatgagtcaaacaagactcattcttttcttcaatatattcggcccaacaaggagagaaccagcccaactaaatgcaaagcaaaccctagcaagccttaacctaatatatataaggtaatgtattttctaaccctaaatgaaacacacggcagcctccatttttccctctaacatattcaaattctttcaaactattttctctccttaacacaaaaatggcagcaacacaaataatattctagggttagggtttctaagatttatcttctcttttcttcctctacagccgcacttagttaatgggtttcttcaagctctcttcttcttcttctcactctaatggcagcaatgaatgaaagaaatggtaaggttttttttttttttatcttttcctttttcttcttacagcaagcaatcttctatgggatcttctaatatgtttttcttttcttgctacaggttctagattatggttctaagtttctctttgctcttctctacttactcgaaactacacccagaaaaatacaaagctattagcttttattttcggcaacagttaggtttttctagggttccaaaataattctttcttcagccccttttctacccgaaataatcaaaccaagaaaaacactaactcaactccaaccactcaaaaccgaaccccaaaaatccctttgactttcagccaagaacacatcaaacccgaaaatagca

SEQ ID NO: 28498 - DNA, 1912 bp, Cannabis sativa
gtaaaaatatttaaaattccataacacaatatttttgtaatttttttgttatttttgtatatttgtaaaataatctcattaataatttaaaaatattaatatataaattaattatagaagataaatatgaacttatcacatatcattattcttacgtttttcacgtgcgatctaacaggtcatacgtcccaactaccaatataattttttgatcaaagaattcatcaatggtagtgagttggacattgtcacttttgctgcaaatcatagtctatactagtccctatttgtttggtacaattcacgtgccttacccttcaatttgtggtcataataaatgtgctagtggagacatgtgaggtaggggtgtcccaagtagttttctacaaattcattactggtcactatttgatctgtacaattcccagccttaacttcagtctgtggtcataatgaatgtggtattggagctacataatgaatgtggtattggagctacatgtaaggtagggttgttccatgtttttagttttctacaaattcaatccaaaaatggtaagacaccactagtctctctttagtgctattaatgagtctcatataaattaaaaaatatttttttaaaaaaatattactaacgaatcaagacaccacttataaaagatattagacaccactagtatctattaacaatgctcacaatatatacatatacaggaccggtcctaaggtatatagggcctaaggcgaaattaaattttggggccctatatatagtttaattattataaaattaatagttctagtgcttagtgaaatagtaaaatttttaaaaactcttagaggtctaaagttcaatccctcataactacacattaaatattttttaacaaaatgaaaaagtagaggttgggaattgatcccacgacctctaactttaaagtaagaccttctaccaccgcactaaacaattttttattgtattttcttcttatttaattctttatctatatattaattattattttgtcacaatttcggggccctgagcgttcgggggcccgaggcgcacgcctagcccgcctaccctcagggacggccctgtatatatatatacacactaggccgggaagatatgccaaagacatctaactcccatcaaaactgctgagttataaccatacgttttactttaattaataatgtttaaacaattgttaaaaaaattttgttagtacaagcacatagtatggtataggttcacttattgaaactaagattatcagtcgttctatctaaatgtaagcacatgtgattttctttactattatttactgataagcaaagttaaaaagaaaaataaaataataattaacaaaaatttatgaagaaaaaaagaataacaacacaaaaaagattactatcatatgtgtgaaaaaagatggtaaaaatagtagaaaggatttaaaaaatatatattttaaaagagaaagtggagcacaaaaaatgagagattttttgaaaaaaaaaagtgaggtttaaaaaaaaggaaaataacaaaaatattaataattggtacaaattaaacaaaatgtaaactctaaacatgacaaaaaaaaaaaacgcaaattactaagataaattttattatgtttgagaaatacaaaaaagcaaagattatagatcctaaagattaccaggtacggcatggtcgtcatataatatctatttttcatctcttcctccgaccaactcttattttcttatctcctatcttttgtagatgaaccctagagatttcaagggaagccaacaccacatcgaccaggacttgccacatattctctgatgatatgatatttcctttctatatgtttacttctcttgtggcttcaaggttccttactgttgg

SEQ ID NO: 28499 - DNA, 2201 bp, Cannabis sativa
gatatatgtatattggtttaaggtatattgtttgtatatcatacgatatattaataaaaaaactaattatatgattaaataatatattagatagcaacaacaagagcaaaatctaaaagaataaaacatataatactttttatataatgaaaaaatagttgacaaaaattcagtagaggatttagatttattgtttttcataatttatattaaaagaataaaacatataatactttttatataatgaagggtattttaggtattaaaaagtaaaaaaggacatttgctttattattttaaaaaatggacattaactatttataaagttaaaaatagggtaatttacttacatttttaaaaaaaaatggcaaaaatgtggcccaaacacatgaaattgtgacatttttgaaatatgtttctcgttaataaattgttaataaatatattgtaattaagtactacaaagtatataaaattgtaaattttcctttttttacgtattttacgtataatatttttttgggtaaattattttattattattattattagaaaattattatttgacactttagagatatgacacttaataattagttagcagtttactatattattcactaaattaatatttgtgagattcgatattgaaatgcaataataacggtatgtcaccatttatggtgtttagcatctcccttggcatttttcttatcattttttttgctaattttattaagctaaaaaaatgagtcaatattatatttgatcaaaattttataacagtactccaactcatttagggtagaattaatccttttttatagatagatgtaaaaaaatcaacaaaggcattaaattattattaaaagcatataaaattctattaaatatataaataaaatgtaaaaaataattaattatattaataagtgggaaaagagtaaataaaaatgtaaaatttattgtatataaaatttggtccatcatatattttgtgctaaatttggcataaattttaacatgtgttaaatttttatacacaaacattggagttcaagtttatgaaaattgactaaaatatatatatatatatatatatatatatacaccacacttttagctatctattataaaaatgttcttcattagaatttatacacatattcttgtacattttaattagaattttaacttattattttttaaaaaattatatataactttataagttttattttttttacttattgtgcaccgcttatatgagattttcctatagttcaattttgttaattattattttatttttcttacaaactttacatattagtaggtaatagtagagcaaatcacatgagctgatatttagatatgatgactaatgatcttagctttaataagtgaacatgtgaacttataacgcattatatctttgtttaaacataattttttaatatttttaaaatataattaatgaaaataagatatataattataacttacatgttaaaacagttgttaggtgcctatagcacatacttcacactagtatatatatatatataaacgtaaaagttcatatataataagtttataaacaaaacttacaaacaaaacaaaaccctcgtcctctgtcaaaatcctctctcctcttatatctattttttttttttttattttcaacctaaaacctagcgatctaagttccaatagtagaaaaatagttaatctttgaagagggagagtttaaggtaagaatttgttttgttttgagtcgagcacaattgtttttatatagtaattttgcgaattagaattgttataaatgttcagaccttagaggattgttctcgggtagtcatgggactagttctaatgttttcttgttgtaataatgagattttgagttagaaattgagtttagaactttttataacttaagtccgaacactagtggcatttgccatcaagggcttgattttagtttctattgcgtaagtatggtagtatgtatggtatatatgcgccctataaagtttggggtggtttggacaagtttcggtagcgttttgatgagtgcttaaacttggaaaatcacattttttacccgtaaaaatcggtcaaccggttctggccaaccggttaactgtttcgggcagcctcgggaacttgagaattatatttttgtcataactttt

SEQ ID NO: 28500 - DNA, 3638 bp, Cannabis sativa
tcgatcccaacccccccctatcatctgcctcccccgctactactccggcaattacctccgccgcttctaccaccgctccggctgcaactacgacctctacagcaaccacaaatctcgctcgtcccttcacaaatccacccccatcaagacctatatctccgctccagcagcaacctcagcccctccatccccatcatcatcatccactcactaccaccactactaccgctgcctctgcattctcttctcagcagcagccgctgtacacggctcatgccctccccatccgtgcgccggtccctccttatacaaattcccaattggtcaaatccccgaacgactcttcctccacggcgcacggaatttcctaccctgtcgcatcctccggccggggattcatccccaaggccgttcgtcccgatcagattgtcactgtcgctaacccaggcagcggcggcggaggttaccctgctcgtccaatcgtcgctgcggggttccatcacgcgggaggtgtgcggggtgctccgcatatggagtctttgaatgcgaatcttgctgcgcatttggtcaggccaatgcagaacttgcagcaacacctttatcatcctcatcttggctcgcctgttgtatcagtcaagggtgttcctgtttctgtgcaaccaaaggtttcaattcctgcttccctttcgtttccttccatcgaaggttttatttttttattttttcatctttttttcaacgtatgctttacactctatcttctcaacgatacaggtttcttcttcatctccagcaccagactgtaatggccacaaagatatgaggtattgcttgtacttcttcagcctggagttcttttgattgtccattgacattgttttgtgctttaatgtagggataaaagcagagatgatactttaactgttgtcaaagatagaaaagtaagcaaaaaatcttcccagctttgtatcattcttacttgtttagttgtaagtaatgacaaagttaacttagaagaaagtaaatgattttattttttcttttgtataattctctgctcaagaaatattgcaagtgtgacctcattttgttaatctatcaaattctcaacaaattcccccttttgtagagttattaaattctcatcctttaattctgttcttttatgaaacaaattgtccggtttggcatcttcatttaataatcagagaatgcatgttatgatttgtttactatatgtttatatagaaacaaattattattaggttcaaaaaataatataaagttgttttaaaatgtctcctctaatttctcatcactgacatgcatatccgttcatatttaagtaattgttctccttttcccactcatcattgtttatcctgctcaatatataaattctacttagtgcatacatatagtgttcgtaaagctactataagtttattcctttctgttgctattctttgtagtaatctgatgcaaattctcatttaaggaaaaacagcttaagaagtaatgtggctcttaattatttgttgatgtacttttgtttgcgtttccaggtcagaattgttgagggggcttctttgtatgcactttgtcgatcatggttaagaaatggtactcaagatgaaacccaggtttgtcttccataggataattgtcatttgcatatgcatttgaagtttcataattggttttcaaacaatggcaactttttgcctaatatctaagataacttacctaaatttatgaagttgtttctgtcatggggaaaacaaaactttgatgtgatacaaaaagctcatttaggataatggatttgtcagtctccaattatagttaatgactataaacagcagtaatatatgtggtcttttttatttatgggacttgcttttctaaatatccacaagaaaattaattttttctccaaaacaccggatctatcaatattttatgcaatttcgcgatgctagatctatttggatagaagaacttataaaacatcctattttgagaaaagcacttatcaagaacctactatgaatacaccattcattgccaacttactagttttcttacatttcctaccaaagaagacacacaaaactttattagatatatcatatgttgctttgagtcaagtttactgttttgtggaatttcctgctgaagggaaataacaaaataagaaacaccaatttctgcacctaaaattttacacaaagtagctctttaatttctgttatttttacttagactaaaaagctttttcagcacgctgtgttgaagatagtgaaagacaaaatcataacaatttcctgtaaaccttttaaacaacctcaaataccattaccaatcacaaagaagaattgagaatgcaaatgccttaaactccttagcgttgaagatccataaagcaagccaattccacaatttctacagtatacgtaagtaaaacttataatatttctttccaactcactccttaaaaaattgcaaggacaaccatgttctttatatttttctccatttccattttctgtaggagctccatttggttctattcacacattacctttgaaaaggataaatctttaaattccttacttttgaaaatcattattaaacaaaattacataacttatcatgaaaaatgaacttggttgatgtattttttgctggaaaaaagactaatcttcccctccctctcctttaagggtgttttgtttaacggttttcaccttgtcttaaacagaatatcttcgcttcaaaacaagcattttgagcataaaatctcgaccaaaccatgtgataataacataaaatgcttttcaaagttttaagagaaataataacaatagagaagttgtgaaactatgaaataggtaacgagaaaatcagtaaagtgtagctagtatgtttactagatagttgacatttaacttaagaagtcaactaggtatatcgcaccttaaatgaacacgttagaagtcagtcactgcctgggctttggccatactcttttgtctaaagaagagtggggagggagtgacaaacaatggatgacctctactccaaatactgtagcaggcaaaatggatcagataaactgtcatgtaataccacaatcgaatattctggctggtttcagcacaacaagttttgtatatacatgagtaaatcttaagttaccaatctaccactcactgttcctatgtatggacgtagtatggttaattaacttcgttgtttcccagaatttactggatacctttccaacatacattggttagtaactaaaatgtttgagttttttggagcactttttcggtaataacattacaaatctttagacatctctactgtgtcagatttccaaccatgtaagactcttgaaccatcatcatctgattcaggtctgtaatgtctttaaagtgagcttaggttgttcgttgtactgtttatcatttactctttcttttaaattgttgcctttgtacctgagtagctaggaactagattcaaggatggctttggattttattcagacagagactgccaaaatctttttgcacaaatacacttcaagtctttttgctgtttcgcaatctggtttgtaaagaagaaaa

SEQ ID NO: 28501 - DNA, 5558 bp, Cannabis sativa
  modified_base (5367)..(5374): a, c, t, g, unknown or other
ataatatcagcatatactcagtactctagtcatattgatgtggtagcatcaatccatacttaaccatattaccaaactccgtcagtatttagtgtaactccatatacactaaaactgctcttactgatatgttatctaatagggaactataaacatgtacactaaacatgtatgcgtgtatatcattatactaatttaaccatctactaattctcatgatttaactatgtggtcattacaaatagctttcaccataattaggaagaaacaaactctgtggtgaaccatgtgttcgaacaacagaggcattaattctatgagtgatggacaagcaaactaagtccatgtgtgcccagtaggaagaaatcaatcgctaataaagagaagctaacgacctgatcagatggttccaccaacaagctgggggcaggtactagaaaacccaccactaagaagaaatcctaaccaagggaaggaaccttatatctattagtttttagggttcatatcagggttgttgagttgttcttctatcatttccatcgtgaccactattgttgtttttggagtttcccccaccgtttggccttaaacgaacattgtgagagtcatcccatcccatatggtgaccgagtaggacttgatcgtctgtagggagcacttaattattgttattgttactcggggccctgttggagggatgacttttagccctctcttggttccttggacgttccttgggtccgtaggccaccatttgttgttagtttctcggaataggcactttctattgattattggcctcactgcctaacccttgggtattttgttgaacgtagctccgaattaagtcgacaaacttcttgagtgtaacaatcttggctgtcttggcaccttctcatctcacaagcatgttcttccaaccaagattggagctccctcatttggttagacagacctttagttaaggccgcttgagtttgagtttgctcttggtgcacaatttgaacatgaccctgcatctagcctatcacgtcttgtagttaatccatctctgggtcaattccttcaatatccatatggggttccctccggggcctaaagacgccaggaccccaagtggtttaggtttggctcgtgccttcattagtggggacaaaatttttggtatttcccctttcagcgatgccgttagtagtgcctcctccagtagtggtggtgttagtggtatgcctagctgttgtctacccagcaccggcaatttagccagttgtcccgtgaccataacagtttgggtagtggcttgagtagtggtcgcaccactgttactaggacgtggggtcatttttccattatttctggctagatagcttgatgatggaagttgttgggtagtgtctacctcttcatcgggtcgttcttgagatcttctggtgagcaccatttttctagtgaaaaacttcaagattttagtttaagttctcaatgaaagcaccaaaatgttgactagatttttagccaacagacgcagagttgtaattaatgaggaattaacccaaaattgtaataaatgcaagtaaaggaaattagaattgaaagaggttcaatcctagatgtcggtaataacctactctccttgtcttttattaatcttagttgcagttaagaacaagcttttgagtgcaaaaataacaatggtagagtttctacttgtgagtcaattttagatccccttcctaggtcataggtgacctcttatataggaaaaaaggttagtacttctcgcgtcaagagacacgaccattgtagggatatctcaatcgtcttcttggttttcaaaggtagttgaaatttgattcttgtgataatatcctgtatttttgtgggttcgtaactaccgttaagcttttagtaggatatgaatattaaaattagttaatgacgatgagggtccccctagagtgtggtatggttgtttaactttcgctgtgggtagtagccactacctcggagtgacaccctcgagacccactgtgaaaggggtcatagtcaccacctcgggttggtacccctgagaccccttccacattcttcgatgttgtgggtagccttagagtcatgaagatggattatatcaaccgtgtcttatataagtggaatgtattacttggaccatgagcatgtgggggtttaaggatacacccctagactaacttcattaccttttgagtagatcattacatttgaagtaggggtagtcgtatgtactccctagattgctttgactctcttaggtgtggtgatcgtttatcccgaccatgagggagctagtccaccttctccctagggagagtcaccttgcttaagctagggaaaaggtgactatcatacttctcttccaacggttattacaatcggtgatgaccatcggtcatgactttacacattcttgatcaatttaattctgatatctcgtgccacatgtcattatttttatcacgttgctatcatcaaaataaatttgtgtaaacagttttataaataaaaaattgtaatacttattcatatagaattatatgatggtagttatatggtaaagatattacaaatatattttttttaattatgttaagcaaaaaaattattttttttattattggatattgcagtttttaaagccaaaccaaataataaaaggaaaatttacatgaaaaatttaaaaatccaaaaatattactcatatacctttacaagactactccaacatatttacctttaatttaattttatttacactaatacctcttgcacatgcatgatgtcattataccaccttcacacactatctatttctctcattttctatcattttttttagtttatttcatttttcattgcaagcattctgtttgaaaacttctcccacgatcaaaaccattttttattagagaaaattattttcgtccatcttcctcgactatcttccttcatcatctgaccacgttttttcaatttttttctgttctataaatggccattacttggtcttcatcttcccatcaccattgttgaaaaaatcttcaaaagtgggtgttaaatctcttgcaaataaatctaaaggtaaacagtccgttattgaagatgatgatacagactttgctccactaccaaaaaaggtgatcgttgtttggttaagaagaaattgaaggttaatgttgttgaaaatattttcctccctaaagttaagaaagggaagaaccaagctaatgagagtctgaaggtttctttctacttactttatagtttttccctaacattgccctaacttttcttattactactttctttaggagaaaaaatcctatttattttatttttaaatatctctaaggattataggtttttttttttatacaaaagtacagattattttttattttttaaatgactgattaattgtaccaccgaatgtgtggtgtagctggttggaatgccttgcgtaaggttcctcatttgattgttctttggagttcaagtccccatggtaacacttatcttgggcgttaaaaattatgctattttagtgataagaaacttttgaagattcaacagaattttcaatgtaataagaaaagttttagaacttcacattaaggtttcatatatgatgttgataatgctttatgcttttgttaatattttggatatgacatacaaccttaaaataattgttgggcaactaatgagttgctcattgcaaagaaggaggtgttgttggttgttattgtgttgctgaccatgttcacacacacacaatggatatcttatgaagtaaggttcttttaattttacttgtatgtagaaaaatagccttggatcgtcatttatcctaaatggttggtatccttctttcgtttggtatttaagttgcagttgaatattttcttagttgcattccagcacctatttcaacttatgtactagttcttcatatttgtaatctattgaaatgtaatggttagtacatttgtaatttacataattcgttccttgatcaaactgttcattgcaaatatgagaaacggaattgcgtctttttcttaacagtttgaaaatttaagcattgtaagtcaactatgggataactgtcatgaaactgtaatgcgacagttatatttgttgtgaggcaactaatattaaactttaaaataactaataatgcacttatgtaatacaaacaaaacttaccataatcgaattttctctatacgagtcgtgtattgttaattctgaactatgtttttttaaaacaataaaatatagtagcataattattattcaactaatatacaacttaaatgcaattaaatatagaaaatttgaatgtgcatcgacatgaaaaatttatcagtgttttttttgtcactaatcaacaataatcaattgtatcttaataatattatgtgaagaaacaactgttagaattttataaaccaactttataacaaccaaatgaatatataaataaataaccatgttataatttttttaaagagctttgtattggattgtggatatgaaatacctgcaaatatcataaaaattattgtatcgttgacagtttgtaatcattgatatgtctagtttcagagcattagtaaaatattaatgcaactgcaatacaactactcagaaacttaaaaattagagcaatatttctatgtacgtggctctagataaattcaaattttcttgattattcgtgatttgatatgaataaatccaccattaaaaatctagaaaataacgttgatgcaacaggagaaatattagctagtgtattgatacattttctttttcaatttatacctaatttggattaatcaagaactctaaacctattttagattgatctacattttatgaatctgaacattgatattaggaagattagttttctgcaattttaattgtaattcaggattgaattttagttttgaaccagtttttctgcctgattatgcataaatctaaaattgtatgtgtttggatttcttacgatcttcttctcaggtgaagtcgccataatttatggtaattctctgtctggctttgtttcttttcgattagcctactggtttggttgttggaagctgtcgttgttgaagaaggtagttcgtgatgctgaatggttagagcaagaagtacttttataaatttgtgttgctgagttgtataaatgtttataaggccttcccaatatatttgtgtaatatttttgccattctaatatagggattattttacaaatacacaaaaacaacaaaaaattacaaaaatacagttgtacagaattttaaatatttnnnnnnnntttatgattttatttatagaaaatactgtcttttcatattgtattcttgttaatatgttgttgattttttgttatctctgtgtattattttcttgttgttttgatattatttggatgttattttcctattatttttatgtaattttcttgttgtttttatagaaaattgtaaaaatataaaaaa

SEQ ID NO: 28502 - DNA, 2587 bp, Cannabis sativa
tttatttcttatttgtttggaaaactaaattgatgtgacattggaaacagattgcctctcggtggttcaagctattcgaagcactactgttatgctttctatgtttggcaaagttataagtgattgtaagaccttgttatgtactttgcgtaatgtttctttttattttataaaacgatcagtgtagtggctcattcttttgcgagagcttctatatcccaccctgatcgcctcttcaacttggacactgttccggttgttctgttacctagtttggtaactgagttactcatttaataaaatgatgactttcatttcaaaaaaaaaaaaattgatgtaattattccatataaatagtggaatcaaggatccaaaatcattcatttaatagagcattcaagctcctaaaatctctgtaaaagctttcgaggaagatcaagaacttttggtttcttttctcacatgttaatacaagtaaaaggagagtaggctattaccactatcattaggtcaaacctcaaaaacaaattcgtgttcttattgttcaatagttggaggtatcacgatcatctatttttctatatgtgcaagctatatattattctgcatacatatgtataaaagtgttcatgtatctaacatggtctcatccaagaagtggaatagttgatcacgtttaatatttttgggaccaagatgctagaggcaaacaagtagtcaatcaagaccacttccgaattcttcgtttctttatccgcatgcagattatgcttcttacttggtaccttttgaatcatcagagcagttcctgggccttcaccacataagctaccattttttcgccctaagtttcataatgtcctgatatttcgttcatcactagtttagaattactatgcacttcaatatttttagctcctacctcctagacaaaaggcaatctaaccatgagcgtctcatattctactttattgtccaaggccttgaatcggaagcgaagatgtaatgccccaatagctaagagttgttacagagtttaaaaatgtcctaaccttgataagcaagacattttggatacgaaagtgtgaatttaactaaacatcataataattaaaaaaatttagtagaataaacttcttttataaaatttacgagatctcaaagattagattctaaagtttaaacttaatcataagactcaaaagtcgacctatgcaacaaaacataaatttctgataaacaatcttccaaaaagggtccaaccacctaagtcaagttggtcgaatatgtacatcatctgtcaaagtgctccagctcatgattgttcaattttaacatttcctttatctgcatcataaagatccgtgagtcaaagaaaagcataaataacaacttaataatatacttgtaatacagggttgatgcccagtttcatcttctaagctttagattgatgtccataaccattaatgcaattaactataatgtcactattggacaatattgtcccttatggatcagatgtaaaaatattgaaccatatataagaacatgagatactccactcatcaccaattgattttgagatggaacgtcatgattctccacatggtattagagccatatccctagtgggctttcgatccacacctatcagatagttagccagccacaagcgagcaaaatggtactcccagccgcaaacaagaataagcgagaaaatgaaactcccagccgcaaaaaaaaaataagtgagcaaatgacactacttatgataaggtgattcaagattggtgagcaaaaataaccaccatcttgagggggaatattagacaatattgttcgacgtggatcaaatgtaaaaatactgagtcatatataagaatatgggctactccactcatcaccaattggttttgagatggaacctcatgattctcaacagccattaactcgatcatcatttaatcatactgatatttacatagtaggcgttaattcatatcatattaataaacaccatagcttaatacatgtgtctatgtgcagttgttcacttttcttacttggagtacaagcagaatgagatcctgtcaagcttgcggaaagcctagcacgattcctgtctaaaaccatttaggattttaactatggaccctatatttcaggttggtcccagtctaaggatgtttcttcaaaattattttcgaaccgctgaagtctactttgagagagcctactcattgcagcaagacctgaaacataaaggtcaaagtttgacaagaaagagttggattaaaaccataattattctcctgagtaatgactatgaagattttcatataaactttacaacctcattatgaaagtccaaaaggaagagataaacaagaacttgatgggaacataaacaaaagccaagagagaattaatatcaagataaataggaagacactcttggaattattatgcttttcctagaaaagaaaaatgttatgtgtagtttcatgaattgtggttgcagtatagttagatatgtaccttcaactattctgtaaagatttgaccaccaattatctcttggaac

SEQ ID NO: 28503 - DNA, 5121 bp, Cannabis sativa
agtggttgcagcgctggttgcaatgtaggtttctatacgattttttgttgcaaattaggttgcagcgctagttgcaatagtggtttctatgtaggaatccgtaaaaatgcaataaaaactattttgaagtgtaaaaatgaaaaaatccctttaaattttaatacaatttttatggaaagaaaacatattattatgatacacaatttttattacaagcgtacaatatatatatatatatattttgaacaaaaagaaacttttttattctaaaacatgaaataatacaaacaaaaggagctcaccactcccgacccctaccaacccttaataacacttattatatatatttcatcttttttcttaatacaattttgtaagcttaaaactctctacttcacaagactcttgatctctctacaaagagaaataaccgagctacatatatataaagtcaaaaacacacctaattctatttttccaaatcaagtaaacagtcgctgtaatcacagagttaataactctatttctcagatcagtaaaggcttcgagcactaggatttcagcttagcaatgttgttcagccactgtagaaaacccaaccattgactaatctcttttatcacctttctagagaagatacagtcagtataaatgtgatcatgagactcttcatgtaattcacaaacagggcagagtatgttgggaatagacattatatgttgctcaatttatctcttgttaacaactggtagttgataactttccagtaaatgtacctgtgcttgggaatacaaagcttgtgccacacattggcaacatactcaactttcttggcatctattaaggagtcataaaagcatttaactttaaacttacctcctctatccgcttgctcaatcttgttccttccagccacttcccgaagtttcagcaactttctaaagtacaagctcatgtcttgcttagctgaaatgctccaaaaatcttggtcctttagataaattgcatttattcatttgacccaaaaattgtctttcttctttgtgattgcccataaaaactttaccataatggcaacattccattttcccctcccgaaagccaaaacccggccccataacttttaggaaggcaggcttgctcccatgaagtgaggtggagtttgcttccattccctttcttaccccaaagaaaatcgcaacaacttttgtcaatggctaaagttttcttctatggaagaataaagaggctgatccagaaattcttaatcccaagcaacaccgactgtataagttgagctcttcctgcaaaagaaaggtttctactacctagcaattcaagtttctattcagtttgtttatgataataccacaatccgcagccttccatttagtcggtctaagtttgactcccaggtacttgagaggaaaagtaccctcctccatttgaacaatcttcaagatgctctcctttttatcacctttcacacccccaaaatagatttgggatttggctctattagttgagaggccagtcgcttcacaaaactcagtaaaggtctcatgaatcatctccatagacttttcgttgcctctgcagaacaaaatcagatcatcagcaaaacataggcttgaaagtttaagggacttacataagggaagaaatcctaatcctttcctactagtctttttagccaaattcctggtcaaatattccataactaacacaaaaagtaaaggagatatcagatccccttgtcgaaggcctttttccccttgaaaagatatccttggattctttcattcatgagcaggttgtacctggtacctcttaagcagactaaaatctagttaataaaccgagaaggaaagtaaagccccttcaacagctcctcgatgaaatgccaatcaacattgtcatacgctttgctaaggtcaattttcatgatgcagcgagctgaaatgttcttgctagtgtagcccttcaacaaatcttgaaagatgagtaagttatgggctaacaatctgttcttaataaaagctccttgattgtcattgaccaagcacgataaaacctctgaaagtctagcacataacatcttggaaatgcacttatagagagtgtgttgcaacaagcaataggtctgtagtattttacatcagtaggattttcaaccttcacgacaagagaaataactatttcatttaaatctggaggtaacttaccactctggaagaaatctaaaatagcagcggaaatttcctcaccaatttctccccaaagccctttgaagaatcccgagccgtacccatccaatccaggactcttggtgttataaatttcgaaaagagctttcttcacatctttcttgctgaaaggtctgatcatattaatctgattctccaagttaaggcaataaccataaccaagacactccttatttatacctctaataattaaacttttcctccccattatacctctaaaatggtttagaaaatgttcaatcactttaggataatcatcaatcacaacatcattctcagtaaaagttgtaactctattctcaagccttctcttcttcatgaccgcattaaagtactgtgtgttttcatctccacatttgatccaatttatcttgctttgttgtttcaggaaccaagtgtagctcttcaattcattatagtaggttcgttgcatcattattttttcctgttgcttctctatattactcgggtcactagccaggtctccttgcactctgcttagattctctttggccttgctgaacttagctttcacatccccaatccccttgccgaatttcttaagaacatgattcactctatagagcttcttcgataggttcatcatgttaccgttcctgtcaactattccccaactagctacaattgtccccttgcaattattctgtaacatccagtgattacagaatcgaaatagtttgatactagcagtgccaaagtcatgatgcttcacaatgcaataactatggtccgaacagggatcccatttaaagcaagcctccgtacaagcgtacaatgttgttataccaaaattttaattattaaaatattgtcaaacccacgtgaatttattattaaatttcactagttactatattttttttatttttatgctttaataattagacaatttaaagtaaataataattaagaatgattaatataataactgaaaaagtaaacagacaaaaaaataatttcaatctgaaaataaagacttagagtattaatttttctattttaaactatgaatatcagtttaattactaatcatcccaatttattttataatttatagtttcaagaattctaatgtaatctattaacctttctcgagtgataatagaattaacttaattaaataacaagatatctgtatttaatattaatcaattaagcaataataaaacaatatgattctctttaattgaaactcatagaattcttggaatctcttagtgtcacacttttcctatgtcatataattctatgtctgattttaaattacctcttgcatgtgtaaaacctaaaatccatatactaattaatggtgatagagcattaacaacatgataattaacataaaattgcacaaacaaataccaagaataaacatgggaataatctaaaaaatttaattcataatctaaaatagtttcattaacactctaaaaagaggattttgttcacaatcacaaacataataaccacaacaatattctcagggtagggaagatatcgacccccactttgacctaaaaatttgacctggaaatttgactcaatgacatgaaaaacacttttgacacatggcaagaaggaaaaaaccctaggccccagccaccaagactaatggtggtcaacttgggcattagaaattgtgatggtgccctagttgggcacccaggtaggcactatgatcctgcgaagacgttttagctacaatacttcgacaaagttcaagcgaacatgtcctaatgacccttaaagaaagaaccatgaagttgaggatgtcacgttgacatcccagggcttaacctaggtacaacattagtgatggaaacccaggtcgacatcctgtgtgccccatctcgcataagttttggttcttatcggcttcttatgggcaatctatttagcaattgtcctaagatacatgagagacatgacccaactaagttttagactttggatttaagtctacatgtaatggaacatgggcaccaaaagtcctaatgggcgtccaagttgacatacagtcgatatgggcacattgcggttagattttaggtttctagagacatacttggaccccaattcctcaaatccatcagggaacattgcaaggacatgaattaattttcatcaacaacatctcgaagaagcccatacagaactttgggcgcttaggttgacatttccacctgggcaccgatttcgtttaccaagttcagcccgtgcaaatttgacaaaatagaaatttttggagcacttgtcaccaaaaataaaaatcaacaaaacaaatttcaaagatgttgacccctacttgagcgccagtgcatgccccaaggccataatgggtgcctaggttgacgtatctcaatcacgagcactttgggacttctttcctgagaaattatccgagaattttccttatttttatccacaaggaagatacaagtgctttggagaagcaaacaaatctatctaggcccaagttgacatcacccaagtcactaggcacccaggttgacgtagcaacactttgggtggttttatcgatctgattgcaattttgtcccaagcattcttcttgtttttctccaaaaataagatatgagactttgaattaggaaaaaatattgtttgagtagcaagttagcccctaggaatcaccaggcactagtgtgcaagcacactgggcacccaggttgacattggcctggggtttagcattctatccttcatacatcaattcttctttagaattagcagataattaggccttaattatgaaattagattattaattatgatttataaatttatggagatttaaataaattctaagtgt

SEQ ID NO: 28504 - DNA, 1896 bp, Cannabis sativa
tgtcaacctctatgaaccggcctagaacttcccccagttttatagcaagagcccgagaacgtttgaggaagggaatacccgaaacttggatccaaaacggagttgaagtgagcatcttcactgtgacaaccgatccaacttcaagaggagatatcacgatgagtttaaaatcaaaatgccatgactgtccaatgagtacccttctgcgatccccaaaacatccaaattccacagtaaagaaattgggctctttttccagcacattgattgagaagcgctctggccacatttcttttagttgctttttgaaagcctcagggttgaaatggcgtgtagttagtagtttgacagcaaggaaggaagaaggctcttccctgttttcatcttcaggcagttcagatggttcagcaaaagagtgtatttttgtctcaatctcagtcaggttcaaattggcagataagttgttggtgagttcttccattgttaaaaggggtcgattggatgtagggttaggggaatgttcagaagtcaggggaatatgcaggttgcaaattgggacaaaggaaggaaaaaaagggaaagataactgtttgagctgtaccttgtgtatatgtacaataggccttttatagaaagcacgaacagggatcaaattctccgagggaaaatcgaaatgaagaattaaatgcttcatgtcaggataggcaatgatgcaaatagaaatggcagtggctcctaaatcaaatctaggggttctgactatgaagtaggggacgcctaatttggtaggacaaatgattgtccaaggaggtgcagagggtatcaaatttcctaatttggtattatctaaggctaaagggagaagtaaatgggggtgattaatgaggtaagagaaatgcaagagagatgataatgcaagagaagagaaatcggatgggacaaaaagtaaagagttaaggctgaagtgaaggttacctgtattagggaagatggctgcagtggatgctccgcccagatcgtgaagagccaaatccaccattaatgttgaagagccagactccttcccaccgccacaagggtaagttgaccatggacggacataaacgccgaggatcggcgacgactgcaatcgacgcaacattgaagccctagagaagattttttcagagaggacgagaactatccagaaagttaaaaaaacaaagtatactctgattctctctcttggatttattatctatatgagaaaggttaattcctagtacatctcctaaaatgataatgatatgatataatttgctgtcgaaatttttttatgttttaatttttatatatttaattttattatttttttgtggcaaaattctcttaaatttatttttctttaatgataatgatatgatataatttgcaggcgaaatttttttatgttttaatttttatatatttaactttattactttttttttgtggcaaaattctcttaagtttatttttctttacaaatttgatacttcagttaaatattaccgttaaatatcaactgaataactactatatacacctttgtgtatatgtaacagtaaaacctcgaactcgatacaatagtaatctagtagaagtctccttacaatatacataccaacccgccatgctttggtttttagtgggtagaatcttcttttgtgatgttttaaacatataacaacattttataacaaactaaatttgtagaactttgtaaaagtttgtaattaagggaatcctcgaaattagtggtattttgtaaaaaaagttttagttatgaattaagttattttattaaaagttttaattaaaccatattttcttaaaccgttagtttattattataaattaattaataaaagcacacac

SEQ ID NO: 28505 - DNA, 1395 bp, Cannabis sativa
acgtactggtctctggttgcatcgttaaagtcattccatccttctggggctatgatatcagacatggttgtgagggcaaagactactcgagaaaatggcctccaagcacgcccaagccacactcttcctgttcctccaatcttgcaattcacgaacgagaaccccgtgtcttcctccttcaaagctcttccatgcgctgtcacacttccgtctatagatcttgatcctgctgctactggttttgctatcgatatcagttcacaatcctacattgtcagatttcaaattataattttgtttcaaattcagtgtatcacaaaccaacgaaattccaattcataagcacaatattaaaataacaaatcacatgagtatttaaggcttaaaaaaagttgtttgggtgtgtgtgagaactgagaagggaaggaataattattggggtttttttaaaatcaatattataaagaactacacatactaagcaacatttgatatatacatgaaacaaaaattttaaccccgccaaaaaaacaaaaaggaaaaaaaacttaagtcatactagtttgctggtttttttttttaatcttttttgagaatactttgtatgatttcaaagaaaaaaaacattattgattttaaagaataatagaaatatatgatattttaaaaggttgattaatatatgttgaaatcgcgaaaattgcaaagatttttcagtaagaaataggtgacaagtgttaataaatacaagagatttaatttttaataaaattgattagaagaaaaaatcacttaatgtgtgtaatatatgagcattgctattcttagcaatcccatgtactacttttggcaaagacgccaacgagctgaggagattctctctattttttaatataatacacgatacatgatttgagacaccactaatatattaatattaacttggtaatttacttgggcactccatggatggtaattttgctcaaaaaaaaaaaaaaactcaatattatatttaacctaaattttataatttttctataatatattaaaggtaaattaatatatttttaataaaaaaaattaacaaatatattatattttttttattgaaaaggtatgaaaattcaactaagtatataaataatatgtaaaatatcattaaaagtactagtgagtgataaaagagtaaataaaaaataatatttattgtaattaaaatttgattacattatatgttatgctaaatttaatataatttttagcatttatcaaatttaaattatattgtacatcatcattaatatttaattttataaagatggactaaaaattaaaaaatacatttatatatatatatatatatatatactatttgagtaatttgtggcaaaaccc

SEQ ID NO: 28506 - DNA, 3440 bp, Cannabis sativa
tccataatatcttctcaatgcgactattagacaagttgagttcaacaagtttacgaggttggaaacttgttggcaaagatttaagaggatatccatgccattccaaaagccgtaactccttagaaagagaaccaataacacatctagaaaacttcacattacatatcttcaacaatctcatacaacacatcttcgagaaaggatcaacattcaagtttagctcttgctctgttttaggcaagcgtaagaacatgccttccactgcttcggttccctataatacaacaagtgtacaaaatttggttatgaatgagaagaaaaaaatctgaaaaaaaaaatcccaaactcattctacataccttattctcttcaagtacattaaggatatcttgttgaagccacaatctgctacgatttccaggttgttttggggattctcgactaacaatatcccaacccaactcctgtaataaatcatgcatccatagtttatctcccacataagtcaccaaagatttttcaaccaagacatctatgtcgataagtggagaataatcagaagctcctaatatctttatcacacgacatttttcctctcctctaaagaaacaagcaatgtccaaaaacattgccttctctgtacgttttaatccatcaaaacttacttggagtggaccaacaatgtcttcattaggatgctcctttagccttgacaatgtgcttgaccatgcttctatatttctcccataaaggaaggaacccaacacttcaagagccaaaggaagaccattggcatatttcacaacttcaatggacttgtctttataaccatttgtaggatggtccattcgaaaggctttcctagaaaagagtttaatagcttcttcttcatccaacttaccaacttcatagatgttattctctccaaatctctttaacaagtgtgcatttctagttgttacaatgattctactccctggtccaaacaattcatgttgctcatcatagtttcccaccaaagtctctatctgttttgattgatcaacatcatctagaatgatgagaaccttcttatagcacaatctattgtaattatttcccagactactaaaatagtcacaattatatcctaacaagcaattgtataaatcttttcgtaattgagctagaccattatgcttttcagattcctcccttacatttcgaacaaagcaaaatgcatcaaattggtgtctgatttttccaagtatttcttgagctaaagttgtcttacctataccacccatcccccatattcctatggtaagaacttcatttgacttccctaactccaagtatgaaagcaatttatcaattctagaatccactccaactaaatcctttttattagtacttgatgatgtgcgatttaataaacatgaaatcttttcaactatttcattaataacttcatgctcaggcctgaaagaagaagataatattattttaaaatgtttatttttcatttttctcacacccaatacgaataaattagctttaaaagaaaaagttaagcttttaatatacataccaataattcaaagttcagtagggaaaattttattaactaacaagtgaggttatatatttattaatcatgttactttaagtctcaattcttaagaacaacaaaattttataaaagaaaaaaaaacatatgtgttacaaatattttggcatcagttttcttaattttctcaaaagaataaaaccaaaacatgtcatttaacaccatcacggtagaaaactactaacaatattcttgatcaacaaatttgactaaatatatgatcaaagaaaatgaaatttaagttaattatataaatatatatatatatatatattacctgagtcccaaatcccatccgacaatactggctacttgagttaaggcctctttccacaatttgacctttccgacatggtctttgaaaactttgtcatgttcagcaaacgcttcttcaaaaactccggtttgctttctgacatgtgatggatccacatgatagaaaacaggaaaaacagttattctctctccattattctcatcactcttattatgacactcaaaaatcttcaaaagctcttctaaacaccatgttgaagaggcatagttccttgatataattacaactgcaatttttgattcttcaatggctttaagaagttctggtgcaatagttttccccttctcaagctttccatcatccataaatgtgtgaatatgtctttgattcaaagcagcatacaagtgaccagtaaagcctctgcgagtatcctcgcctctaaagctaaggaacacatcaaatttcctcataggagcagctgaagaagaagaagaagaagatgatgatgatgatgtttggttggaagccatgtataattggagatgggtttatgagctaacgttggtgaaagtagtgattaataagcagcttataagtctttgctgcaattatttgtatgcatacaaattatttaagcgacttcaaactacttaataatttttgaaaagtgagaaatttggttgttgcttcttaactatttgcatgattgctcttgttgggttttagtttctttaagtttttttagcttttaaaattaaaaaaattgttggataaaaaatagaggctaattaagaattttatactttgatatgtactaaatcaagctctctgaacttttaaggtcgttaaaaatgccctttaactattgagatagttggatttaaagatttttttttttccaattttaataaaatagtctaatatggataaaagttcaggagcataatttagtatatgtcaaagtttgagggacatcatttgatagatattaaaatttgaggagcatagtttagtatataaacaataactgaaatagtaaaattgaatgaaaataaacaggagtccttaaatttaacaatctcaatagttcgtgagcatttttaacaaccttaaaagtttagggtaaaaatcctaattagctaaaaataaaatatttattttttaatttaaagtgtgaataaaaataaaaaattattttttaatttgaaagtaaaaaaattaaaatttataatttcttttaaaaattaaaataatttatatatttttaaatttatttaaaaataattatttataatttaaaaatatataataattatttaaatgataaaataaaataaaaattttagataaaagtaaaaatttagcgaagcttatgagtagcttttcacgctactagaggggtccgtttcggacatttccttgtgttttcctatcaaatttacaggtttattaagtacgcaaacgagtaataaactttccgtccatttctttttgacggctgttcaaatttctcatagatttctccagaagcctttttctttttctttttctttc

SEQ ID NO: 28507 - DNA, 2437 bp, Cannabis sativa
ttttcctttttaccattcgtaattttggattagggtagtaggaaatggccctacattcttactgatcccttaaaatgaatgaattagcaatctttgtttaacccacaaagagttcacctcgtattttctttttttatctttaatttgacttatcttctagtgtggtttatcgtgaatgaatctgtgaatgttaaacttatgattcttaaaagttgtttctgcattttgccttatatatgtaaatttatgaatgcaggattcccattattagtaaggaatatcagtgagcttgaacaggataactatggaagggcaggcttgtcccacattactatagcaggttcagttatgcatgggatgaaagaggtatatgctaatgatacaataataagttattttggattaatgttttatcttttttgaagtttgtagttattcctcttccgcttattcggctaatacagaggccttagttttttttattgaaaaattccatgatgtgcatatagaacttgtaatatcaatgtttacactccaagagttgattacaaatcatgtgattggtaggttggttatatgatttgaaattagggccttccattcagtttgtctttggaccacctttatcttttgcttaaggtttgcttgatatctgcatcatgattcataagtatattttatagacaccaatgacagttggtttctagaagaagggaaggttcaaggtagggtaaccacttgttcagtaagcgaaaagtaccctagtaattcatattgtatagtatagctggaaggcgcttgctcccttgcaattcacaagtcgctaataagacttgagagtcaactaatgattcaagctcattacagaatagatgccacatgctggtttccaagcattaataagtgcaaaaattgggcttttcacaggtggaagtatggcatcaaacatttgctccaggatcacgtacaccgatccataggcattcatgcgaagaagtttttgttgtgctgagaggaactggcacggtctatctttctccaagctcacacctgaagcatcctggaactccacaagagttctctattttctcaaatagcacatttatcatacccgttaatgatgttcaccaggtaaatgattggacaaattttctactaaaaaaagttataagctcgccacagaatgaaagctgatttggtactcatagaatacttgtactgtttagcaacattaagtatgccttctttcttttttcaggtttggaatactaatgatcatgaagatttgcagatgctcgttattatttctcgccccccagtcaaagtgtatgtattttaacttctgccattctctcactttctgcatttaccttccacaaaaggtccatgttggttgaagagttgaatcgtgaaatacatgatggcttagccaaatagcagcaattttttttattatttggtttgattataataaatgaaaataacatatctgaagctttataatatgacatagcatgactcgattttgaagcattttctgtggaagatctttctactggttaacatttataaagatgatctccaacaatctttttacatttgattttcatgtttttagtttatgtctccatttgctttcaggttcgtatatgaagactggtcaatgcctcacaatgcagcaaaactgaagtttccctattattgggatgaacaatgcttccaatcaccaccccaaaaggatgaattgtaagccgagacttgtgtagccctacaaaattgacataactgtttacttttacagttttctttacaatagagtttcatgatataaactacacaatatgtatggtacttcaatggtttcttttgccattgatgcatgtatggttactaaaatttgctacctaatagaatgtgaatattcgtcactttaatttttttttcctttcttgcatatcagtgttttgaaatgtacaaagtgcaacaaaatacattatactaagtctgttgtatgaatgtaagagtttgacagtaaaaagctggaacagctatctttttttttctcatttccttctaataattggtcaggaaacaaaactttgataagtaccgcaacatttgcaacttggttaacaaataatgcaagtataaaagagaaaggggaaacctttcaaatcaataccaaggtgctagtaaaatggaacaaaagataaaattacattgagagaaatcggttgcaataaagatctgtcaaccaattctttctcatctcttctttttggtcaaggttcgtcgttcaacctctttctcagcaaccaaaacacaaaactctgaaccaagcatttcatgaatatcaacattcatagagcaactcaagtctactatctccatgataacttctacagtaacaataaaacccagagtagacaaaacccgg

SEQ ID NO: 28508 - DNA, 5211 bp, Cannabis sativa
  modified_base (3045)..(3051): a, c, t, g, unknown or other
ctggacctaatagaatttatacattaaatgatcatgaaaataaatcatgtgaaccgtgctacataaaatgttacttctgatttttattaactagtaaatctgattataattgaatgggttttatttagggcacaaaacccaacaatgtggccctcccgagataaccagaatatcccctcctccaagggaaagaggttataactcctggttgcgtgggttattgggcaaattcggctggttggatccatcgccttatcgtttcacatattaccgaaagtggcctcgcgagatgagactttctatcttgtctttcaattgacgacgttcttccgtcgtatgcctaatatccttatgatacttgcaaaatttggttgcgtctcttttatgtctcgcatgcatgcctcatgggccctggtttgcaaaatgtgaccctatgctcatgtgcgagataaatattttctcgactttcattaagctcagtgtaaatggtgtagattggcacgtacttgtcgtgcttcttctaatttttcttgtcctttgctgacttgtttaagttatcattcctctttgaactagaggctcctggattgttagccttagtcaagacggtacttttcgagacagtgttgggtttacttcacgagccagtctttaaaaatttcatctcttttcttgcttcttttttccaaacaaacacttgagctctttcattgaactcgctgttgttcctcactaggcaaccttccaggtcatcccataattcgcctccagtagttgagagatcagtagtgatccatgccagcagagcagtaagctggatactgtcatccaagtttctaaccctcgcagcagctgtgctaaaatgacttaagtaagccttaaacgtctcgcctagttgctactttatgtttgtgagggaagacgcttcaggttgcctgtcccttgctgcttggcactgcttcttgaagtccttagacaactgttccaaagaggtaattgaatgatgggtaaatttgttaaaccagctgctcgctgcccccaaccagtgacgtaaggaataaaatacaacatagattattcgttacattgctggcttgcatgatagtgttaaaattatttaagtgagcgaccgaatctgtagttcaattgtaggacgagacgtgagggtttttgaatccctgggggaattcaatattcataatgtccgaatggaaaggctcaagtacctcgtccgagtcgtatccagattgttttccatatccaccatcttgatacctcttgaatttatcctctaactcattaattcgcaattggataggatcgtctcgcctttgattgagttgctgacaaaggtcaggtttcttctagttcaagtgattacgaagattcgactgttgttggccattgttacttacggacctcgtcctgctcaaggacttcgtcctactcatggacctcgtcctacccgtggacctcgtcctagagtaactttcaattctacttatgcctatactctctcaatcagtaccacgacgagttccgtcctttccttgcattaattgactacggttcttgtgcgtcccgagctagaacttgcctcgtcacgtatcgaatttctcctttaggtacgagttgttgtatgccccctactggggtttgtatgtgccccttacctattggtttgagaaggacgttaactatgccttggcggcaacccatctttcctaggttgagttctaggatttctctcattctcacgaggcatatcctgttccctagtctcgggtcgccttctattctcatttccggttgatcatttggttgctcatttttaggagcatccctagttctcccaagttcttctttctgagcattctgagggtcctccttagttgcctcttgtcttctagttcgtgagctgcaaggtctgcctcgtggtcttctcactttagggtcaagttggttttgggctttgttttcctgtgccgccctggctgcagctgcctctcattccaacttagtgttttgtcagtttgcctcctccaaacgtcgcctgggttgacgattttctagttctaaaatcggtacatatctcgtgggatcataggcaccatcttccatgggttgagcaccgccaaaattcatgttggattcttcttctatggtttctgggttttggccaccctcacgttggcctctccttgaacgtgttgttcgtgtggatcttgtcgttcgtgagttgggtagcctccgtgagctcatcagctcttttccagcacgatgatgaggagtttcttctgggtgagtatcattagttcccctgttgtcattgttttctccaattttagccatggagaaaagtgtttcttttttcgggtaagagggatttttctgagcttattcacgtacgctcgcaatgaaagcaccaaattgttaacacaaattttcgttaacgatataagcctatttttgtgataggattagcacaaaaataatagaaaataaaaataaaaagaataatgcaaagatcacaccaagttgtttacatggttttgtagttaaaattctgaatagtctatgagtctatcttattagatttctctgatacaaaactagagtttttctctcaaggatttttcatccttttttcaatatattatgcccctatttatagtatcatagggtgacagttaattacaatcagattcaaattccacaacaatattttccccaaaattttgggctttaattacgtcccacatatataaatgcggttattattagaaaatcacacagccgcgacgtaaccacttttaatgggtcaatgctgacgtggatttaatcatgctgcaaggtgtatatcgttggagcatctcggtgggacagcaacattaacactgacaacgagctggagttttttcccatgtcattctgaggttgacaatgtaaatctcaacatttctttgattaaagacataacgctccatcttacaatcacagttcttgctgacaaagtgaacttcagtagccaacatcatttgaatnnnnnnntctatctgagagagctgactcgactgagtagtggatctcattgaaagatgtctggagctgattagtgaaggtaccaagagtaagcgttcctataacgaaatggatgtttcgctattcgttattcacgtccttcaagctgttatacttagttactataatatatatattatacactaagtgctctgacaggcagtacgtctcgtcacggcttctctatgtatcgcgaggtatatgcctcgctatgcattaccggtgcccttttcacgaatgtgccttctgacgcaaaatggtttctcgttaatacacgaatcgatagttcgtacatccttgcctcgttgaagattgtacagtctgcaagttataaatatactctattgattctacatttaataagttattccatttaatattcttttaatataatggccattatatttgttgatttgtattcctcaaggttgacacgtgtcatcctctgaagtgtcagccgaattttgggtataacaaaactatgcataaatctaacaaatatatttctattattagttttttgactcaatttacatatctaacaaatatatttttattataattttatctttaaataataacaataagttttgaatattattatgtttattttacatagcacttaaataaaatatttttttaataaagatgatattttttattgaattatattcacacacaaaaaaaaatcaattatacaactaaaaatatacataaacaaaataagaatataactaaatatacatgtattgtatgtaattaagattatggccaaacaacatccactctgcactaaatgtagatttcatattttagatccaatcaaatccgcatagctgtttaaatctaatccaatctaatttgtaatagtgaggattagatcgattattttagtgtgaattactttttattatttcattacaactttaaaatgaagaaaaaaaaaaaaaccaacagtaacataactaaaatttaggtagcgtttggtaaccttttattttaaaattttttaatcacaaaaataaaagtaaaatttgtgttttcaaaaaataaaaatgtgttctacaaacacttttgatttttaattttaaacatagaaaacaaaagtgtgttctataatttttatttttatttttaattttatttaagtctggaacaggttcgggtttaggactgtggtccgagtatgggattggggtcggggctaggggtcccaaggtccagattaaggtcggagtctaaaatattgattaagaaaaaaaattgtttacaaaaattttaaaagtgatatttttttcttttcaaaaaatatttgattctcaattaaaatattagacgtgaaaaaggttttatagaatatggttttgaaaatatttttacttttctaattaaaaaataaaaaactgattaaaaaagtgttactaaacacacccaattttttttaaaaaaatttgattttgaaaaaaatgcgttctataaccacttttgttttcaaatcttaaaaatagaaaataaaagcgtgttttgtatttttttttttatttgttgattttatttaaattggtgttatccacatttttgtaatcatgacacatatattgtaatcaagaaaggttaaggagtcattagttgaccagtctcctaaattgatgctctgagaagataaaggcaccaacttcgcgggaagagtttccgtgaatgggagttccctgactgctagcaacacagagagtacttgtgagccaaagactccctccgttcaaggttcttagcagcaaccgacttagctcgggaataggcataggtattgtgggcacatatgtataatgtatatgctattataaagtatgatacaaaattaagtgaccaattatgatatgggtatcaaaagggtattaaattgtcatgaaaataatgtgcaaataccataagtaaatttataatttgttgaggggccaaattataaatacccaaaactcattatataatgagtctataaataggtagtggtcccaaagaaacactaaggggctgtttggtatgcggtaatggcagaagtgggaatagaaatcttaaagtttcctatgtttggttaggtttttaatattttaatgttggctaagtgaaagt

SEQ ID NO: 28509 - DNA, 2006 bp, Cannabis sativa
atgaatctcaactcatttcgtgtgaataatttcaacaagaaggcaaatgaaaaagtaatggcagaaaacttggatctcttggaggaaagaagagatgcaacccagatgagactagcagtgtattaacaaagtgtgtcacgataatataattcaagagtttgcatgcatgccttcaagactggagacttggtgctaaggaaggtcctcccaaatactaaggatctgggggcaggatttttgggggacaattgggagggcccctattgaattgccaaagtcatcccgcctgggacctacaagttggcttgcatggatgacacggtgatattgagggcgtggaacgtagtgcagttgaagaaatactattgctaaaaaggtgagtttgatgtatcttttagctatttgagttttgaaatcaaggagacagcctgtaaagcatccctactagattaagcttcttcttaattttctatctttgcattctaatgtaatgaaacaaagggcaacccaggtgcccttcgaattgttatctagaatacaaggatattacattggaattagtcaaccacaccttattcaaggatgacaaagtgatatccctcctctttcattgaacaataacaacaacaatgaaggagggaagtatgtacataaaaaaaaaattgtcgcacaaagtccaggggcgctggaccattagtaacgctgcatacttggaaaggtaaggaggaagggtaataaagaaaaaaaatattttttctaagtcgtcaaggactagctatcctttcttgacgaaagaaatacacttctcctcacaaaatttgccaagcctaaagagctcttgaaagacgcttgtagcctaatgttgaaacgagagggatgcctctcaaacgtaagcaaacacttacaaatcaagagggaacgcagttaagtacaataagcccccatccatccaagtaaaaggatggagaaataataagaggatgagattgcttaaagagccactccctcaaatggatgtctgcttaccacagcgaggaaaatggcttggccaaagagtgacccccagaatcgctcggctaatgtcagttacaaaagtttcttggccaaagagtgacccccaaagtcgctcggccaacgttagttatgaaagttgctaggtcaaagagcgacccttagagttattcagtcaatgtcaagtaaaaatgtagctcgaccgcatgggggctgaggtcgctcagtaaaaaaagaagaagagagaaaagaggattagccaaggtgaggagaatccactacaccaacatattgtcgtgaagtaagactcaagtaagggaagcccccaatgtaaatcgagcacttcctcgaagaatactaagagggtctcactctttggcaaggtaaatttcccagctcactcagtcgacaagaacacttgaacgtattcttatagattggggagtaagtgttaaccctaaaaattagcgctgctaacttccaaggttagttaattaatctgagagtgattaatggaagcacattcaacaagcttacctactcggtaggtatttcataaagtcgtcgttaatactctcaattcttgggttgcaccagtacgatacgatgaatgaccccatggtggcctaatgaagaaatcataggcgtagagaatgcatgcatgtgtgcatgcaagtatgtgctcccgagtgtatgcatgcaggtgtgtgcatgcatagtgcgtccagatgtaggggtgcaagacggaggctcgcatgcaagccatggtggtgcatggtgtaaggcgtgcgagccgtggtatggtgaggggtgtgtgtgtgcgagttgtagcctctggggctcgcatgcgagcccaagtggggggcacccatacgagccattgtgtttcttgtgtgtgttgtggaggttgtgagctgtggcgcaaggagagagcctcgagggctcgcatgcgagccatggtgttgctcgtgtgtgttgtggaggtttcgagccgt

SEQ ID NO: 28510 - DNA, 2243 bp, Cannabis sativa
attttagaaaataaaaggtctattttgttatttaacaaaacacaaagtccaattaataatttttgtaaaacagatggtccaaaatagtatttactaacttttttaggggaacaattgcttaccttaatttttctaaggatccgctcgtgcttagcatgagtttttcacgtagtttaatgcataaagatgtgaaaagaaagaaagatacgagtgtttgtaagaagaaaataagagaaagatgaccactaaaccaaccacaacacattagtgctgtccacaatcgagtgcacattattgtacatggtgccacagtaacccacttatttccaatgcaataataagaacaagtcagcaaaagaaaatggcaatgctcttatactttatacactctctctcagtctcaattttcaagtcttaactcctttgcgtgttagtcattagtcttctaaattcaattcccaacaagattgagaaaatggcagatctagcttacattttagctgcaaatgtgttggacaggttaggctccattgcttacaacaaaattagcttggcacatggcatgaaagatgacctcgaaaagcttaagctaatcacactcagcttaaagatatattcgacgatgcagtggatgtattggatgaatttgagtgcgaactacaaaggagaaacgttgtccaacaatatgcctctttcgatagaaaggtacgtcgtttcttttcgtattccaacccacttgcctatcgttttagtgtagctcatccaattaaagagataaggaagaagttagatgaggttgataagaatatgagacagtttcaattgatcaaaaccccattgaatgtggaagaaagtttcagagaaactcactcctttgttaacctttcagacgttattgatagagatcgtgaaaagagggagtttgtagatatagtattgaaggacaaaactcaagaaagtgataatcaaatcccctgtaattgggattggaggtttaggaaagaccacacttatcaaaatagtatacaatgatgatgaaattaaagaaaagtttgatttaaaaatttgggtatgtgtctctttggatttcaatgtgtctaaaatagtaaaagatattcttatagatgcaactagcaatagtaatgttacaagtaactcgcctagtttaaaccagttgcaaaaatccttgataggcaccttgaaaggtaaattttttttacttgtattggatgatgtatggaatgaggatttttcaaagtggcaggcattggcagagttgttatcggtgaggaaagcagaattatagtgacaacacgaaacaatgtagttgcttcaatcatgggtgaaacaaatacgtatgaattgaagggtctccttgagaaggattgtttctcattatttttcaggtatgcgtttggaagtgaagcaacagcagctgagtatccacagctcaaacaaattggtgaggaaattgtgagaaagtgtggtggggttcccttggcattgaagaccttgtgtagtcttcttcggttaaagaaatagttaaaagaagtgcaacgtgacattttgccgatattgcgattaagttacaatgcaatgtctccgtatttgagacaattgttagaatttgggaatataaggtgaatggggttctatttcaaaaccaattggcaatgggaggagtagcccatttctcttatatattctattatatttccacacattggcaatgtgggactctctaacaacaatgttttgcttatcgctcagtatttaaagaggatgctacattgccccatatttgtttgattaggatttggatggcacttggaatgcttccctcacctaaaaacaaagagaggagctcgaagatatcggtgagtcatgttttatagagttgtgcaacagatctttctttcaagccgatcatgatcaagattattttcgactcatcctagcctttagagtgcatgatttaattcacaactttgcatgctcaataacccaaaatgagtgctcaattataaattctgacgacgatagagagatatctgatctggtaagagatatatttaagagagttgttatatcaatgagaataacttgaaaaaactgagtaagctaaagaaactgaagtgtatccatgttaagtgtactgggaagagaaggatgaagttgtgcagttattcctttctacatgcatctcaacattcaaaaatttacgagtgtttgatttatcagaa

SEQ ID NO: 28511 - DNA, 2363 bp, Cannabis sativa
tgaaatagagtgttatttagggcataaaacccaacactttatggggaaggagtgactctctttttataggcaaggagagacactttcttgaggagagctttgtagtatttcagaaataaaatcataaataaataaatatattatataaaaatatagaattacgtgtgtgttaaatgaataaatagataagattatcatcctactaggataattatatggattaatgttattagtagaaatatgagaaataagtttgatttattaattaggagaatacttttggaatatatgaaatatgtatatcctatttgtcaatgtaaaatatctttagatctggcaatcaagaaaaacttgattgattggtcaaaaatatcacatcgatatgaattagttgtgacattggaaagtgtatgttactacgggtatgttatccatgtttctgggactggacacgtggccttcaaggtgacatttaagactcatcagtagaccctcatcagggatacgttgggccaagcccacctggataagaccttccgagtgttaccttagttccgtgcacatagtaccttccgctctcgatagatcgaacccagaagacagctccggtatcacgagcttggaggaaaaggagttgcgttctcggaagactcttccaatttccctgtttgttcccttctataaataagaaaattccagttgtcagattaggccaaaatatcatatcgcggttaaagaagagacttcccataacaagcgcagggtagttatttcaaagtattctcccgttataatcggatacggttttggcctgatcaactcaagtctgattcgcctagtcagcatgttgtattcttcatgggctggacttcatgagtaagcccaaatatattgtttagtggtaaactccctagtagaaggaaaatgggaaaccctagtgtaattctccaactactataaatacccaactaatctcatggattaggggtggaattctctcccgtacttttgctcaggcaaacatacgatcatacatcttgtatacctttgagaatatttacaagaaaacacattactatataaaacggactcgtggactaaggctagttaatgccccaaccatataaaaaactgtttgtcttttattatactttcttggttgattattgtttctttagttcttattattttgttctgtttctaaaaaatctcgagaaacattttagtgctttcattgagagctgaaggaagcagtgaggaccatcctccgattacgtttacgaaatcatggccctcaccagaaccagtcaggcctttgttacaccacccctggtgctaaagcaggagatgcgaatgatcctctagatgtgactagtcactagtagggtcgttagaacaaagattagaatgacgacgctcctatcgtggaagatacggaagaaagtagttcagaggatatcgaggtaaataatgatagtacaccagaggatgagcaagaagaagccccttaggacaaagccaccgagactactattggaggaaggaaccagcctgacgagtcagacctgtgaccataacgccatgacatttacaactggtgcaacataggttatctcaacaagatcaattcaaccagatattgcttggcaagatgactagaatggaggttgtaatgactgcattgactaagacggctcccaacgtacaagcccctccaacaacaaatgcacttgaaaggcgaatctgaaggaccctagaacttcgagtgtacgtaaagataaaaagtaagggaatcgccactaaggagccaaagaaggttccttccatgctgcctaagaagtctaaggccactgaccaacttcaacagaaaaggaaaggaaacaacgcttcagggcatggagaccaaacccattctagaggtagagtcacgcaaaaagataaagcagacactggaatctagaagacgaattgacgaaggaaaatgccccctcttagtgattccaataatcatgaagagtaagttgaagaagtacatcattatcggatgatagtggcggaagtctgtcgaccaacgatcttcgaagaaagctggatgcaaagaaggaaaaggccaaggctgaaaaagcaagaccccgtggaaatgatctgaggaatcacatcaatgatcatgttcgcggaagagaatcctccagtgataaaactaaatgccttgaatgcaaagttaaggagttgatgaagatcattgaaaagatctctagaaagtgaaatggtgtcgtgtctgactctgaggaagaggacatagagccttgtgtgaaaataatttttgatgcaccattgctggagcatttcaggatgccccagat

SEQ ID NO: 28512 - DNA, 2843 bp, Cannabis sativa
aaaataatttttaatcttttattaaatagtaaatctaattttattgaaatgggttttgtttagggcacaaaatccaacactgtagccattgaataagttgtttcaatgggattgcccctccttgtagtcagatccttcttcgtgtgttttaaggagaatcaaaacaacgatcgtgttcttttactttcaatgaaaacaccaaaatattaacatcgcttttagccaaagatactgagtcaattaaagcgattagaatgatagataataattaataatgattatatgaaattatgctataataacatagcgatttataaaggttcgacccggtgatagttgtaatagcttactctccttttgttgtattacttgtgagaaaagaagcaaggagttcttgaactctctcgaaagctcacaatttttacagcataagagctctcttgaacaaaagattttagatccctgaatagtgaaatgactccactatatatagggagtaattacatcaattagattttccaaatcaaatcaaaaataaaatgggaaatttgtttactttcctagaacagatcaaactaaaagagaaactagaaaggtttcttcttatttcttgttggttcaaatctatcctaagaaatcagggaggcgatcgagattcaaatgcttgaacatttatggaaagtatctctaaaagtattcaagccacatttaccctggcgggtgtatgcgagctggttgtaaagttgatgatggtcagactgtgtaatataccatgttcggatattccagcttatttttcaaatgaattgtttacgaatgataaatcaacttggacaacacatcctggagcgtactgtatgtccaaatcataaaattttctctacgtgtcatccaaataagtgtcacgttactttgtgcaaaaattaggataacatatatcatgctagaatttatgatgaaagtgattgtttaggttttttttttttttttttgataaatcaatgaattatattgctcaaaacaaatttgaactaagagcaacccaaccggtcctcaatctatacaaaactttctgcactatactgctatattcatctaattacaaagcaaagaaccactctctatctacacttgagattttctttggcaaaacaacattaatccgagtccttagactccacttaatatcacaaacaacctgcctttgattgatctgttcttcctgccaaatgagttgatttcgtgccttccagctactgtaaacaagtgcagcaactgctgcagaaaaaacctactttttgaattttgacacctttgccttctcaatccatcgaaccaactgcaggatgtttgttgcttttgctttccaatccagcaagtttttaatctcatctaaccaatggctagttgtcttgcactcaaaaaacaagtgctgaacattctccttgtactcatcacataggcagcaggtttcttgaaccttaatgcccattttcaccagcctatcttttgtttttaatatgttaagcatagtaagccagaaaataacactatgttttggtgtattcaatcgagcccatacctctttactccaagttttccttgcttgtggattgctgaacattttgtaccaagcagctatgctatatttgcttctctgaaactaagcaatattagcaacaaaactgatgtggtttttgaggttaaccagcttcttccagtaccaactggagtgtatagaagcgttgtaaccccactaatcttgagctcttatgtatacactattcacccatctaagccataagctttcttcattatttgcaatggcccaaatgtacttggacattgtagccttgttccaaagctctagctttctgatccctaatccccctgaagatttaggttgacaaacattatcctaagaaacagcccctgctccatggaaaacaacctgccctttccataaaaaagctctgcaaatatcttcaatggacttcaaaattctttttggcataatcacaatctgactctagtatgcttgtattggaataagcacagagttaattagagtaattcttccagcaaaagataagttccttgaactccacgttcttattctacctgtcattctttcaaccaaaatctcacattctttccttgaaattttccttgcacaaattggtatcccaagatatgtaaatggaagctcttgtctcataaacccagaaagttgcagaagcttattcacactcccctgatgcatgttactgcaatatatagtcattttactagcattggcctgtagtcccgaggtaagagagaagagcttgagtgcctataacatgtatagtacacttgtgaaatctccatggctgaaaagtaacacatcatcagcaaaagccaaatgattcagtttaagatccgagcatctattatggaaatggaaatcttctttctcccctatcttccccattaatctagagaagtattccatacccagtacaaacaagagaggagacatagggtccccttgcctaagacctctcctagattcaaagaaaccatgtaaggttccaagagagaacttaggagtagtgatgcagttcataataagttggatgaagcttctagggaagtttaggcctgttagcacttcctctaaaaagtcccactcaatagtgtcataagctttctggagatcaagtttgatcatacaacttggtttgtttgctttcctgtaataatgtcaaaccaagtcctgacatatcataatgttatgccctatgaatcttcctttaataaaacccccttgtgattgagatattatttcaggaagaatgtta

SEQ ID NO: 28513 - DNA, 2249 bp, Cannabis sativa
caaatctaaaagtgggataaaaagttgtaacatatcttttatcccactttttatttttgttaaggataaaagtgggataaaaggtctcctttcttgtagtgataagaaaaaccatcatctaatttcattttttctttccattttccttttttggtgatagatttcaaccctatttctgaagttttagggcccgtaatttaaacttttttacacaaggagatggagaagatgaagaacgagttatatttagaaaattgtagaaaaaaaagagagagaaaaaaaattggggctgattctagcagttgaagattgtgacattttgatttatttttggagatatttcttctttaaatcatgtaaggaaatttaaatatgtagctgaaaatgaaaagaagaagaagaaagaagaagaagaaaagaaattgaaaagataagttggttgagtaaaaaaatttgaattgtaataaaagttaaatttttttatttttgatgtaaaaattcgtaaaaaaaaactgtgttttggtgtcaattacaaataggtcaatttgacgattaaaaggtatactgttgataacttaatatgatggacacttccatcaagaaaacatataataacatgggatacgcatatacggggtagcttgtcatccaatcaaaataaagaaaaagaatccatctgaaaaacttgagcccgaataaatggtgctattactgccttgctctagctgtaaaggcttcaaaacaagttcccataaaataaaacgagaaaagaataaaagaaaaagagccgccaatttttttttgtttgaaacagccgcatcgagccccataataaagccttctcttcagtttccaagttccaaataagttcccatataaaattagagaaagaaaattaaaacgttaaacgcaaatggaacaaaaaataacacaaacccagatcgagcacgttgtagaagtacccaatgagttagaaaaaccgaagcctaataacatcatcactaccaacaagaggttgacacggtcaacaacaatcttaaccagatctcatgctggttactttcggataagtctctctctaagcagccaagccttgttatggaaaatcttactagagcaaaacgacgacgttcattctttacaacgagtattattccacatggtaccctcctccagcagggtcttcattattcttctatggtcttcagcccttttcacgttactatctcaatcacttctctacctcctcagatgttttcttcatttcgaaattgtcaaagccgagttcttacaccatgtgggggttaactacctatttgctccctggatttcttggcttctcttgcttcaatcctcaccgttcatcaagccaaatgagaatttgtactactactactacctagtgttttggtgggtgttggtaatcccaatagtaatactcgatattaagatctatggccagtggttcactaccaaagggaagaggtttctatcaacggtagccaacccttcgagccagctgtcggtgatagggaacttggtggcggctggagccgcggcgcaaatggggtggattgagtgcggtttgtgcatgttttcgttaggcatggctcactatttggtcctattcgttacgctttatcaaaggttttgtggagataacgctctcccggtgatgttgaagccggtgtttttcttgttcattggtgctcctagcatgggaagcttggcttgggcctccatttgtggaaagtttgactatacttccaagatgctattcttcctctctctttttctttttatgtcattggtacgttaattgtatatataattactatattattcataaatgtgaatgtgatcgtatatatatagcattgctattagtaaccagtactagtactttattgatatcttgccttacgattgactagcgatactttttaaaaggtattatattaaattatatgagatccgatattaagggtgataccctttaacatcccatatatatatatatttaattttaataatttttttttctttgctggggttattttaataactttgaataagtgaattgatggtacaacaggtttcaagaccgacattgttcaagaaatcaatgaggaaattcaacgtggcatggtgggcttactcatttcctttgactttgttggccttagcagcgacggagtatggtgaggaggtgaagagtgggatatcagatgcattaatgctagttttat

SEQ ID NO: 28514 - DNA, 2695 bp, Cannabis sativa
gaatccccttgttttggaccaagttgttggcgaaggtcaggtttctttcgattcaagtgctctcgcgaatccggttgggagtaattgttgacaaacctcattttacccatggacttcgtctttgagtgactcgcggaattactggttcccatgctttctcgatcattaggtcgtcaagtattttctcttgagtgtgggtccttgaccgccctgaggtcacacttgcttcttcacggaccgtttttcccctgagtgtggtttgtcgtatttccctcattaaggtctgtacaagtcatctctcaatgggttcaggaagaacgcaagcaatttctcacaagtgacctacactctctagtcccaagatcctcctcattttcatgaggaatttctcgttcatcaattttcggttgcctcccactctcatttctgtgagagggttctggctgatcattctgattttcacgttgtatctcattttccctagcttgttcttctcgggcattttcgtgtctcctagttcgtgagccacaaggcttgcctagtgatcttctcactctaggttcacgttgattttgagtgttggtcctctgtgctaccctagtcgcggctgcatcacgctctagttcagcgttctaccgctgtgcctcttccagacaacgtctaaggcggcaattttttgtttcataagtatcttgtcccataagctgagtgcctccacgatcgggctcttgatccttcattccagggttttggccatcccacgctgagctcttcttgtgtggtgtattaacatttaaggagatggtttttctttaaaagaaaggaggggtttttcagagctttttaacaaaggctctcaatgaaagcaccaaactgttaacgcatattttcgttaaccaaaatttgagcctaatagtgataatttcacacagaaaagatgaaagcaatgaagtaagagacatgaacacaagggattttttacgtggttttgcggttaaaattcagaatagttcacgagtcaatcttcttggatttctgatagtttttcagagcttttcttgaatgatttttttgtccctttttttcattttacatgccactatttataatcatatagtaggtagttaattacaaagttgattgtaatctttacaacatttacccctgaaatcatggggattgataacatatcacgtagtataattgcggtaattatttaaaaatcacacagctttgattttcccgcttttactgggtcaaaataatcgtgtatttaaacacgtcttcaattgtagcgttctgggatgtcttgacagaaacttggttccaatgaccttgatagcgagctggagcttttctcccctatcttcctgaagtcgatgatatacgcctcgttgtttcttgagatcttaacgcttcattgtaacagtcacagatcttattaacagagaatttctcgaagctcatttgaatgtttagcttctgtctcatcaagattgtgaatctcaatgaaaagatgtctaaagttaactggtggaagctacaggaattagccttcctataacgggatcaacgcctcgcttattgaatccactttgactgttagacttagtttgtgcattttatactaagggttttcacagtcgatatgcgttgttttttccttcccagatgtaacgaggttgatgcctcgctttatgcattcaatgacatatggtttctctaatacactaaataacagtttgtatatctcttcctcgcataagaccttacagttagcgagttgtaagtatactctactacttatgcaattaatgggttattcaattaaaagttattttatcgatccgtattccatatcttgacacgtgtcctccactgagatggtagccgaattttcggtataacaggtagtgaaatatttttctttagatgccaattaaacaatttttccttagtagcaaaatacattttatttttagctaccgaattcctctaccaattgaatttagtagcaaaataatattttcagctaggggcaacatctaatccaattcaattgaatcaaactcatccaatttaatcctattataaaaaatcagatatctaattaggattagatgttaaaagttgaattccaattgaatttgattagctattggatgtaaatctcaaaattgaattcaaaactaatctaatctaattatatttatatatattaaaaatattatttttaatttatttatatataataaaaaaattaaaattaaatgtatgtatatttagtggctatttattttttggagttgaatttgtaacacttagtgattttctatatttacctcatatttttttgttctattttattacttgtcaatgttttattttagttacttcagacttttagtcatatttttatcgttaggatgatatctttatgaagtattaatcttaaaagaatggtaatatttagtttttaggtattttttctatatttttaatttactattaaaaattaggtatgttgatgctgaaaaatgactaacaccaacttgctagatttcaagatgaataatgaatgtaagtatataatttagagagatacacagaatttaaagtagttcacacttagtttaataaattaatttctagataaactattgtacttttcttgtaattaattaaatatagaatt

SEQ ID NO: 28515 - DNA, 1417 bp, Cannabis sativa
gtgactatggattgtattggaagtatccagactagttagaatattaggatgtcaatttggtgggaatagctagaattaccaaactatccctagatgtgttttagggttaagggtatcataaggggtaaaatagtcttttggggttagataattatttggttcacaattagatttagtggttgatcattaaggaaaaaaaagataataataataaatgaaaggatatataggaaaaagggttagacaggattagaagtatcaggtatatacaaggttccatcttctttctttctttctttcccttcgtgccctaggatagcagcaacaattaaagaattttgtaagcaaattcttaatctcttggctgaattaataggatttagaagtgatgtagaaattagggtaagcccttctcacttttctcttgcttttcttagattttaggttggaattttggtagaattcttaagttcgggcttgtatgatttacttaagttcagagtttgtttcaagtgtaatattaagatttgttcaagttctaattgggtgatttctatgttgtttagcttcgtttaggaattttttaagtttaagccccatttcttgaattctagtttgatgatttgagtaatttgatgagttgtgatgaattgagtatgttgtctttatgatactttgctgttttggagctattacataggtttgggaagagtttggttcatgtttggggaagaatacccttgaatttgtggcctgccagaaccggtcgattggttggttctggtgcagcagatcggtcgaccggttgccctgcaggggaaattcctagattttcttcaacttttgttttggctaggggtggtgcgtagtatctgtttaaggttgtttatgtgttgtatgacctattttgaagttgttggaagttaggttcttgtccagtttcagattggggttttattctggagttttggtttaaggcatttactgagttttggttgtcgtgacattggaccgggatcacctagctttgtttccactcgggttggcccgtacacttacattttggactgaggtaagaaaagatttaatgcaccattaagtagctaaataagaatcagttaaaatcattagtgccttgattaagatcgagattaatgatatgtattcgtagtgactcgactgtggtcgaggtgataataaggaacgattattatcatttgtgacttgaatataatcaagataataatgagaaacgattattatcatgtgtgattcggttatgaccggggaaaagacacggttattaccgttatcatgaataataaagatatggtcattactgttacaagtaattactcttgaaactgcgaataggtttcttacttatcgtttgtttcatcgggcaacgatagtgaca

SEQ ID NO: 28516 - DNA, 3072 bp, Cannabis sativa
atgaaatcctatttgtgaaaattgggttttttaaaagttaaacctttttgcttcggtggataaccgtggaaaatgtattaacctcattttttaaccgagcaaaaataattgaccttactttttcattgaagcaaaatgtaatagataatttttaaaaattgcacttttttcctcagttcttcttttagcgtcggggaatgagctgatgctaattggtattttttagcttcagttatactttgaagcataaaatctctgcctattttttactttggtcaaccattttggtgtgacgcgttgaccgacgcaaataaggctttttgtagtagtgccaatattatttttcttcttacagtgagtagcacattggtgaaagtaggatgaatttttatcacccaacttgagccaaaaattctttgcacgagacgactaatacttttcatctttatacaaaagaacatccaactccttttttgtcttgtcataagcaggcctgaaatcaagattagaataaaaaacctctacctggttcatcttaatctaaattgcttcacatgttcgtttaaacatcttcccattccactcattcaacgcacccgtaacaccacgaattttgctttgaacacctgaaatatagatggaaaccaaagcctcccaataaataacaacaatgccacgacactaagatacatctgcccaagccatcttaaaatgaaaatgacttttcagtcttggccttcttcgattatcacaagcacaaaggatataagtcatatgatctatggtctgaatcccaaagcttcaaatgagagacataagaattaggaaacatagaatgctaactactgttacaatgcatacaatcatgtcgttcttgtaagaatgaaccatcattgtgcttattacaccaagtgaaacgtgcaccctcaaatcccatatcatcaagatcacatttagaaaatagcattacgaaacccatccataagactttgagcacacaaagaaccccaacacttctcatgagaaaagagagtctcattaaaattaccaccacctaaccaagggcccgaatagccatcgaccaaacattcaaaaagtcaccaaaactgttgtcgtaagcttgcatctggttgcccataaaggccagtataccgccaccaaaaatcaaaatgagaacaaaccagaacatcaatatggctacgagaataccccttaagaatcacatccacattactactccaaaaaagacacaacccaccactcatccccactttctctaccaccaacttgccaacaaaacccagtcgaacatgacttcaagtattgagtgagtcacaaaagtctcagacaagaaaatattatatggcaagaactccttgataagggaatggagtatttgaacgttcggtcatcccaagaccttggacgttctaagccaagcaattcataatgctcggtggctctaatccacagggtccaccaaatcagaagtaaccacaacatcttttccagccacaacatgtaaaagagaatacattaccacacttattggaatgtcacacctaccatcaaaatcaacaacatctacccaaacctcatgtaaattagtaggagccaaaataagcgataaacaatcatctttcaagtcacgcttaataacctttttaggactcttagactaaactttgagcactccatatttatcttgaaaagaaacttctttgtaattatttttgattgcctatgaagaaatggatgtaaccctatgcatgacatgcatgagagtcacgtgagaagaacccacaccatccatcaccacgtcagacctcaacctaaggaccttcgaattagccacaacactcaccccgataacaccatcctccttttagcccctaaatcaacatatgccagtctaggttttgatgcaaaatgagtgttagaattcccactgccaggtaataaataaccgttatcaatgggtctactcaaagtgtgaacattagcactatttttagaaacagaatcagcacctctcccattacaaggcaagtataaatttgtggtttccaaaatagaagaagaaattattatcaataacaacaaccacacttgacacgggatgccatttaactgtatcaccaaccatgacacactttccttttttagaatttgacaccggagatggcttgaatcccgacgcaccaccgccagcaaccctacccctggtcgagagacaactgtcgggctagctcgacttccccacatgcaccacatcaccagacgaagacacccaaaaatcgcatccacgagactttttagaaattgggccagttatcttttcgggatacagaacccgaatccaaaccccatatttcaattgatctttgctgccaatagacttcgagttcaataggcagttcttgatcgggtggcctaagattccacaaaaataacataaatccgagagtctattatactgaattgacttatgaatcaaaggcttatttagcgccaaacaatgtgtaatcacacgtgctagaggtttccgaatatcaacactcacgcgaaccttcatgaactcaccatggcacattccattcggaccacataacacctctaacacctcaccaatcgtctttcccaactaaaaaccccacgacttattcatacaacacactgtcaccttatgaattagatccaaaatggagcaaaataaaaggccatctcagtcggatccaatacgtcatcaggttctttaagcgtaagtaggcaatgctcaaagacctaaggaccaccctcaagtacccgcttacgatccataatttgaatcaaatcaaaacgaaacaaatgcattctttccctatgcttcaaccgtaagggacccctggattctccaaaaagttattcacaacatagatcaaatcattatgatcgatagaatgcgtctaccacgtcataatcatcatcaatctcatgccatcgtattatagaacactacaagatcgttgtcgttcatggtgcccataacaccgctgtcccaaccaaccaaaaatcggagacagaaaagtgaaa

SEQ ID NO: 28517 - DNA, 2257 bp, Cannabis sativa
  modified_base (886)..(897): a, c, t, g, unknown or other
ataaatttaagtcatcactatcattttagtgagttgagtgattgcccacacttgtcatgtgtatacccaggactttgaggaagactatatagaacatcagtcacatatttagagaaaagaagattcaagttcagtagtgatagtttgctatagaaaggattcgagggtgagtattgagcagaagaagtcatttatttctctgtgtcactatgtaagtatactcaaacttaaagtgtttaatttttgttttagaaaatatgttctaggtagttcaataattaagttaactattgaaatatatatatatgttagtaaataaaattttagtaaaatatgttccaacatcaaacatatgttaaaaatactgtccacttcatccagccaaattttttgattaacagatgcttattatacaaagtttgagtaaaaagatagagggtatcaattttgtaaagtttttatataattttcttgtatatacttttttttaataaagcacaacacttaaacaattataaaattcttcaaatatataaatgagtaaatattattttgaattatgtattttgtaaaagttattaattggaccctctgttttattaaatgataaaatggaccgtgtattttttaaaattgtacaaataggaccctaaattgattttttgtcaaaataaaacttaataataatccgatctagagatgttatgacaaaaataattatattttcagtatctgttcatgttagaaattatctttaagttgattatattaaaatataaaatcattgaaaattgagctcggggtcctacttttaccattttagaaaatatagagtctattttgtcatttaacaaaatagaaggttcaattggtaacttttgcaaannnnnnnnnnnnaaatagtatttaccctatataaatttagaattgttatatatacatgcgcttctgttttatattatagattttaagacattatgcaaaattttgagaaattttaaataatttataatataaaaagtattgttcaaacggtctatttcactcatgtagaggtacgtgtgtaatacaatatttaaactttttttttaaggtgttatttttttttttaacttaaaattttataaaatatcttaaataattacaatttatacaattatgagaaaaattaaaataaaaaattacagtactttttgggtgatgcactgttgaatttttctaaattttattattgaaagaataatatggacaaaactcttaccaattaacctaaaacatcaataagtgtcgttggatactgacttttctttttcatataaaagataactaatatcatcacaacctatatgctgccataaagccactgaaactaactcagtgggtgaggcaatgcaagggtgggaataataggagataatatatatagagaaatttatatagtatattaacttttgttatttttttacaaaaatattgccagatgatattttttacttttttactgtattttttttataagtttcatactgcagtatactgtgttaagttttcactagtgttcaactgatatttttagttgttctattattgttttgagttgttctattttatgttctactagaaaaaacaacacttttagaaaagatttgtgtgacaatatttttataagttttcctaatatatatggctgatcatgacaacgacacactgagtacccattgtgatcgtgggccaccacttcggtaggaaatcggtctatgtagagacttgtatgtatgttgcgtgtgaaaataattttctacccctaaattaaaataccatcttttcttatgagtttgaaacaaattgaagtgttgtacatgcatatataatatagatattgttgatgtagtagtgtgcttttctaccgtgttggattagtttaacatttctatgcgtaatgcgtacttttgttattcaaagtctttattagataataaatcactagtgcaccttcacatatatacgtgggacaaattatcataacttcatttttgttagttgttagattaaaattattggcttatgttatgtaacaaccattatatgtaaacggaatgaaaataattttttttttttattttttacataaaataggaataaaattgtgtacaatccatccattaattttaatagctgatacattaaagggaaatttacatggtatactaatttttgctatttttttacaaaaatactgccaggcggtattttttac

SEQ ID NO: 28518 - DNA, 1722 bp, Cannabis sativa
ataataataataataacattaaaaaatagttactttgtgaaaagataaaaaatctcaagaagtaaaatccattagaatatttcatagaccacaaatcatagccacctatttactatttagattgaaaatcattcaattatcttatgtgataaagtaactatgaattgaaataaatttgttagaagcaaccaatctatgataataaacaagatagcatgagtgtgaaaaaaaaaaaaaaattgaagggaaatattccaactttgaaaattgcattttaggtcatcaatggaactttgaaaaaaaaagggaataatccccaattgaaagtaacataccaccaaaacaaattaggctatcaaatgtcaaatttattatatatataaaaaatccaacacaatcattggaatttggcaaggatgttatccaacaaaattgagtaaaaattgtagtatatgtttattttttacattctagtaaatgatttgttatttttctcttgtaataaatattatttgatatttgatatatattttttgaatggtattatttgatatattagtatgataatgtaggataaattttataatatttttattttaaaggtgtatttatttgattacgtgaatattttatttgacatatgcttatttgactatgtaattatacggtaattaataagtcttaattattttttaattcttacgatcttatgagaatttaatataattatactatataattattaaagaaattcaatttaaatattacttaataaaaaattatttttctatatacttattacttatttggcttaataagtctgtaaaatttataattataacctcgcattcaaatatcttttgtaattttaaatatattttaattattaattatattatttggtatttgtaaagttatttacaaacacccaatatgtatcaagtaattagtggaacgagacagggaacctgcgacttgtttgctagtcgtgaagacagtggtttctttaaagcaccatttgtattgattgagagcgattctaagataactacaaaaataatgaaaggtgcttatttcagttggagtattggtaactactttcatcaatgtaataaactctttactttatttttagattgtaatttctctactatttttatattttataattttgtggctcataacgtagttaaaagaaattttgctcaaaacttaactgatacagttgagttatcaataataccagcaaaatattatctataatgactatgatgtctaattctatcctttaattataagggaagtttttatttatataatttttaaagtataagattataaatatacatttttttttaaaagttattttttggaaattttttagaaaaaagttaaaatgtattaaaaaaaaaaacagcataagtatctagttatccccttatgttaattggttatcatggttacttttacttaattttcctatattttttaattttttttcttcaattttttcataaaataatctttttaaaaagaaaaaaaatttatatttttgcacaaaaatatataaaaacccgtaaagtttataattccctctttgtaatttacaaaggcatattaaaaaagggattatttcacaaaaacataaaaataacaaaaaaattacaaaaatacggttttacggaattttaaacatttttacgatttcttttattttattta

SEQ ID NO: 28519 - DNA, 4204 bp, Cannabis sativa
  modified_base (672)..(679): a, c, t, g, unknown or other
acttttacgaatactaaatccaaccttataagcataactattataaaaatcatatccttcctcttcagtttcaaactccatacccacttttggtattatttcatctataattttagaataaattaactctattcttgtttttccatccaaatcgctactacaattcattctccaataaaacttaaatctgcaatatataataagtccatgtatagtaaatttaattttttttttatcacaattcatatttaataaattaatgatacaaataacatcaaattaaaagtaaacataaacaatattatatatatacaagaaagttcatgttctatgacatacctcttttttttttcttctttaaactcaaaagattactaaaattgtgagataagacttcccaatgtccatatatgtagccactcctttaaacaaaaaagcaaaaaaaattgatttgttgctatagaagaataggatgaatagtgatgttcagtgtttaaaaaataaactggttatagaatataaaaagtcttatataaaaatgaatgaatataaaaaattgattaaaatttaaaaaatatatattaaaaaggatagtttcctttctcataggtataataaatagtgagtcccattggtctttgaaaaggtctcatttattattattattattannnnnnnnattattattattattattatagggaataacaaactaacggaatgaatatatgataagtaagtgtctgttaagtcattaatgacatgtattgttttgattggttagacagaggaatggacaccatattttgacaaagaatttgcttccaaatttaactagttcgttactttttcttcattcaattatttcaaacaattttgatcccttattgatcatttacagaaaaagaaagctatgatgttctcttgatgttgcattgaaatgaaagtcaataataaaatttcgagcttatagacaaaattggagaatgtttttaattacttatccaaatagtttttaaccgacatgttacttttattcagttaatcatatctagtgatccaaatagttttgatagttaagatttgattattaaaacacaaaatagacacgttaaggtctacttaacactaatattggagttatctcaaaattttcataaacgcatatagaacattgctacaaggcaccataaccatcttataccgaaaagttggactaataacaagcattatgtcaaaatagtgttacttaccatttgatgccccttagcaatacatgttaacaacatggcacagttgatttaaaatttggcccccaaaatgcaagctattttggtcttctcaagacagaaaagtttccgtttcgaaaagaaaaaaaaaaaaaagaaaaatttaattggtagaatatttccaaccttagcccttttaggccttcaagtagacatattcaaggataagaaaaaaaaatgtttcttttctaacaaataattcatttcccaattgaagatgcagtcacttccataacttatccaatcacaaacagaaacaagaccctaacacttcataaacagaaaaaccaacccaacagcaggttcattaattccgcagaagaggacactatatcacaactaatttttctaacatgaaaaatactaaacggttcatttagaataaggataacaatttctaaccctatgcaggctgacaaactagctttcccatactacaacactaatgtggttttcacttcctctttttagcaggtggctggggagtctcttcatcctcgtcttcatcttcttcctcatcctcgtcttccccatcctcatcatcatcatcatcgccatcatcatcttcctcatcatcgtcctcgtcatcacttcctccttcaccattggcttcagggtcatcttcaggatctgcttcctcatcaccttcttcacctgagaagtcctcatcacccgcgtcatcatcctggtcattagcatcatcagcatcctcctcatcatcgtcatcctctgtatcactagaatctttgttttctggaacagtttgcttcattttgcgaagttgatcgaaaggaaacctaccaaagtaagtaacacccagataaatttgatatcccatcaatggatgaatcatataagctacattagggattattactacctttcctcaactgcagaaagtctcaacgacacattggcctcattcagcagtgaacaagtctgaaaaatattttgaacacatgaaggtaagagctcaagagtcatgaagcagaaaatccaagaactacacagtacacaattattcctgtacatagctcggtatggaacaaactattttcttcattatttgctttcaatgataataacaatcgttaaccaagttgccaaacaatcaaaacagactacatgcaaaatacaatatggaacaaatgccaaaaagagattactgtaaaatacaacttctaaattattaagatttcaccaatttatcagacatattaatcaacttactacaaatagataccaaaaaaaaaaaaatgcatatattccttttgaagttcaactacacagttcacttccaccaaccattctcaccttgttcataaaagacaaataagaaaataaacagaaaaagacaacaataaatgacctagtgtatgttgatttagttccccattaagtaaacatggaagaacaacattttgagtatggactatgggcctacacagctgcatacatttcttgttatattcccaaacgctattgtagacttggatctttaaagacaaataatttacaaaagaagtttctgtcatagacatggatctttgaaaaccagtcacacggtacatatatgacataagcataactaaagactcctataagcttaaattttatgcagaaagaagagggtagtaactagattaatattaacgaatcaagaagagatacacactcctattgccctacaatatgctaaaactacattaaaatgaagaagtttctaattcttgaaaacctacttcaagcaaacactcaaaggccatatccccaaatccagagtcaaacttacaaacattatttataggaataaacagagtaacaacctggtaaaaatgttaaaaagccaaagctttacttctccaaaacacacaatgtgacaatgtacagaactatgcaaaaagggaattcagtattgaagcagcattatacgaattatcgaaggtcaccgtgttagaagaattttcaaaatagacaaacgcatacacaacaagggaaaacaaataaacaaactttaaactctgtaatgacagaaatagaacctcttaacttgcaactgttcgagcaaaacgaaaaaagacattcgaaaattcattaaaaaagatataacaaaagccattaacaaccactgtttacttcacgaagagaatttaaaagtgtaaagctacactcatcagccaaaattaacaaagtaaatgagaaagatataccgtgaaaagaagcgaagtgagagacttcccaactgtaagaacagtctccaccaccatagcttccaagacagaccttacccagatgctattttcctcaggacagtacaaacccacctccattgctacaaaagaaagcttaaaatatacacacaaaaaatacccagaaaaagaacagagatacaggagagagacgggctaaggagcagagagcgagaagaaagagagagagtgagaaagggtctctgtttgggggaaaagggtttggtccggttagggtaaaacccaaagcggggtttaggtccggttagggtttttggtttgggtaaatttgctattgccaggactaaatgtgttacacgcgtcaaaggtgatgattctgattggttaagaaagtttaattaggtagtggaaataacaaaagttgttgtagtggcaatagtaattttatttgtgtttgtgtgattggtgagttttgactgttatgttatgtttttgtatgtgaaaggactttataagtcattggatcctgtgcttgaacgagttaattacttactatcttaatctacttttagcaattcggctacgtttacgttatacatttcttttctttcttaccgttgtcgttaagctgggccttaatgggtctttaatgggctgacctagctcaatacatgccactatgggaaaagcccatacaattttttt

SEQ ID NO: 28520 - DNA, 2116 bp, Cannabis sativa
taattaaatagaaaaattaatcataaaaactcaaaattttctaatattacccattcatggctaatacccattaagagtgcacccatatatatatgttttgagataaacataaaaacataaacaaaagttaagcaaaccctcccttctctttctttgctctttttatagacaaggaccaccaccaccactccaatttgccttgtttcctctctgttcaataagttctacaaccctttgatagaacctagaagtgaagaaactagtggggaaagctatggtaaggagctagctttcttttgttttagaatatcataggtttgaaaataaattttggggtctgcagtagttaggggttcagaaagtttatggttttgttgcagggatattttgggattagttttgataccccctagaagctttcaatgttgtagagaggtaagagtcatgcttgagcttttaaagcttagagcttgagctctagtggaacttttcatttaagagcatagttttgaatttcgtcacatagggattgctgtatagattttattgtgaagtttagaatgatttgattaggttttggtggggttcgagatgtgtaaaactcaagttttgcgtttctcgtagaaactactctaccgttttggaaaaaagtttaacaattttcggaaaattcggttagctatttttggtatttttgggagtactgaaattcgtatttcgaccataacttttcaatcggctgtctattttagatgttctatataccatttctaagcttgcaaagagctctataatatggtatgtattttagagcaaaagtataagttttattttagggtgtttataccgcgaggttcggtagacaaccttagattgttttttgcaagtattaggtagtattttggaatagacaattattagtttatcgttgttgtgacataaggccgagcttatcaagcattttctccactctggttggccaacatgcatgaatgttgatttcagttatgaaaagtatatctgtaccacatagcatgataaattatgattatcattattaggacccgattatgattgaggtaatagaatggtgattaccgttaaagtgaattaaagtcataattgtcttattagaaactggctgagatatatggatggcaattagggcattgacttgccgtatcaggcaatgtgacatatggatgccaagttagcgcattgatttgccttattaggtaatgtgatacatggatgcaagttagggcatcaacttatcttattaagaaatgtaatagatggatcctaggttagggcattgacttgacttattaggtaatgtgatacatgatgcctggtaaaggcatcaacttgcattattaggtaatgtgatacatggatgcaaggttagggcatcaacttgcctcattaggcattgtgatatgtgaaggctagtttagggcatcaacttgccttattaggcaatgatatatatggttgccgagttagaccatcgtacttgctttattaggtaatgaaagatatgaatagtggggaatgatttttgggttgtttaatttaacaacaatagtaagatttgaatatcagttttgagtatcagtgtgattttattaaaaaacggcaagaacattagtatgccaggtgaggtatccaaattatatcgatagtaaagttatgagaatggttattttatgaagtaacgactatagttattatgattggactggtaattctatataacaatatattttattattgacatttttatgtttgaatatctgtattgacgaaaatttccatatatgagtaatgtatgattattttattctgatgatgtgagtttacttgttgatattgtgtggtaaattatattattggttttattacttttcttgctgagtctttgtgacttacatgtgctttgtggtgcaagtaaaagcatggattaactaggacagccatgagatgacagcctttggtaaatgtacatattaacttatctgacttgtgtggtcgagttttcaggagttgttttgagttgtacctaatttgtattttgacttacttttttatgtagcctttttgtaaaacttttgta

SEQ ID NO: 28521 - DNA, 2221 bp, Cannabis sativa
tcttaaaactagttaattaataacgaattagttcaatcgttaataagattgaactaagctaattacattattttttatcaacgagcttctctccttcataagtatcacattgagttcttaaaaagagaaatataaggagtgagcttataaggcctaatagaaaaataactaatatcaaaaaaccaaaaatttattaataaaaatttatgtatggttagcttttaagaataaagcatcttattatcatcatcacttattaaaaaaaaatagagagatcacaagtaatcacaagacacaagctatttgtgcatatcacattgtttactttacccctaattttcaatatcaatcatagaaaataatatcataagccgagtagtcgtgcatgataaccattataatattgagggctcaaattctattcatttcctagacaaattctaggtcttttatctacaggtgagtggacacctagtctacctatgatgacatgagtcgtgaaacaacaatatgcacacataattatgatgaacatggctctctataaatgaaaaaaaggcaaacaataattacaaaaaaaaaacatatttcctttaaatataaaaaatctgacaacataacgactgtaatttaaataaaactaaaaattataacctgcattatatatatatatatatattttacattgaatgccctagaacagttcaaaaaaatatgaatataaaattttaatttttaaaatattttataaatcataaaaattaaaatatgtctaatgtcattcaatgcatataaaaataaatctaataatcaagttaagtctctagctccttaggatcgttaaactttctccaaaagagtcattgctaagcccccaattcttaagttccaaatatcttaaccatacaaaagttaaattttcctacaatatatctaatatttgaataatcaattatcatcattgtaattattcaaatagagtccaacgatatatgacacaatatataccatttaaagatgctcaaagatctcactttagccacacacaatggcattttctggtagccaaagacggtgttccaagtaatattaaggatcttgacataacatatatcaaaatgactcccttgatgagtagatcacggatgcatgtatgacctactagcccaagcaccaacctcgtaaaaatacttccaaaggagaatctcattactaaaatgtagtgagttgacaaaaatgacttagtggtcgatattcttctcatgactttgactccaactgtataagtcatttctcaaatggtttccaaagttggttgtaatatcgacttaaagttttaacatcaaaactttgcactactcgtatgagtgtgtctcagtttcgattgtcaccgaaagtgaggtgtgagatcaccataggtcaccggttgcacaggtccataatgcatttaaaaactggcagctcggtgggtacgtggtagatctaagcttgcgcaatggtagtttatgtggcatttgtgaatagtaaaagaaaaagaacaagttgtcaagagaaagaagagaaagagtcatttgactcatgtgagtcccaacataaaataatatatatagatatatataatagattttttcataagatgtcaaatatcacaagaggtaaaaaatattggtacattctcatatgaggtctcatacattttaaaataaataatataagaatatgctaatcagttataagatattatattaatatagtattaaacatcttaaaatatcaaaattgtatagacattaataaggggataacaggaatggattcctataataatgagaagataagatctaccaccacacttcaataagtcttgttgaggaaaacatagcaccattaatagataataatataaatatatatatatttatgtgaaatatttttaattatttgaataattttttttatatttttattttttattttttatgtttttaattttagtattaatggtgagatacaagaagtggttttgaggataatttggagaattctaaaatttttattaaccttatattttgttaatatagatttttcttaaaattttcattgacatgtttccataataccttttattctagaatgaataataattttgcttaaattgtcttttcacaattatcataaaaaataaattcgaataaaaaaaatcattaaaaaataataaata

SEQ ID NO: 28522 - DNA, 5288 bp, Cannabis sativa
aacttatcaaacaaataattaaattaattatttacttaaggaaacaacaatcattatgatatctaaccaaccaataattattgcttatatagaaattaaaataagtgaaaaccaaaacaaaacaaaaatggtgaaattaaatataccaaccaacactatgtttaattttggtagttagtggtaaaattcttttatatatattttaatttttatatacttaatctcatttattttttcagggggcttgaatagtcctttcaatttaatttagttttctttgcaaatttaagatgttagttaaatttcactgttaaatgttaactgtgtaatctttactttgtatacttatatgaaagtaacagtcaaatttcgaaattaataaaaatacatatgtcacggatagaaaagtgcacacggtaacaaactaattaatatttaaccgtaaaatttaacgaatgcttcaaatttactaagaaaaaagtgaaattaaaagagttttgccgtaaaaaattcaaaggttaaacatataaaagtaaaacataataaagtttttaccaacctatgtatcattcattgcacttaaaacaaataattttaaatatatataaatcagagtattattattgggcaccagtagtgtccaatactttttataagtagtgctccatgcagggccgactctgaaacaaagtgagccacaaaaaaacatatttttgagcctttatgttagagaaaatgcggtatttttgaaagtcagtaaaaaaatatatataattttaaaagggaaaaaaatttgggctcctcggctaggtgggctctaggtacaggcctaacctgcctatgcctatggccgggatgggctcgatgtttaattaacgatattttttaaaaattattttgttaaattatatgaaactaatacttaattacaccaatattaataaggataaaattaataggcacaaacaattatactttttaataattttcatatataaagcctaggcttacaggtttgcaacaacaaaagaaaccctaaaaagcaaaatgaaatgactcaaaaaaatctgaccatttttttctaatttttctctaatgtcagataaattggtcactctcaacattgagatcgatgagtaacatatttttatgagaagatcattgaaagaaaatatattaattaattaataattgccaaaattacaactgttcaaatatctatatttatagatacattttaaaatcacagtttccaatggtacagataaccttaatttcatcgaggctgtgattggctgtgattgccacgtggacagagtttcattattgattggcttaataactaaatgtagagaaagtcatatgaaataaaaacaggtcttttttttcaaactcacttattacacaatggatatttacattaatcatatggaaatatcactctattaaccattttcttcaatttttttatttatttttttattaattagtcattttcattctgaacaaaataacctcagtaaatcagagcctttcagctgtcactactcaaaaatataaaaaaaaataaataaaactcaactcaaaactctctcattggttaaaggtttttttttatatatatataattttcaattccaatgtaaaatgtagtgaattacttaataaaaaaatggagtttgtttataagatttacactttcaaaatttataaataaactggattttaaaaaaaaatatttacttatactcattctttttttaaaaaaaattaaaaattattccttctcacatcctataaaaaatatatatttgtaataaaatattttttaaatattaaaacaaaaataattaaaacgaacaaaatgtatgaagtcttatagagtaaaaatagcaataactatatattattacttgaactaacctcagtaaatcagaacttaaaaataaataaataaaaaaactcaaaactctctcattggttaagggtttttttagggcataatatatatttatatatttacacccaaccctttttctttggtttgttaaatttaatcacaattttaaatatatatattacataatacatttatactcaatttattaaaaaaaaaacaaaaattattccttctcacatataaaatatacatatatttaaagattaagacaaagtatataaaaaaaatatatatgaagtcttatagagtaaaaatagaatatacatatatatatatatatatatatgaaaacaaaataaataaaaaaaacattcaaattaacaaaaaaattaatttaagttgatttattttattattaattaggttgtattattgtatatataactttttaggtgtattttttcaaccattaattaatattattttttatatataaaaaaaataatgtgttaaaagccaaaattaattgtacacagtgacattatgatgatatataactcagccagtgttgagctatatatatatataaatatatatataactctcattggttaatcagtggtacgtactcactttttttccttcactcttttgtgaaagaattttactcaaaaaaaacaagagatttttttttttaataaataaaaaaaaaacaattttgaagcattcaaagtatgatattagggtttttagataagaaaaaccattatgggaaatcatgacctaaaaaacctctttttgtcagtggtcaagaactgaaaaatcgtgtgtgacgtgaccaaagattctacacccaaagacttaagaaaaaaagaatatttatatatatatatatttatatatagctcaaacacaaccaaaatccttacccagatcgccaaatttcctaaactagggttaaaaaatttatgaaaaaaaatttaagtgggtgtaaatgacaccaaattaaaaaaaaattcatttgatgagttttgtcatatcaagaaacttcttttatatattattatattttcttttcttgttcttattacaaagaaaaatttaagttttgattttgcttatgaaaccctaatttggttatgtttgactatttatctcagaaatattccacgtggcatatcacaaaatgagattttggaaatttctcttgtgtaaaaaaaatgaaaaaaaaaaaccctaattgtgattggttgataagagaagttcaaacttgtttcaaaggaaaactccattatcagtcttcattttttttttcttaaaaaccctaataaataaaattaaattaaacaaaaataaatttatatatatatttttttctttttgaaaaacgtaccattttgtttttgatttctaaaaattgacttattattaaggatgtgtcaaaaaagatgggaaaggttctttctctctctttctctttctctttctctctaggtttttagacctagctagctatacctctttcatggattaatttcatatagaaagaaaaaacaaagtgtaaaattatatgtaccaaagaagaagaagaagaaagaagaaattttctcaacaatggactcagttcaacctctagatattttccttttttacaacaatttatttatttatttatttttactatatcttctctatataataatatttctaatatccatactaacaccagatctataaatataaataccataaattattttaccaaaacccaacatgtaaaaaaaaaatcccaaacacaaaagttcattaaaagagcacttaaattaaaaaaaaaaatgcaattaagtaaatgaatatttttttatttatatatattgtagatcatgatcttataaaaacaaaaacaagtaaaaagtaagatctctcttctcatattatattaaaactactatattatagttagggtttaataataataattatagagagaagagagagagagataaccctaattacatataaacaattgattatatatatttatgtacatatatatacctttgatttgcatactcataaaggcgtccacggctagagaagacaataagagcaacttcagcatcacacaaaacagagagttcataagcttttttcaacaaaccatttcttcttttacaaaaagtgacttgtctatttgttgtgttttcaattctctttatctcaatctttcctcttcccatttttctccccggagaagaaaccgacatcgacatcgacatcgatatcgaattattaacattgttgttgctgttgttgttgttgttgtaagccatttctacctccaaaacaaaaattattaatatcttcaacaaaaattatttttataaaacaaaaaaaaaaaaaaaactaatctttatagtataattagatcccttaagtaaaagggtttcttcataaattaatataaaaaaaataataattaccagaggatgatgataagaggtttgtggttttaatttgatgatttttttttattttttttttcttgagaggaatctgagtagagagtactagagaatatagaagaagatatattgaaaaatatgaaggtatatatatagagagagagagagagagagagagaaagagagatgagagagagagagatttataaagttaaagtttagagagaaatgacttttttatattcatcctatatatatatatttatatactaattttccacacttattccactaacacaataaggtataatttttttttataattttttttaatatatatatatatatatatatgaaaggaaaataataaagagaagttgaagatgagaatatttgtttataaatatcactcatttgtattcagacttccattaaccattcttttcatttacttttacttttttttattattttattttaattttaattttttttcatgtgaatgatggtgggaattagctagctatagagagagaaagggacttgtggaagagattatttaatgaggtgaataagacattcgatgaaatttacttcttgccccctcaactcctatattattattattatattattattaagtttaataaatttatataataaaaaataataaacttaagatacctttgataaatgtaccaatttcaatcaaatctcacacattaataatacacataaatatgtcactcgtttgtgttataatgtctaggttttattattatttaaaatcatatatagataattaattactcacctaattatataatcttataggttttgtattgaattattatgttagttattagttcatgtacgtatgtgttttaaagtgaattttcacctaattccaaagccaattaata

SEQ ID NO: 28523 - DNA, 5706 bp, Cannabis sativa
gttgatccgagccattaccttattctttaagaagccaagaatagagattttgtttcggccaataatattaggcaaaccaagataaaaggtgccatctatcgcttcaagcatcccaagcatcccttgaatatcacttaagaatacctataaattaattttacaattaacctgaactaaggcagatacacttttttttttaataatttctaaaaatacaattataaaatatatatgtaaatttcttaagatctaacaaaactcaagacgaccctgttgtttcctgggtgcgtagacaacaatttaaagttactctgtcttttaagaatttaaagtgatgtttagttgtaagaaaagaataaaattaaatttagaaaatgtataaaaaatttgattaaaaagattattaaatatttttttatataattatttcactaaaataataaaaaattaatactttaaaacagaaacgctttctatcagagagtaatttatcttttttttctctctttgaaaattaaatttaagaattttgtggtcataaacataaacatgctagtagtggttccacgagtccaagttcaaatcctctctaaaattcagaaaaaaagtaagaatttttaatacccattaatctgtgcagtagagactagagaattacaattttttagtcacaaaaaattaaatttgatttttaatcacaataaaaaattattggacattaatttaattttaatcacaactaaaaatacatttagtcacaacaaattataatttttataattaatatttttaaccacagactttttactcacaacacaataataataatttataattagctaagtttaattttttttatttttagttgttatgactaaaagtatgaatttttgtagcgaataaatttttaaaacgctgacagaaaattacattgatcgttaaggttaaaattatcaagcttacactatttaaacctcaaaatttaatatcccataattgtataattttttttttttttttgaatgaataattgtataaattttagttactgagacaataaactgataccataaaattaagaattatatattatttaaaattacataatatataagaattaacttggcggtgggagacaagagtcttcattacgatatattattgcatgatattaaataatactattgtattattaattattatgtagttaagaaaagtgcttggtaattaaaatcatatcatgcaaaaattaataataaagatgaaatacaattaattatattaattgactactatagcaagctagctagggaaccccaaggcggttgatggtatcagttgcggaagctttattatgattagtctgagaagtcggggcatcggttgaggctccggcaccgcggccggccacgggctccagatgtccttgggcgccgtacgctttcatcttgtaatcctccaagtctttgtactgcaagtacggactatcctccatcgccagcccttctaatttctcactctttctcttatcatcatcatcatttataatattatcattcactgtttttttctcactgctccgttcttcttgcttcttattctccattatcgcttttcactgatattgcttaagcttcgagtcgtctatttataattaatacgttacatttacaattagagttgttccataagagttgacacgtgttaggtgtacgtgacacgtgtcagtttcttaagagttgttttttccacgtgtcacgtggttggcatgcattgttaaactattgtttagaattactagatagtttgattaaatttttttttcttaaaagtgatcagctagcaaatatgagagtttggttattcgaaacttggacttaatttgatacttgtgatgcctcatgatatattatttctgtgggatttggtttttaattttcttaaacaaagatatcattttgaaaattgaaatgtaaatattcagtcaaaagctagtagcttcacatgcctatatattgtataacaagagattcattgggaaattcaaaatagtatttgttttttttttttaagccaaaatagtagtatttgcttcagttatgtattttctaaaaaaaaataagtgaaaaaactgtcaataatataaaaataaatatgttattttttaaaagaaagtataaaagaagcaataatgaacacaataaaaaaataaataaataaaataaaaagctaactccataaaaagtggataaattaaaaattgccaaatttttcgaacaaaatttcaaaataccatattgacattcaattctacctcatcaaatagtgatggccttctcaaggcatggccgacccaaattactggggcgggctgggccctcgcccaaggctcccacccaagcccaaaaatattcttagaagaaaaggtcctttatttcttaagaataccattttttaacttttcccatcattataagaaaacagatattatttgttcaatgaaaaaaaaatgttttttttgttccgaagctccaaccttggctgggacggcgtgtctcaaggcatccattgggatggctttcacttctatgaaatgatgtttaagtgtatgactgttatcaaagcatggaagtggagaagctgctgagtcacattgttggagaataatctggcataggcttaatacgttcgttcatgacaaattttggatagccgatgcatgattatgtttctaactggtcattggctttctttcacggtatcatgatattattgtgaagattgatcttggggttgtgattaataaatgataaagattaatttaagtgaaactaatagatatgtgtcatgaacaaatgaaactcattgaagcatggactaaaactcaaaatacggcagagcgtgagggagttcataagaatagagctcggggaataaggagaaggatatgaaaggaaagcggatatcaattcaagtctcatgacatgttattattccatttattttattggtttttgggaaggtgtttaaaaaaaactgagggtttaagttaaaagtgaacaatgtaagaattaaggtgagatgtcgacccaacaaaataaaagaacatggccaacaaatagaagattgtatattcaaattggattctagatcacactaacttgtcgaacctttgccatgtcaaggaatagcatttcagccatgtatttctacaccagcaatatacactgcaattctcaccatttagtggtcccctgttttataacagaatttgtatatttcaattgtgtaatttgtcttaagtggattctgttatgcctagtcattgtgtaatcattaggggaatatttaggctgaatattccagatctttattcttgtaattactgccaagtgtcatgcctaacggctgaattgtattctgaactttgctataattgaattgctctggatcatacacaaaatgagctaagatttccatttgccttctcccttaaaatccaaatttggtatcagagccattgctggcctctgccatgtctacccctcaagacaaccaacctgtttcaactgcaagctcaccgaccaactctagtgttgcaggagctagttcgagtaacaacaccaaccaggcatctcagctcccaaatgccttcgccccgccaaccctaaaccagcccttttcacttaaacttgaccgtaacaattatacactatggaagaccatggtctctaccatagtgagaggtcatagactacatggatatcttagcggcaccctaatgtgcccaccggagttcgtcatggttggagacactcaggttactaaccctgaatatgagaactggataataaccgaccagttactcatgggctggctgtacagctccatgaccgaaggaatcgctacagaagttatggggtcacactctgcagcaaatctacagagaaatcttgagagtctatacggagcctactcaaaatcgaagatggatgacactcgtactttgatccaaactaccaggaaagggtcaacactgatgagtgagtacttgaggcagaaaaagaattggtctaacatgttggctttggctggggatccctatccagaggctcatcttgttgctaatgtcctattcggacttgatgctgaatatctctctattgttgtgcagattgaggctagatctaacacaacctggcaggaacttcaagacttactgcttagcttcgatagtaagatcgaaaggctccaaaatcttactctcaacagcaacaaggctacaagctcttcaccacaagccaacatggcagctaaaaccaacaacaatggtcgtggtcgaggctttcagtcacagaatgcttccactaacagtggtggtcttttttccaacagtcggggaacttcaaatagattcagaggaagaggacgtggccctggttctggttctcgacctacttgccaagtctatggcaagtatggtcatacagccgctgtttgctacaacaggttcgacgaaagctacatggggtctgacccaaacaacccacacaaccagaacaaagcagggcaaacaaacaacaatcacagcgcctttgttgccactcctgaagttctcgagttcgatgcttggtttgccgatagcggagcaagcaaccacataacatctgatcctgcaaatttgactcagaaacaagattataatggtaaggagtctgttgtggttggtaatggcagtaagcttcgaatcacacatattggtaatggtaaattaaacattgaatctgggaactatctactgcttaaagatatgcttcttgtgcctaaaattgctaaaaaccttgttagtgtatctaaacttgccactgataacaatgtgctgattgagttttactcaaatttttgtttggtgaaggacaaggtaacaaagaaggtgctgcttcacggagtgcttaaggacgaattgtatcagttggattcacccttcaccaaatctagtcatccatatcagcagtccaattttctttcagcttttaccatttctgtcgattccaatgtaaatcagtctcagactgatagtcttttaatttcccaaatggatgtggggcataggaggttaggtcacccttcaatcaaggttttaaaccatgttctagagtctgttaatgtaagtgtgtcaaaaaatgcaatgaaaacagtttgtgatgcttgtcaatatggtaaggcacatgctcttcctttccgttcatctaatactcgtgccaaatcagtgttggatcttatccacaccgacttatggggtcctgcacccattgcttccaatataaatcaccattactacatccactttgtggatgattacagccgctatacatggttgtatcctctcaagctaaagtctgatgcccttgctgcatttattcaatttaaagctttagttgagaaccaattttacaagaaaataaagagccttagatcagactctgggggtgaatacaagccattcgttgacctggttcaaactcacggtattgagtttcaacacccctgtccacatacctcaccccaaaatggacgtgctcaacgcaagcaccgtcacactgtcgaaatgggacttaccttgcttgcacaagcaagtatgcccctcaaatattggtgtgatgccttgttggaatatattttaccaggatcttagatctactctca

SEQ ID NO: 28524 - DNA, 2003 bp, Cannabis sativa
accttcctcaaacacaccaaatctacttcctcaataatagtagcgaccttcggattttgagtccgattatcatgattagcatcatcatcacccacaactgcatccaccttcaacctcttcactcccaactcaaaaattctatccaaaacacctacggaattctcccgttcacccctggaagctctcagatcgtcaattttatcctcgctcttctttagtaattcagctcgcttttcaaaactctcactctcacctaaaccatcattctctctttccttagtaccaatgcactccaaatcaaaattcctcctcataaatttcgagacccgatcgatcaagagctgaaccaacaacaaaaacttggctcgcaaacgcaattactcgggatcgaagctccaaacagatgacaaattatcgaactgtaagagctcgagagtggccaagaaaacgtaagtagagacggagacggacaagacgaagaccatagaacgttttcaaaatgtccagagagagcaactatcgtctggagcaaggcaagagcaagctctggatttcaaggtaccaatttcatcattattgtctgggcacattcaaggtcattactttttggattggaattttatgggttgggcatgcgggagtgtgaaccatttatgggactggaaacccagatgaggaaacctaaacacgactggaggatatagtgtttgctgtgagatacactgtttgatatttggaaaaaaaaattacaaatgaagatatgcataagataattgttataccaagagtattttttttctaaaaaaaaataaagtaaatatgaatttgatatgtttatatcacacttaacaatctatattgcacatctcataatacaggactaatataaagtaaaatattgatgactataaaaaaagctattgaatatgaatgatgaagcagaattcctccaaacccaaaatctattagttcaggcctataaaaaaaccaataatatgtaccataaattattataatgtctatcaatcagccaaaaatgatgtctcaacttgtgcataaaggccatctcaacctgttgattaagtccccagcgtctttggaggatttgacagatattgatgcctcgggatggaatgatcagatggtggagagagtttttgttcctgcgacagcttctttgattaagtcctcggataggaatttgcttcctgtcatggatgtggcttgttggaagtcttcaaaagatgggagtttttccttgaaggcagcttactgggactataacaaatctcagtttgatgaaaaaaatgaggcctgtaggcggatttggcagtcaaatattcatgaacggttcaaagtttttctttggaaactttgtcaagacgctctgccttttagctctaagctgcagagcctttttgggaaaccccttggcgattgttctctttgtggttgtgagagtggagacgatgtaggacactttgtgtctggctgcccggttactactcgcctttggttctcttcccgatggggtcttcgtcctgatgctctttcttttcagaatggcagggacctgatttcttggctctcacaacctccttttcaatctctcctccagccaaaggattcggctagatttttcctttatggtgctgtgttgtatcataaattgtggcttgttcggaatgacgcttttcataatggggtgcctgtggatctttcttctttgaaaaagaacattgatcagtgtttcatcgagcatgaatgatctttgcttgaagaggttggcaggtctgaagtctgccgtggcgtgatggagatcagatggggacttcctaggcctggaagggtgcggggttatgtggattttgcgtctgccagagaatttggggctggggcagtggttttctttgactcctctggtgggattttggcttgtggcgcgaagaaaattatgactcttgatgtgttgccaggggaattggaggccttgcgttttgggg

SEQ ID NO: 28525 - DNA, 1506 bp, Cannabis sativa
atagtggcttatggcaggtattacccaatgagagtgtcaggatatgcaacaggaacgcaacttcttggagctgtgctccctgctgtcccacaaacaagcaaaatacaattttctaccattttgggatatgctaagaatcttgcccttgctccagcactgtcacacttgggggccctagtaggcaatcccctcgggatgaacgtgcaactcccaactcagtccgcaccagccacaagcatggcaggggcaccccaaagttcccagagtaaaaggtgttctaaaggtagtgcgcgatctgaggacaagaggcaaaagagagggtatacgccccagtatagacagtacacagagcttacgaacacttaagaacaagtatactttgcgactcagcaaaatatgcattactagaaacctcatcctttgtatcgagacaattcccggagagatcccagcaaaaagtgcgactatcacaacaacatcagtcacaccactaataaatgcaaaaatttgaaggattaaattgaaagtttaattcgattgggccacttgtacaagtggatcaaaaacagattgccacatctgaacccgactcagaccagagtccctgtgcctcaaggataacccatgacagcactagaggggtaagtacctcctggagggatgccccaccagcacgcacccagactacctccctaaacaaatggaagggtcgctaaatctctggaggtcctcataatgggggaaccactagaaatgagctgaagcgttatgcttgggccctaaaacatgatagtgagatatgggaagtcactcaacttctggctcagaggcctagactcatggatcaacccattactttcactaaggaagatgtaaaaccaatacactttccgcatcatgagcccttgatcattgagactccaattgcaaacagggtcgtggcaagaatattggtagacaatggaagcttagtaaacctgttgttcaaggatgctttcacagccattggacaagatttacttcatgaacttgacacagctcgacatttgttctagggcttctacgaatgggatgttaatgtgaagcttcttgaatacttatataaatttttaaaactgcttgtccatgttagacttgcggagcctttgcggataaggaattttcacatggtgctctatgctgataggtggtgaagcttcttttgatgtaagaccctcaatagtcttcttctcttttggtgctggtgcctgttgatcttgaaccacttcttccacttgttgtttctcactacgcccctcatacttcttcccgtttctcaaagtaattcccttacatttctccatctaagtctataaggctttaatggatgatctagtctctatcatgaattgaagtagcaaatctgtatgaagactagaccctccactagaatcttggtgttatggttgttgttgattttgttggggctaatttctctactggcagaacccctgttgctgctgatta

SEQ ID NO: 28526 - DNA, 1090 bp, Cannabis sativa
ttagcttactaaatagaaaatgacactaaaactaactaaaattaagcaaacaaacacattttcactactcttctcacaatacttttagtttaaaagcataaaaatgactctatactatagagttatcaatccaaaatcaaaccaaaacctccagaatacctaaaaacatcacaataaacatatatcaaccagaaattacaatacataagccttgtagtgtatttcgccattgtagagctaagtttgagttcaaaactcaaactcactcaaactcactcaaactaacacacatatgcaaaaagcttacaaaatcaacttaaaataatctaaaaccaagctctcaaacagtttctaaacaccttaacacacagtagaaccaaaactctaaaattataactcaaaaccaaacttaactcaagaaattcaaaaagatgaagaatctagggttaccttcaattctacaaagacaaagccttggaaatccttgctgaattcttcaagaatttggtctgaatattggaaaagggatggggtttcttgggtgctcacaatcgagagagagagaaagagctaaggataaactttagttttttttttagtttctaattacaattaacaatacctattttgttttattccccatattaaatcagcctaaaaaaaccgtagaataacctagaaatttccattaaaccatcataataataacaaaaggaaaaatgaccattttaccctttcttaataaccaaagaaataacctttaaaaagcctagggataaaatggtcaaaatcataacccgaataattttgacattctaaatgtctaaataactttctcttctaatttcaagatactcaaccgtatctaagtgactataattatcaaattattaggtttcactgttaccggacataaaatatgaaactgctaaaattctaaatgacatgcatgacatacttggaatttaataaaatctccataatcgagaaattaaagcactaatgcttagttttgacaatatcttaacattctactaattttatgtttaattatgcggtcgttacacacacatagatatatatatatata

SEQ ID NO: 28527 - DNA, 5112 bp, Cannabis sativa
cttgaatgggaggttcaagatcagattttagttttttggcttctctcttcaatgacagaaagtctccttacacgcatggttggatgcaacacagcgagacaaatctggagcgctttggagaaacacttcaccttgcatgtatcctcaaagatcctggagtttagaaccaaactgcagaaacttcgaaagggaactatgtctctgaatgagtatctactcatagtaaaacaacatgtggaccttcttgcctcagttggagaggttctgagctcaagggatcacatcgctgccatattcaaaggattaccatctgaatatgatacatttatcatatctaccaacactagagttgaggaatactcagttgctgaaatagaagcacttctcttagcatctgagttcgaattgaaaaggttgattctgatcaagaaaatgatctgagtgtcaatttggccatgactgaaatcgattcatatcctgaagccaatatcgcatttcagcagtatcaaaatcgcaccagcagatttcccaaccaaaatcgtttttcacctacacctgctgctggtttagctcgaggaaatagtcgtgcctttaccaatcgaagtgccaacagtggaggtaactttcctattccctcatctttctctaattctaatggccgtggtgctactggtttcagcagaggaggaagattttccacttcctcaaaccgtgttcagtgccagctttgtcacaagcttggccacacggttcttgactgtttttacagattcgacaaaagctttacaggagtatttccctctcccaatactcccaatgctcaagaaaatgtagcaactactactcaagttgatgacaccaattggtatccggactctggggcatccaatcattgcacacctaatgtacagaaccttaacatcagcactgaatatgaaggagcagaccaactttatgttggtgacggttcaggtctgtccattaaacacattggcgaatcttttattcatactcataactctcatccccttgtcttaaataatcttttgcatgtacctgaaataacaaagaatttgcttagtgtgtctaaatttgctcatgataatcatgtgttttttgagtttcatgctgacaaatgctttgttaaggatcaggtcactcaagccatccttctcactgggatacaccagaatggcctctatatttttaagccatctcagtttcatgtgcaaccattccccccagctactgccccatgtgcttatacagccactgttccatccaataatgagtccacctccttcactagtactcaatgtaacaattcttcaatctctgagtatgatatatggcacaataggcttggccatccatctaaaaagattgtcaaaaatgtgcttcaatcttgtaatctcacagttaataataaaaatcctttctctgtttgttcatcatgttgtctaggcaagattcacaaattaccctttccaaaagcttcccttactgtgtacaatgaaccattgcaattaattgttgctgatttgtggggtcctgctaaaacaacttctttaaatggatataaatattacatccatttcattgatgcctattctagattcacatggatctatatgcttaaaaacaaatttgaagctttaaaaacatttttgcaattcaaaactgaggctgaattacaacttgggaaaaagattaagtgcctacaaaccgattggggaggggaattcaggtcctttattgaccatttaaaacaatttggtatcatccataggcatccatgtcccactacacatgagcaaaatggaatagttgagagaaaacatagacatgttgttgaaaatggtctaacccttcttgctcatgcttctatgccactcaaatattgggatgaggcttttagaacttctgtctatctttccaataggctacccactcctactcttcaaaacaaatcaccaatagagaaactgttcaccatctcacctgattacactactctcaaaacttttggttgcaaatgttttccaaatattcgaccctacaacaaacacaagttacaattcaggtcttctccatgtacttttctcgggtatagcctaaatcataagggatataaatgccttgattcatctggccggttgtacatctcaagagatgttatctttgatgaaacatcctttccttttgcctctctttctaaatctgtcaatgagtcttactcgtactctgaatttgctgtttcagctcaaatccctctcactaatacatgtttgaatactactcctgttagcactaacaatgtcttgcctgctatggcaagcactgctgttaattcacaggaacatctcaactcagcacccttaatgccacatactggtgtcactcagcagcaagcacctgagccaattgtccctgctcctgtccaagataccaacattggttcatcagctgctgctactattcgaacagatattgcagcaccagaaattactcatactgctcctgcttcagcatctgatactcgaacatcagcacccgttgcttgtgaacctatttctgctactgctgtacaaccagaaatcaccaccaatgctcatgcaatgcagacaagggcaaagtctggcattcataagcccaaagtttatctcactaccaaaattccaagaaatgtgaaagaggctttgcagcaagaacaatggaatcaagcaatgacagatgaaatgttatccttaaccagaaatgaaacttacactattgttcctctactagaaggcagaactcccataggctgcaagtgggttttcagggaaaatgaaaattctgatgggacacatcacaggtttaaagctcgtcttgttgctaagggttttcatcaacaacccggatttgatttcacagaaacctttagcccggttgtgaaacctgtgaccattcgtgttgtcttatccatggctttgtctcatggctgggccatcaagcaacttgacatcaataatgcctttttaaatggcacattgaatgaggaagtttacatgttacaacccccaggttttgaacttccctctgctcctcatcttgtgtgtaagttacacaaagctttatatggcctcaaacaagcacctcgtgcttggtttgataagcttcacagctgcctattgcaccttggatttgtcccatccaaatctgaccattctctcttcatacaacacacttcaacacacactactttagtgcttgtatatgttgatgatatccttgtgacaggtaccaacacaactgaaattcaaaaactcatttcagctcttgatcacaagttctctctcaaggatcttggtgatttacattattttcttggaatcgaagtgcagaaaacagcctctggtttacacttgtctcaagcaaaatatgttcgggacttgctgtttaaagctcaaatgcatgatgctaaaccagcccccactccaatggtcagtaatcttagactctctgcatatggtagtgaaccagtttctgatcctcagctatataggtcaattgttggagctcttcaatatcttctaataacacggcctgaaatctcatttagtgttaacaaagtgtgtcaattcatgaaaaatcctcaactcacacattggctggcagtaaaaagaatactacggtatctaagtggcactatcactcatggtcttcatctcactaagtcctctgtcaaagaactggttggattttgtgatgccgattgggccacggacatcgacgatcgaagatccacctctggcttcacaatcttttatggaaacaatctcattgcttggcaatgtaaaaagcaacacacaatctcaagatcaagcactgaagccgaatttcgaagtctagctagtactgttgctgagcttacttggatacactcattgttcactgaacttcacattcgcacaacattcctcctgtcatctggtgtgacaacctcagtacggttctcctcacagccaaccctgttcttcatgcccgtactaaacatatcgagcttgatctttactttgtgcgagagaaagtaattcaaaaattggtccaagtaaagcatgttccagctcaagatcaattagttgatggtcttacaaaggcaatatccactcaacggttctctcaatttcgttccaagcttacaattgaagacatctctgttcttaaagatacttcaaattgtaatcttgaggggccgtgttaggagtgactattcagttagctgtttgttagaaagagttagttagagttagttaagtttggtactgtttgttatttctcttaactgattctgttaattccttttcttatcaaacagctgtaatccttggctatataatgccaatcctctaatctgaatagtgatgattgctctttgtttcaatccttctttctctgtctttctttatctttcatttctttctctttgttctgttcttctctttctgctactgtgtttgattgttgttcagcaatggcaaagagattcaatatggtatcagagccatttcctccattgtcggttaatatggcaaacgtcggatccaacagtcagatcaattcgaactccagcagacctgcaaatcaacagaatggagctactgttccaactcgatcaagaaacaattctgatgagttcaatcctgtttatttcaatcacaacatgtctattaggctaaatgaccacaattttctcttgtggaaacagcaggttctcgctgcaattcgaggaaacagactgctaatgttcattcaagatcgtgctcctcctccttagttcctcaatgatgcagatcaagcttcgaacaacttcaaccctgcttttcttgaatgggaggttcaagatcagcttttagtttcttggctcctatcttcaatgacagaaagtctccttacacgcatggttggatgcaacacagcgagacaaatctggagcgctttggagaagcatttcaccttgcaggtatcctcaaagatccttgagtttagaaccaaactgcagaaacttcgaaagggaaatatgtctctgaatgagtatctgctcaaagtaaaacaacatgtggaccttct

SEQ ID NO: 28528 - DNA, 1345 bp, Cannabis sativa
ggtgaccagtcgctacaaggacaacatggtaaaactcaaaatcttgacaatcccataatcaaagatgaggaattagatgagaatagttctaaaggtctcaaaaatgatcactaggataaaccaaaagatgatcaccaagacgtgcctactaatggttgtgctaaaaagaaagataatctagacaagtcagaccctgtggtcataatggccaagaagttagagttaactgaatataaagtaactcggatagaggaattcacttttctattactttaaaaaatgacgagaatggaggttgcaatagtaacactaacttttgaaaacataaccaaacaaacaactccaggggacaacaccactagaaaagctgatcctaaagatcctggaacctctaacccacataaggataaagggaaagggaaagtgggcgaaacctgaaaaaagccttctcaagctgagcagtggaagaaatataaatgtgtcagctaacctcaacagaaaaagaaaggaaaccatgctttatggtagagtgacttgagtaattttagaggcagagccgtacaaaaagataagtctaaagctggggttaagaagcatacttcccggaagcataaaaatcactacaataattctagcatccaaagtggtgatgttgacgaagttcatccagtttcagacagtatcaatggaagtctctctacaaatgatcttcaaagaaggttaagtgaaaacaaagaaaaggctaaaacagaattagccagacctcgcggaaatgatttgaggaatcatattaatgatcaagtctagggaagggaatcttcaaatgatacaactaattgattggagcgcaaagtcaaacagttaacgaaactcacaaagaagattcctgaaggtagaatggaaacgtgtccgatttagaagaagaacacactgaacgtagttaattatagatgcaccgctgccagagcacttcagaatgcctcaaatggaattatatgaaggaaagacagatccacatataattgcatgatgcaagtagctaaggttagttatgatgcaaagtgtctttacttttcatttactctgtcaaaatctgtacaagactggtgaaaaaggctatctcctaaatcaatccacaacaaaggacctccaagcactattcaaaaagcaattcatagcagcaagggactttgatctgaagccaattccctaactagtgtcaaataacatctaggagaaagcctaaaatgtacatccagtgtatgatggttgttgctgcaaaaataaaagttactgatgatatgaagatggtggctttgacattaggattgaccactggatcttt

SEQ ID NO: 28529 - DNA, 2947 bp, Cannabis sativa
aggagatatttgttaaataattttttgttttttttttttaataaaaatagttgcatgattttagtgtaagattaaatgaattgagacaattaatggggataaattataagacaaaaacaaattttataccaaaatgataattaattttataattttattttttttttagacaaaagagaattagatatagtaaaattacactattaaatattaaaatttcactttcaaaggcataagataaggacatatatgatatatttacaaataatacacttaatgtcaagggtatatcatctgtcattaaaattatcacccaaagacacttcataattcataagaaaaagaaaaaaaaaaaagctaatgtatatatatatataagatgtattataaactacattaaatatataaaatcgaaaatatataattgaatttttaaaatatattaaggatattgtgttaatttgcactttttggctaaaaatatggatgttagtgtggtttatttctattttagagacacttgtgttgattctgtctttattactacaattttagatttttaacaataatctttagcttaagattttgtttatgaaggtccatttacgaagtatattcaatataaaagaaaagagaaataaagaaaattaaaggaaaccacattcaagatttccatacataataaatccttaattagctctctcaatttcttttcttcttcttaacttcttcaatattcaataatggcatccattgaagaaaccaaacctcataataagagaacttctcaaggaagacgaaagatagacatcaagaaattggagaagaagagtaacaagcaagttaccttctcgaagcgacgctccggtctgtttaaaaaagcggccgaactcggtatcctttgtggggcggaggtggccgtcattgtcttctctcccaacaacaaactcttctccttcggcaatgtagacgacgtcgctggctcatatcttaataatggagccgtagtacccagtagtaatagtagtactagtactttggtgaaaggcatgattgagttggaagaagctgaggagaagaaaagacaactggagagacaagcaacattggcctcaattttagagaataataatatcaattcgtggtgggagaaacctgtggaagagatggggtatgaagagtgtgataatcacttggctacgttgattaacattcggaataagttctccgatgccagttcttctagtacggattttgatgttccaaagacgaagacgatgccgttttgtggtgattggagtttgggtttgaatttttaatttaatttctcttcttatttatttatctgttattgttgatcatttactagtgctctagctgtgtttaaaaataaactagtaccatttatgtctgtgtagctttttttaaagcattactatttatgtgtttaatttggatgatttgttaataattaacagttttaatattttttaattatttgtaattctctgtcggttatttgttttggaatttcttataccgttttctctattccattataattgacaaagagtagaggagtggtgggctatcatacgcacactagattagtaagaaattatactatatacctcttttaatttgatgtctttaatttttaacctcatttccaaaatctattatattttcatcttttcaatctttccacccatatcacttcaccgtggtttttatttttctctgtcaaaattttgtaccaactttcctacaaacttatatatccatctacaaagaacacaaagttattatatttgaaattatgttgtaattatattagtgtatgaggataatttaaatacaatactcataaaaaaagttatttatattaaattttttagagggaaatatagttaatatataaaaaaatgggtattcttcaatttctcttctaaattagactagtgttgtaaatacttgtagtttcataaaaaaaaatacaggttgtgtcgtgtcattctatagaaatatactaactgtgtcttaccattgccatgccaaaaaaattacaaattatattgtgtcatgctataaaatatacgaggctcaaattcatattttaattttttatattttatttttataattgatgagataattactaaagttagttattttttttataacttaagcaatttttatattatttttcaataatgttctacataaaattcttattagaattatttaaacttgaataaatatttgaattattattattattataagatttttaacatgttgcacttataaggtagattatgtgtgcatacgtgttatgctttttgagtgtattgtgcttaagcttatacttttttgtgccatattattctcaaattcatattgttcctatcgtgttattatatcaatttataacatcgtaccgtattatgtctaaacttatatttttccgtgcttgtatcttctaaattcgtgctagttttgtttggtaacaaaaaagcggacctacttttatcattagataagaccaatttatcaacttattgcatgaatggtttgcttcggttttaggaagtgagtcccatgtgctcactaaacttatagtttcagtttaatgaagtttttgagatttagcaaaaaaaaaaaaaaaaacttattgcatgaatgttaatatacttaccaaaatgaagttacactaactacagctagccttttgtaattgcgcggacgcgctttaatctttcattttcttttttaatattcgtttctttgttctcatcaatattgattattactattgagcaaccttttcttgatccaattggtttggtcaatttttatttgatttttcattaaatgataattctttttgatgcaatctcaattgggtggatagccgtgattgctccactgatttatgaattctcat

SEQ ID NO: 28530 - DNA, 1784 bp, Cannabis sativa
aagattttttttcgaaaaagaaccctaaactcaaaccctgatctattttttttaggaaccctaatttcgaattttgaatttcgaatcacaaagctctgataccatgtagaaaatagtgaatcgaattgtgtgtatatttcatagaatagtacgtatttatatacaaagctaggagactaaatgggaaactaccaataacaaaataggaaactactaaatagataggttaccctaattcttttacaactaatatacagctaatattctaacacaaaccattgcagaagccattacaagatttcttcctcaatatcttttattttaatttggaccactgaattttgtttcaagctctcacccttcaaaccattaaaatcctcacatagattcttaactatcttgttggaatgtaaaatatgagaagaagtaggattaccagctttagcttcacatctctttgaggcctccaagaagctcgcaaaatcccttctaatctcttgctctttctgttccttctacaagtaggccatagatgccctcaaagataagacttcagcaacttctccaatggttctgggcaattcttgctcatgatatgcttcctcttcctctaattctgaaacatccagctctgaaacccccaatacctttaccaatgattttatcttgataaccatatatgaaaaggtaggtccacgttttttacccctatttccagtgcactcccgcttcctttttattgttgaattcaatctgtccttgttactccctcccaaaatagctcccttcctggatcgtcctcaatctgccatggcttctgttagtcggagttaaagaaccctatcaaaactctatctcacttaagtattgatatttagtatacttattgtgtagaattatttattttttaataaatatattataatatttataatttttaaaatatttctataagaaacatactaccaattactaacataaattatataattttaacaatacaattatattattataagtaaactattaagttagtgtaataatttcatgtgattttgcttattttaaatatttaattattaagtattaatgatacatgtcattaatgacctatttagttagtaagtattaatactttattttattacatttaataatttaatgacttgaatattatgtagtttttgtaaacattcaatatgttttttttttgaaattgttcaaaaaaaaaaatatatgtttttttttaatattatgtttgtaaatatgttttttttgcaattttttttttttgtaatataataatttttgttgtacatgaaaagttacccctatcataacttatcggtttgtaataacaaaagttagttttattgtcctcaattagctttaccttatctgcaattataactataataacaaaagttagttttattgtcctcaattagctttaccttatctgcaattataactataatttaccaaatatattattactaagtcagttgctaattaatgcttttttccatttaagtagtttcattgtatataagtcatgtgaaaaagaaataaagaaataataaaggagtcttaaatgataacggacttttaccactaacttgtcattttgtatacactttctataaaagtcccttagattactgttttctcaaaagaattaatgtaatgttgtatagattttataaatcttgtctttaattgtatattgactcttgtatcaagacataccaaacaaactctaaaagaatactcaatgaaatcat

SEQ ID NO: 28531 - DNA, 2530 bp, Cannabis sativa
  modified_base (38)..(69): a, c, t, g, unknown or other
gtaacctgctattacaggtcaaagaaaaatgtaaccannnnnnnnnnnnnnnnnnnnnnnnnnnnnnnngtcacccatatatatatatatggaccctgtcaagcataattaatattggtgaaattaaacatataaatgaagagaggaaacgaaaaaaagatgaattgtacgttatgattatttaactctgcatattcatcaatttattgctaataattaatatttggatcgatatatatatatatattatatatatatataagtcgttctatttatatatagaacacttctgagaagattaatactattaaattataagtaatattttttgatatttttttaaattaaataattaaatttaacaaattaaaatttttcttttattattcgttattattcgttattagatcaaaatgtaatgatttaatatttttaaaattaatatttgtagttaaatttatttagtaactattcatgggtaatactcattaaaaaatgatccatatacatagatatacactataagttatgggaagattaatattaatatcaatatggcataatattttatgtgtattgatatatatatatatatatatatatataaatgatatattatatatacatcgaagcaagggtgttggttaaagttatttttggacttatcttgtattttgtaaaagttaattgattgatttaactttatattaatttttcaaaatggttcaaaatactattacttgagctcaactttttttttatatatatttaatttataacataaagataatttttagtatgaataaatataaaaaaatgtagtcaatcttatcataacacttttagctcagattattattaaattttatttttataaaaactcaccataagctatattctatactattttaataaatatagaatttattttattatttaataaatttttttttacaaaatataaacactatgttgaagtggtacgtatattaattacccattaattaataaacaattacatcactaggcttaattatatttaaagcagaacttggtagagccatttttgggatcgactaacaaatatgtattgttagactttttatttggatttatattaaattttattagttttattaaaacttgggttgattagataattctttgttgtgttagcccatattattagtgatcaatagttaatgggcttaggatctgtgtgtaaagtctaggtgaagtagaagtgtgcgcttttctagttaactgaagcctttgatgagcagacccagggcaactagggttatgtaactaaatcctctaaatacatattgtctcatcacaattgtatatttttgataatcaaaaaatgaaactgcttatgatttaaagacctaagacttaattagttgatagtattgcactatcaaattgtggtaattgctatagattaatcaggtacgcgtaccaaattgttatatattattattgtgttctatgttatatacaaattaatcttgggtttattattattttatctaacatgtggtatcagattgtctattgtatatgatttagaacctataatttgtataacaattaatatgtatttgttttttcaattacatattaatttcgttattattttatgttgaattttttattttttatttttcaattttaaaagtttaggggttttattcctcattaaattctttttcttttgatatattatttacataaaattattgagtaaattagaagaattttaaggttaaaaattttagggtttgtatattttctttatgaaattaattttgtgtttttcatttatattgattataatttgaaattgattgtgcatatctcatcaataaataattcaaaatatttctacacgtttaattttttaattggatcaaatattcaggttactttgcttctttaattctcggattagttttaaattagatctacctaagtttatggtgtttttacatgaaattaatatcatagatctattagaaattgtaaaccgttcaaaatccctatttttctcgtccgtttcgtcacctttttggccaaaatttcatcccgacccgtacgggtctgaaccgggtcgcacaaacccgttttacagccatggaggtggctgctagaggttgatgacaacctgctgggacgaagcccactcgcagctgccggagagtgagagagagtgaggtagttttgtgactccgttttcgacatttttttttcaatgtgattagaattttagaatttaatttttgattttttggtgatttttaattaatttttttgactttgtttaattattactattttaatgataattatgcaattaaaaaattattaaaaataatttttgatgatttttcgaaatccttaaatcataaaaaaaaaaattgagtttcttctcgttctgtttgacatagtcactctcttatttgatttatcttgactatgtaatctccaccaatattctttgtttcacatctttccattatttgtt

SEQ ID NO: 28532 - DNA, 2087 bp, Cannabis sativa
aaaaaaaaaaaaaaaagcaaagattattagagacctgccattattcttcattgaattaggtttgtcccttagttgttggatttctaggagtacttgctggcaggaaacatgtacaaacaaataattgttgtgtttaatttcattctttaaaatgtactcaactctatatggtatccaaagaagtaataataatagtatatatatatatagtcctgcaaattgcatatatattattttgatataaattattgatacagactgcatatgttgaaggaatgggatctcatgattcatgcatttattaattatacatatgaattttttttttacatctctagatcatgacaacttgacaagtaagtattataggatcaaataatatatatcttcattattgtgtacggttaaaatttatataccttataagaacaatttactctttattttttttcttttttgtgtgaggtaaattaattattaattcatttctgactgtatatttatatgctttgaattattttgacaaaaacttgtgatgagtctattcaaaataatgagacatttggatatgtttggaataatttaagaaacttcctatctgcttggattttagctgtaacaaactagtgcataataaagtaacaccaattctcaatgaaaccttaaaaaaaaaattatatgaagaaaaaaaaaagttgttctctaacaaaaaagaaaaaaagttaaactacaaagagttgtaggtagctagctgccaatgttcaaaacctccaattttcagagttgatgatgatgatgatgatgatgatgatgaggggtggtatagcaagaaagatacgacgtcgtcacagcttaaagggaagcttttttaaatttgtgttccaaaatatttctgattagacacattttttcaaaaactactccttagggcttcagacaatatttcttcttttgttgtagtacttgtcagaaagaaattgagatgaaaaatcagattttgatttaacaaatcagagttcctgcaaaaacaataataataaaaataatctatatttagaaaattaaagtagaagaaaataacttaacaaaaatagcaaaaactctaatttataatttttctgatatttaattgttgatttttttttcctaccaagtcaaagcactcgtgactctcccaataccaaaacaaaaagaaaaaaataaatgtgaaaatttaaaaaagttaaaacaagaaagaaaattaaaattaataaaactaaaaaacaaacgaaaccctacatgtactccaggtcataaaccgtgactgtcccaatgtaggacaatgtgtcagattaaaacttttttattttaaaaataaaataaaaaaaaaaaatcataagaaaacagtaaaagaattattgcacatttaccaaagaaaactaacttacttacttttatcacaaaaatataatcattttattttaactacgtcactaattttcacgtactcatttctgaagtggtagtagtagtaatcaatctagtagaataagtagtagtagtagtagaaatagtacctttttttttctttttctctttctttattctttcttattttcttgcttttcctttcatccccaaatctaactactgaaaattcccaggtgagcctccaaaggattgggctgatgacggcggcggcggcgcattgttttccgaatccaacgaacccatttcgataattccacgctgtttattagaaaaccctccgcttacgcttctcacaatctgtcccactccaagaaagtctctagtaagcctatccgaaccaccgccaccgcccatactattgttcatagcggccatagaaccgccaccgccgccactactattggcctgatgtaacttctgatcttgatgatcgtagccgccgcctccaacaaaggtgtttccgccgaacattgagttgtttccaccggcggcggcaaacgagttcattagatcttgaagatggttctgatcgttttgatcagaaccgaatagtcctccagtagtactactactgctcccgccgaaagaggcgggagccatgggtgaggggttatttt

SEQ ID NO: 28533 - DNA, 1351 bp, Cannabis sativa
tggtatatgtcaaagttcaggggagaaaattactattttttttatatagtttcaataaaaaaattaatgattatgttgattttgaagtttgaaggtttttacagcttgtgaattaaagtataattgtaaaatttagactaaatataacattaagctattctttgagttaaatttacaataaaatttgtaccttacattagagatcgtctaatggcaatgcttttcttaaaaaactctttgcttagcctaacacacccaccaattgctctactcttttacaatattacaatatttttcttttatgttatttaaatattattatttatttattatgttataagaaataagagaataaaaaaaataaatatatattttttggaaacaaaagattaaatatattgaaacggtatagtgtgtgagagagtgatagcattgcaagctaaacatcttagctattatatatatagaagacattttaaaagattttgaattatattttatttattatggcatttatctaaaaatattgttgaaacaataaatttacattaaattttatttttttatatttatgtgaattattctaaatcctttaaaatgtacatatttacgatatacatcattataactatttatcaataacacgtacgacctattttttattttttaaaagacgtgtttaaaagtttccccgaattataccctgttttttttatgtgtatatgataaaattttcctaaaatatttaggttgaactacgtgaggtccacactatgaagactcaaaagctaaaatatatgaatgaagcacacacacctttgtgtagaaaaatctaatatatatcaataaagctataattgatttttgtccataaatattggcaatgtattaaattatgccattagaatttttttagcggttaaaagttcttactaaatcattgagatggttaggtttaaagaattttattcaattttatttatgcactaaattatacttctcagagtttaatatatattaaatcatatctctcaaattttgatatatactaaatgatatttctaaactttcatttgtgttaaacttgtcttacttaaattgtaaaaaaataaataaatatatatttatataatataaaatcatgtttatatataacatagcaccataacctactaaaacatggccaatcaatttttcttcatattttatttgaagattaaaaataacaaaaaatttactcttttttttcttttttttttttaaattgagtttctttttatagattttttttttttttttgaaatgtatagattttttatattttcatgttttggaaaaataatataatatt

SEQ ID NO: 28534 - DNA, 2659 bp, Cannabis sativa
tcgatcataagcgactctttttttagctcactaaccctgatcacaaatggctcttttgctctactttttggattggtatttttggatttttggtggctctcttcttttgcgctcactatccccgaatcacaagtgatatttttttgactttttggctcttgattagtttttttagatttttggtggctctttcttcggctctacttcgatcaatttattttttttttactctgataccatgttagaatttaggaataaggtgaatagggttccatctcaaaaccaattgacaatggaaggagtagctcattcctcttatatattctattatctttccacacattagcaatgtgggactctctaacaataattggcttcctatcaaaaaagagataaccaccatttaggacagcatctctttgtttctctaattgaaacctaatgaggtaaacaccttgatgtatcatccccaccttatcaatccccctgcttttccaaaatcttttgcaaaatccctccatcacagataatggcggattcgccccaagcacataacacactaaagaagaaacccaataagtaacctcttcttcaatgttttctctctcaatttttactttcactccactagcactacctttctcccccataacaggaccatcaaatttaagaataggcaatggagatcgacacccacagctttccttttttgatggtcctccaatctgagaagtcattgcggatcgattgctttctctgttccagctctaattccttcagcaaagcatcatcaatctctacttgtgcctcttctaattgctccagagttgcctttgcatcatcttatttatcagaatttgagaattccattgcattgtagcttaaaatctctgctaatgccctcgtcttctttacttgatctgaagactgaggcccttcgcctttccagatgttttggatcctttacgaggatgcctcttccctaccatggccagccacttctggagaggagaatccctaatttgatctcagaagtttgccctagcagagccttgccactctttctattagagacttttattattattattattattattatttattactttatatgatgtacctttgttcatttggttgtacagcgtatttgtccaaaaaaaaaagtatataaattaaaaacaataggagcacatgcttgcatgtgtttcacaactagcatatattaaaataaaaataaaaataacaatgcagatcaacggattaccttaattagctagccattttttcaagtttgaaattgtacaattgacaattcagtcaatattcaagttcaacacagataatcttttatctctcgatcttttctaaacgagttactcatatcatatatttttttaattaataaataaaggaaagaagaaaaaaaaacgcatatatatatatgataaaatttgtccaaaatgatattaaaataaattatatatagatatatagatttctcaaaacaaaagtttttattattacgtaccaatcgcatagagtaatgattgttctaaagcaccagcacctgcaacaaagatcaacatatatataaattagaaaaatatatttatattaaccataattgttataaataaaattatatagaacaatacctcgaaataaatcaaccgcgctccaaactgtaacatcatccaataacttattaattagaactctcataataaataaatctataaaaataaaaataagaacaacttaataataataataataattaccatttttacatcgcatcatgttgtaaaaatcgatgtggcatcgatttagttttccgttcacgaaatttatattcaaccacgaaagctcaaagccatgaacaaggtggttgtgaatatccaaataagaagtactattattcctatctccattcaccaccgtccgatctgatataaaagcccttagtaccgtacgacacccgatcgccaaatcagaaactttaaactcaccatcgaccaaataataattattattattgcaaggagaggtgtttatgtaatcagaagaattatttactgtctcatccgtacatttcacaaatactataatctttgactcttgtttcaacaaagagctgtaaggattggaaaattcaaacatagaatttgctggagaaggaagggaggagcaattgttcttctcaagattggattcggatatccgaatagtataattcccataattgattgaccgtacaaagaattttacagaacctatgtataatacagtaagattgctttcacaagaaagctcgaattctgagtagccacagtgttttggatcggtgttgagtcggaaaggagtggttatgttgatgatatgattattagcacaagaagaaggtgagcaataagggtttgaatttgcttgtgtagttatgataataattaggaacaggaatctgaaggggatcgtaaagtaataaagaagggcagccatggaaactgttttgtagtttagagaattaaggggaactcttttctcccattttacaattggtacgggaaagagagagcttctttacattactagctagtattataaagtctattgtgatcttagtcaatcgaaatatttctatagctatatttaaata

SEQ ID NO: 28535 - DNA, 1365 bp, Cannabis sativa
  modified_base (1292)..(1328): a, c, t, g, unknown or other
gagaagtctgaatactcaagcaggatgacatagtgacgaactagccacccctggttgccctatggccaacataggttggccatgttctggacatctcatggtcagccaacatgcatcctgcagatgcatagccgaccagcttttggcctggcaggattttggtgcacaaacttcacactgggagagcaagacagactacggatttagtcatttgtattttactaatttaatatgtaaataatagcttattttacatatttttaaggaatttgaaggggtaagctctcctataaaaagatccttactcaaaccctaaacccctaagataaaaccctagctcaaagtctaataactcatctctccctcacacgcccactgctatactcatacttgagatttaccaactctgatttctacattgtaacatttagagagctactacatatcccattactatagtgatttgagtagtattatctcttagtatcaatgtaaataaaaaaggagtaggtcattacccgctaactaagggggctgaacctctataaaatcttgcgttcatttactttattattcttattgtgtaacacgtgataatcatcaatattaaatacgactctgttgtcggttagccaaatctgaggtcaataactgttatgatctttgagttgagttgtacaattatttttatttctcttccgagagctgacaacataattcttatcccctgaattaagccaagctgcttagacctttgcttccaaaagatttctcgctgagccatcacttcaaaaaataccctccttatgctattgaatagaagcagaatccctccaccacttcgagttcttaatatgggtcttactttgagcaatacacttcttaaaataccaataatatcatgtccccacttacccaacacttctccccatttttgaattttgtcctgaatgctacataaacccgaccccgtccaatagctctccaccagctacttacacattggctccctcaaccaagcattttcaaaacaaagcgagagatgagaaaccaaagaaaaattaccttaaagaaccaataacagagggcagtgatctgaagtggaaaactcaagattagggagaatagcttgaggaaacaaattaagccagtcatctgacacaagaaccttatccaattgttcttcaacccattcgccagaattacaccctttctcccacgtaaataggtagcccttatgctttaaatccaccaggttacagtcactcaacatgtaaagaccgcttagtttnnnnnnnnnnnnnnnnnnnnnnnnnnnnnnnnnnnnnaattatttatagctatttaaataagtatttatactgt

SEQ ID NO: 28536 - DNA, 4064 bp, Cannabis sativa
cgtcgtgcaattaatgatatcagaagggctcttaatctgtctcgtcgtgcaattgtaatgatatcagaagggctcttcattcccttgcggttggacatatcgaaatggttgccatttctttcctacaaatgcacatttttaaccaaattagctcaagaattttgtaactttaatattttttgtaactttcttgatatatagtttgttttattttatcatgattatactcatgtagaaatatttagttgtcataatagttaagtgcaaaaaatgtttcataattatattgtttataacttatgtttctagttataagaacctaatatgatgaaagaaattataagtgcaataataatattaaggaagttcatgaattacgtaccttagatatgaaaagcaataatggaaaatagttgtgataaattttctcattgttatcatacacatggattccgcaccttttaattttcccaacttgatgttgtttcccttcatctataatggagaagtcaaaagaaaccttaactgtatcatgaatatagctacacaactcattcacataccaaacgaacaaatatttcttggaatcgaaacatatggcatgattagcttgtttaggaaacacaaacacacattttcgagttgtgttatcatgcttgatgaaatggctttcacatcgaataatatgattcatcatctcatcatgagttcttaactccacaaactcaacaactatgcataaagcaagagttattgagatggtttcatcaagttgagttgatgaaaacttgaagtccatggatgatccttctgattggtttgggatacagaatggaatttgatctactggatgaatataacctttttcagagtaatttgttatctgcataagtaaaataaaaataagataaaaatattcataaagaaatttcaatatatataagaaaactagctagtcaagataaatatgatatgttaacttatagcatgtacaaaatattacacatagtgacgtgacaatatttttgaaaatatttgtcccaatttgattagtttaaggaaattactatgttggtaatatttcgagtgcacatatcattatcagcttaatataatatgaaagttgcatggggacatacttggaatggatttgagatggattttttagctatgtcataagcatcgcggtagtattgatactcaaatctcaaaaatgatgaacttcccatttctgaacgctcaggtagataaagatactcaaagtggttcatacaaaaaatacctatcggaagagatttaagatttttacaccgtctcaaatctagctttcttagcccaattaattttttaattgaccaatgtatctcttcaattcctgatccatctaaattaagttgcgccaaatgtacctgaggctctgtaatgtgtggaaagcactttaattttgagcaatatgaaatgtcaaggtaattaagcatcttcaacttgctgagacttgttgtaatagatccaagctgtgtgcaatttttcattgacaaaacctcaagactataaaaacaataatcaaatgatgatgaggggacttgttcaatcgatgttccactcaaatctactttcactatgttctttggaagctttggaaacatgttgatacacacacaaccacctaggtttaattccttcaaacactccaacttacaaatcatgtcttttggtaggtttttaaggcttctacaattgttgagatccaacaaagatagatgtccaagacaccaaattgaatgatgcaatacttctattgcagtcgagcgtaagtatatatattcaatatttccagacaagtgtgaaagagttttgagattagaacaaccgcttagattcaacgagttttcatggatttcgattcccattgatgatccatatcttaacaaatcttctctttggctccaaacttttgatgtaatttggttcataattaccttattgttatttgtttctagttgttgaaacctcattgaaggagcttcaaccaaacttgtgcaaccttcaaaatctgcactcttgagattagccctagacaaattcggtgcattatatagcttttttgagaaacaaagctttacatactttaagctatccacatgctgtgaacaaaggaagaatagattcatttcatcaacttaattaatataaataaagtgcattttcttaagtcattgcaaattctagaaaacacttgtagttagttgtgaccgttagcacagttaagtcagttagtgttagttagctctattgttagtcttttacagttagttaggtgtagttagtttcaagtgtcaaaacacattggactagtctatataaagtccctattttccaattgaaactaagacacaatttgattcattgtgtaacgattaaattaacactatcaataaagagctattttaattgttgatttatgaacatagtaactggtttttagttgtgtggcattcaagtattagactctacaacaattttgctataacgttttagaagaaacataaaattacttaggggaatagttataaaaaaattgtagaattatttaggtaatggttgaaacttgctattaattaacatagaaagttagaaaattttagaaagatttaaagatgttctatgtatctgaaaaaaaaaagatcaaatccaaataagtttgtaaaaatgagttgaatttcattgtctaagtgtagtttaagcttgcaatacgtattgttcataaataacaataaagtgttataatttcctatactcaacactttttttttatatatataagtctaattttcatttaacataataaaaaattattacctggagtccattccaaagatgctcaaactcgcctaagggcatatcaagtttaacaagattatgtggaatgaaagttgatggtaaagacttcaatgggtattgaacccacttgagatatctaagtgcatctggaagaaaatcaagaccttttgaaactcgtaatttgtagttccccatgcatacaataattttaagcaatcttaaattgtacatctcattgaaggtggaaggctttatgtcaatatcatgcttaatatcacgtgtatacagtgacaatccttcaatcgttgaagtaccctgaaaattgtataaaaaagagattatattacacaacttgattgcatattacttttacaactacaacaccaacaataaggggctccccaacccatttgacctaagctaaaaaaaaaaacaaacaaacaaacaaacaaaccatgtacattgtcctcttcatggtatagtaataattaatgtcatcttagccaaaagaaccaatgtgcttaatttgtatttcaaaatgagcattgctattaggcaccagtggtgtctagcaccttctcgacatgtcgtgttgcgattggctagcgatactccctaaaaactattgtattaaattatatgggacagatacttagttggaccaatagcgatattgacacataagagggtgctaagcaccactggtgccctttagcatttctctttcaatatatgcagtattaataaccttaggtttaaaactattttgaacaccgtgttttgtgaaagttattaattggatctcttattttattaaatgataaaatagaccctatattgtctctcagcttaatttttgataatttttttagagagaatggctaaaaggcaccagtgatgcctagcactattctatgtgtcaatatcgctattggtccaattaagtataaggtcccatataatttaatgtaataatttttagagagtattactaacaaggtgacatgtcaagaggtactaggcactattagtgcccaatagcaatgctcttttttttaatatagtgaacttaaagacaattcctagtacgaatagaaaacataatcagtttatcataaaactttagatttggttattattaaattttattctgataaaaaatcagttcagagtactatttttgaaaatacagagtctaatttgtcatttaacaaaacaaatag

SEQ ID NO: 28537 - DNA, 3404 bp, Cannabis sativa
ttcatttacataaaatcaatcaactattttaaaatttgttatatgaaaattggttggattaagaaagtacaaagtagtgttttgtcttttggcttagcttagctattctattaaaaacaaacccctttaagcttatcaatttgactatagtgtatttagggttattccatcaattctttattttattttattttttgaaattgataccattttttccatagattgggatcacaccacaccttattatatatataatatatttgtcaaaaatgatgtgacatttttaatactatatatatatatgtcattttaccagggataatctttataactacacgttatacacattactcaagaaccttataacatttttcacccaataaaaaaataaaatcatattttagaataaaaataaaaatacagatggtaaagtgctaaagtttaaattacctttttggaaagagaatcttggtaaagattaaagaaaatagataaggactaatgctatttgccttgttcttatagaacaattatttttttttatatggaacaattcttttctttttttttttccatatctactcaactaaatttaaagagaaaaaaagaaagaaaaatctttgggggttcaacttcaaactagataaacaccaaaactattaagagaaaaggacaaaatagtaaattcacttagaaacgaaattggagaaaaatgattaagcaatcaaataaatgaaattgaattgatgtaatgtgtacagctacaagtcaaaccaaaagtgtcttcaatatcaatgctacctaaggtgttactttgaatttttgctttttctttttagattgaatcaagagcaaaataaatttttttaaaaaaaaacccaaaaagcataattttttttttctaaatctagaaggtataaatataatattaagattatatgacacatacatattttatatatacaaacatacaattttaccaaaaacaatggaatcttgcaagtcctaaattgaagtcctctttccacttatttttcatttcattcatcatcaaagatttttggaatttaaaagtgaaaattttatataaataaatgttttgaagacattattaaacatggtataaagatataacttgatttacaagctgaaacaattctttaagttatcaagtattatattaacaaagaatgttttaaagataattaagtggaaagagaaataagtattacacatatacataatctattatcataattcataattattattattattattatggggtacctttcattttactgtaacaaatatctacaacatcaaatcaaacattttattggttagtgaaaagaaaataaaaaattcaaaaattccttttaattattatagatccaaaatccccaaaattaaaaataaaataaaatcaaacaactattattttgttcttttcgttcctatacaaattaagccctaaaaaaagtccttgacattaaaagaaacttaagttaacaaacaataaaatacaatctcatctgtatatttatttatatcttgccaagtgtagtgagttgttctttctacttttctgaattttaaacacttgttacaacaatgcaagaaattctttacatttctccataaataacatgaaaaaaaaaaaaaaatacttttacacttttatgcatgccaatatcataattttctgagcttaaatattattatattttcttctttttatgaaggcttgtttataaaattaaatttttttctgaattaaaataataataaacacaaaatagatatcatatcatataatatccttctatacaaatctcactctctgctaatttttcttcagtcccattaggaccaaaactaatcaaattacataatcaatacaatctcttcccaaagcaaataatctctaaaaaaaatgaccaaaatcaacaaacaaagctacaataacaattagtaacccattaagaaaaaaactaatcattttttcaaaaaaagacaaaacactcaaaatatcacaaatttaacacttacaaatcttcaaaaacaaacccatgagcaatcttcaaccacatctttcttactcctataatgtaaaataaataaaaaccaattaaatatctatttacatacaaacataaaattaaacttaattaaatcaataatcaagaactaaccccaaagtttttaacttgaattatttgggtcttcatctccactatcagtagtttgaggctgttgttgatgatgttgttgttgattttgatgatgttgatggtgttgttgttgatgatgatctaatggatgattttgatgatctgaattcatgttcaaaccacctctagagtaagcatttagagcagccaacattcccaaattcgattccgaaacaccaagccctagatgttgcgaaggttggtgctgctgctgttgctgttgcggttgcattagcatagagccaagttgaagaggactactcactcctccacctccgcctcctcctcgaaactccatgttcccgtgatgagacggaagattaaaccggtgtggcataaaatgcaacggcgcttgcaatgtattaatccccgaaccatgagtaaccaccggttgagtcggaaacgtccacatctggtgatgatgttcagactgctgctgctgctgactgaccgtaacagcagcagcagcagctactggaactggagaaactccagctccagctgagactggcagcatccaaaaggtgctgccagctccactagcttgggctggcgctactgcccacatggcagtagccggtaaaatattagaaggtcttaataacccagaagatcctgacccatcttgattttgttgttgctttggcaattgcaacccaccaccgctatcaccaccaccaccgccgccaccatcaccgctcttaaaactcttattactattagaagaaggcgatccgcctccgcctcctccgccttgattagtagtagagtcactattttctttaaacaaatcttctctaaacctctttctcatataattctcactagaatcaccaccaccaccaccgctatctcctcccccgggtaacgcttcggcaatttgatccgctgtcataagcggaaccgggggagacggttgttgatggtggtgttgttgttgttgatggtggtgaaaacccattaaacccgaatgggcaaaaccgccaccatcatcgtaatgatgagcagcaagagcaagagcactatgaaacgaatgaggagcagacttagaatgaggagcagagagagtagacccactgctcctcaaagaaatattcaaactcgaaaaattagccggaatcgttccggtaccagtggctgcaatgatagcaggttcggcttgctggagca

SEQ ID NO: 28538 - DNA, 1598 bp, Cannabis sativa
gtgatgataggcagtcacacgagggcatatattcggtatcctcataacgcgtttcatgctcaactttttgaataatttaatcgtcaaccatttaatttaaacataatagtttatgtgtattgcttcttttactaaccactacattattataattattaaaatattcaattaattatgggtaatcatgtcccacggatttcatgtactttattaataaattagatattacatccagtagcttaattttatttgttttctctcaaaaaaggagtgatggaacattcctttagtgagttcatcataaaaagctgatccctatgatcttattatctttaattatcattaagggaccagaattatagggttatatgacacgtgttccttggttttttagttgatggttacgtatgtgtaatgtgttggattggatggtccatacctgtacacacccgttccagggagatctttggaaattgttttataattgattatatgcataattgtgttgtgtcaataagaataccaaatagtaaccaacaaacatattagacaaaccaatactatttatatcttacacgtcatcaattccgaaaattattctccactttcaacaattatctcgtgaggtttttgggttgatgattgtaggtggctgtggtatgataaaaatttaatgttgtttgtgttaaaaaatttatatgaagtatatatataattgttgtatgaagtacgaaattaataaaatatatatgcactataattaaggatcgaaatagcttcagttattgattttttgagctttaatctcacataagctttgatctgcaaagttaattgattgatgtgggtaatcgggcttcaaagctctctcttctctctttagatggatttactgtagtgagttcgtggaccgagactctatatttatataggtgagaccttccatcaaaatctctaccataattaatatcagaatattttgacaattaattctaaaaattaaatcgggtaactgaaatacttgtaattaaatctgaccataattagaatattttagttaattggtaaataattaattataagttataaatcaaatcaaataaaatatttgatttgttaccatatttaaatattctaacattctctcacttggtcagtatttaactaatttaccacttaaaacccgacgttactcattacgtaataaacatatgaatcatagcaataggtcctcattgtgagtcgagtattatcctccttgtattatgatatattcattatataacaatgtacttaagcaaattgttagaatattagttgtaaagaaattagagaaaattatattttagtagtttcctatttgtatttaatagtttctcatttagtcttctagctttgtatataaatatgtactattctatgaaatacatacacaattcgattcattattttctacatggtatcagagccatacttagaattgtgattcgaaatttgaaataagggttcataaaaaaaagattagggtttgagtttagggttcttttttgaaaaccctatttggagtgcgaatctattctcactgcccactcaggagg

SEQ ID NO: 28539 - DNA, 1947 bp, Cannabis sativa
  modified_base (92)..(96): a, c, t, g, unknown or other
tcccatacctacacagtctctgaatcatcccacttgaccttcccaggcggtgtgggattgcacagcttactcggtatttccccttacggatnnnnngactactgactgtcacatatatatctgcctcaacatacacaggcccaagaagatctcatttattcgcaagaataaatacaataatgcaatgcaacgtcagattatgaataagtgtgacattcaccttgctattcaaaaggaatttggcaagacgaatcatctgctaacacttatcatttttttcacattataaaggacaaggacaacaacttggagatatgcaaagatgctagtgtccaaatcaacattgaccatcgacaagccaagcgagatgctattctctgaatcaacattaaccaatcaaaggataagaataacaagcagttatgtagttattaattgctatccaacacgtgatctaaatgaaacctgagaattaacaacatttcattaaacgattattatttgaatttaaatgtaaataactgcaaaccaatattcctataaatagggcagacgccacaaaaaaagggacgaagaatttgggagagaaaaaacataagtacgattaattatatattgtattgaatattcaggaaatatcttgaataaatagactcgtagagtatgcagatttaactacaaaaccacgtaaaaatatctagtgtagtacttatatattatttatactttattccttataatttcagtgtttaaatttattacgaaaaggcttattattggttaacgaaaatcaatgttaacagtttggtgctttcattgagagcctacatgatagaactcagaaaaatccctccttacaaacaaaaatctatccatgactgataacaatcaaaacgatagaagtcgtcgttagggaactacacatcgccctgggaaggaaccaatggattctcaaagactccatacttctggaaaaacacatttgagaagaaactatgattgtgataatcaaaacctagagggaaggaacgaagaaactaatgcatcttttttaggatatgtacctaggcgtgtgaggatgcttatgatccaactaggtatgtaccttttgtggaattggaaaatcgacaactttgacaacgcttagccgaatctaaccaacaaaatgctgagttagaaagagaggctgttgtagcaagggcgactcaaggaaataatacactgaatcaacctgatcctagggtaagaaggccacgaggtagaccccaggattcaagaaccaggaggcaagaagcaaatcaaggaaattcccagaacacccaggaggaacaacctgggggtactagggatcttccagtggatgaacaacaaaacaaccaagaacaacatcgagaagtccctcaaagattccctggatttatgaatcaggggaatgaatgtaatgatgtacgagagtcttctcccaggaatgatgacacaaggcaaccctgacctagggaatatgaaattcgtcctaataatgaaatcctaggactcaacctagggcaagcagattaccaccgagaaacccataacgtccttctcaatctgagagggaaagagtatacatgtatcaaaatagaggacgtgtatcaaacctctactgaaggaggaggccggtgaaagacgaggcaagttcaagttcaggacactttagatctcgaggacacagtcgatcaggcagggaaacgcgagaaggaagtaggtctcatcgttatgctgatcaagaaagcatgagaaacacacgaagttatcaatttgagaattactcaaatacaagatctgtgagtaactacaagcaaagacaacctgatctttgtaatgaccgctatagtaatttggattagaaaaggcaattagcactaatttctgtcattttattattatttatgaatttaattattttgg

SEQ ID NO: 28540 - DNA, 1302 bp, Cannabis sativa
ttaaggcctattttattactacaatattattttctttttaggaaattttactacattaatatgaccatttttatcacttgattataaaaaatacaatcattccaatttttttattttgctgaactcattcctaatttttttttgcaacatacaattttggaatttatttttaactgtttcatatacaaagaaatgaaaataaacatatgttgatttttatttccctctttattctctcttctatctcacacacacatactcataaatgaaaaaatatataaatttatttctacaagctatgctaattaattttgcaaatggatttgttttgtagtatgattttagtggaagaaaagaccttgtaaaattcattaaggaaattcaagcacaaggcctatatgcaagccttaggattggaccttttattgagagtgaatggtcttatgggtatgtctaaaaatcactcttgcttttaccattttcctttaaataagttttaaggtatacgttgttttttctaaaaaaaaaaaaaaggaaaattattttatgagaaatttttagaaaaaaaaaaagttaaaaaatatgaagaaaacaggcaactgattatccttacttggtttttctatgtttttttaatattttctttaatttttccatagcaaatataaaaatccataaaatttgtaatttccttacattatttttattcttatacccaaaaaaaaaaaagaagaaactaagcttattttctgaatgatttaaatatatttatttctactaattatttttctaaaaattatggtgatttaggggtctgcctttttggttacatgatattcctggcattgtttacagaactgataatgaacccttcaaggtataaataaataaataaatatgaatatatataattcaaattagaataatgagacaaaaaaaattgatttaaaatattattgtctaaaaatacaggaacaaatgcaaaggttcacaaataaaattgtaagcatgatgaaagaagagagactttttgcttcacaaggtggaccaattataatatcacaggtaattaaattaatattaacaatgcaataattataaaatctcaaccaaaatttagccatttttcaattggttgttagaattgatttcacatttatcaatgatgtaacaagaaattttattttcaattttacatttgaaatatgtcatataaatttatatacagtagaacctctattcaagaatacacttgggactaagaaaattatattctaattgagaggatataactaaatagag

SEQ ID NO: 28541 - DNA, 8157 bp, Cannabis sativa
aaatatggaaaaataaaatggtaagaaaacttaataggaaaaaatatggtatttaaaataaaaactaaacatatatgggattgaattaccataaaaaatattaaaatcccttcatatttaaaaaaaataaataaaacaaatgaaactacagtgatcgtcggagttgacatcggtgctagaaaaggcgtcgtagtttgctgtcggtgctggaaaagtaaaccggagtagctatcagtgccgagaaagtcgctagagttgctgtcggcgccgaaaaagtcatcaaaattggcattgtcgctggaaaaatcaccgaaaaaattaccaagaaattggtttcttcaccaagaatttcttgatgaagaaaccaatttcttgttgattttttcgataatttttccggagaccgccaattccgacgactttttcggagtttgatgtcgctatcgaaaaagtcgcgcaaagtagcttttggtgtcggaaaagtcgtcggagttggcattgtcgtcaaaaaaatcactggaaaaattagcaagaaagaaactggtttcttagtgacttttccgacgactttttcgaagtttgctatcagtgtcggaaaagtcgtcggagtagctgccagtgttaaaaaactcgtcggaattggcattgttgctggaaaaataccaagaaagtggtttcttcatcaagaaatcagtttcttagtattttattttcgcgacaatgccaattccaacgatttttggacacctgcagctactccgatgatttttctggtgccgacaacaaactccagtaacttttccagcatcagtgacaaataaatcttcctaaacagataaaaacattaaatatgagatttgaaaacgtaatttacacatatatatatatggcatatcaaataccataaaaaatacttaaaaataacaaaatatcatataaattggccaaacttaaaaatgtcatatttaagtaaactatttttaaaatcccatagtgagtataatttccttttttttaattaatattttggacttagatccaaacccaaacccaaacccgaccctagtgcaaaacctaacacccgacccagtcccgaatccaaacacaacttaaataaaatcaaaaaataaaataaaaataaattttacaaaagacactttttattttctgtttttaaaattgaaaaacaaaaatagttatataacatatttttatttttaaaaaataaaaattttacttttatttttataattaaaaatttaaaaaataaaaatattaccaaaccatacatacatatgtaaatattaaaacataaaaagattttacaaccaattgccccaaaaaaattttagtaggagtttacttttattatactaattagtaaagttcacgagtcaaaatttcaagtgttgtttctctttatttatgaacctatcctaaatatgacttggtcatatgtaagatacttcaattatttatgtaagctcttatacatagctgtgtgatattaatttaaggccataaacaactgttacaaaaaaaacctgtttttttttcatattattatgacttacaactttcacaaaagatacatcactgaacaaaaaggcaaaaataatgtgaaaccaattgagaagcaacacatgaactttcaatacagctagttgcataacctgtcccaccaatttaagtactagtctctttcatatcagactctgaaagaagaatcagacaaaaccaatattaacctctgtttcatatgcatgctctataaataataaaggggtaattgagtcaataccatcattttcttggttgaatattcttctagttgagaagtcaacaactgagtctactgactctaccatattatcaaatgagagtgctacttgttccttgaaactcatgagagagtagtaagaaataatcatggaaaaatttcagagccacaccatccatatcccaatatatcctttacttcttttccttgttaatttctcaacccttctttacttaatctcatcagattatgttgttccaaaaaactacttcatcaattgtggatcaaatgaaaatgttgatgaagttaccagaaactttattggagacgagaactcgaatttgttctcaattccaaagccaagcaagactgtcaaagccaccaaccaattggggaacacatcaaacctgtaccacacagcaagaaccatcacagaacaatcttcatatggattcaaattcaataataatgttaatactacttacctggtacgcctccatttttttgccttttcatcccaacctgatctctctacagcagtttttgatgtttcagcttctgggtatttgctcttgcataatttcactgccaaaaacagtacaaacttgccattgataaaggaatttttactcaccacccagactgaaatgctccgaatatattttacacccaaagaatcttcttttgcctttgtaaatgccatagaagtttttcctgcccctcctctgaatttcagccccaatcaaactgacaaagttggggatcattacaaaataccatcctctatatctttgcaaaaagtttacagaatcaatgttggaggacctgaaattgaaccaggtagtgacacaatatggagaaactgggatagtgatgatgtttatctcagaactaagaacactgcaaagaatagccagttttactcgaacaagccttattaccagttagcggatagtgcatatgctgctccggatttggtgtaccagacttccaaagaaatgaatccgaacgcaaacaatgaatcaaaaataacttggagcttcgatgtaaataagactgctgcacaccttgtaagagtacacttctgtgacattattagtctttctctcaatactcttattttcaatctttatataaatggcaacttcagtacggagatcaattcgttggcctatgtcacccagtcggctgcgccttttaccattgattttttggttcattcttttgattctggagttatgagcatcggcataggcccttcaaatgcaagtatagagaaaaatgcctttctaaatgggctggaaatattgcagattatggatggaacagctctagttcccaaagaagatgagccaagtaagataagcattcctatagtagttggttcagctctaggaggattagctcttgtttcggttttgatggtgggattcttcttatattgcaaacgcagaaaaccgaaaacagtcgaacattcaagttggggtcatgtccctgcatatggagtagggagctctcacagcagggtgaccgagttgaccatcaacggctctcctattccaaacctaatacttgggttgaagatttcttttgctgaactccaattagcaacaaagaacttcaactccaaacttgtaattggtaaaggtggattcggacatgtttacaaaggaacccttttgaacggtacaaaagtagctgtgaagagaagtgcacctggttcaggccaaggcttctctgagttccaaacggagataatggttctctccaaaattcggcatcgacatctcgtttccttaattgggtattgcgatgaaagctcagagatgatattggtatacgaatacatggagaaaggaaccttaagagaccaccttcatgatccaaaacttcctcgtttaacatggaaacaaagacttgaaatttgtataggcgcagccagtgggctaaactatctccataaaggctcatctggaggaatcatccatagagatgtcaagtccaccaacatcttgctcgacgaaaatcatgttgctaaagtggctgacttcggactctcaaaattgagtcctctcgaagatacccatgtgagcacaaacgtcaaaggcactttgggttatctagacccggaatactttaggtcccaacaactgacagaaaaatcagatgtttactcattcggggttgttcttctggaggttctaagtgcgagacccgccattgacacacagctaccaagagaacaaatgaacttagctgattgggcaatgagatgcaagaagaaagggatgattgaagagattgtggatccttctatgaagggtataatcaatcccaattcattgagaaaatttagcgaaacagcagagaagtgcctacaggaggatgggtctagtaggcctgccatgagtgacgtgatatgggaccttgagtatgcattacagctgcaacaaacatcagggcccaaagaactcaatgaggacagtacaaccacggtttcatcggcattcgtgttaccaaatgcccaaaggcttccatcaattgggtccaactacgaaagagatgatacaattgccatgagcgccgatttctcatgcttgacggatagtcaagtgttttcccaattgaaaatagatgacgcaagataagtcttgtttagtttccgagttcccttggtttcatgtgttttctcctcatttttcttctaatatcaatctgaaatgcattgaagtcctttcctatagctctctttgtaacactatacttattcctatgctctctttaatataaatactaatactctgtttcttgtgtaaagagtaaaaaactaaattcattattttttttaaaagggaaactactctaaacaaagcacaaagtttggtccctaagggtccctttctctttaaaatgtagttctttcacccctcttcccttcaatctaattgtccataactctctcactcaatctctctcaagcaaaaagataaaatcatacatatcacttgaattacaaagattcacaaataacctataatttggtgtcaatttagcaccactcaagcttcatttttatgtatatgaaaagactcacatttataaatctagatggtttcttcttcgaaagttcttttgctaatggaatcttgtttcatcaactcaaggccaaacacaaagacaattagactacttttaactaattcttaagtataagataccaaaaggatatatattgtggaaaaacttgtgtacaaatggcatttagtggcagctgctaggaaacagcagtaaacttgtcctaccacttaaagatgttcattttcattattacttaaaaccaaagtagaagtccctttcgtcctgccttttttggtgggatccattatatataataatgaaaaataaaagcagcaatgaaaaacccaattagccttcttctttttcttcctctttgatatttctggattcaaaatttaccattgaaaagtcaactcaaatgcctacctcaaactagacacaaaactcgacctgagttgctgctttatgcatatggtgatcattcaactcaaatctctaccattctcagataagtatagttatagctagggctaggacaagtcttatggagaagcatcagagccacagacctaatatccctaaacctcctctgttaattttccttctccacttcctaacacttcatttaaacatctcttctgcctacgaaatcccagtcaagtatttcatcaactgtggctcaaaagaaactgtaaacaatggcagtcgcaacttcgttggcgacaaaaaatctagcacctccaaaactggtttcttctttacaaaacccagtagcactgatacaaacataaatcagtcgccatcgaatatatcagctctgtacaacacagcaagaattttcaaggaacaatcttcatatgtgtttaataccggaggtgttaatactacttacctggtacgcctccatttctttgctttctcttcccatactgatctttctacagcagtctttgatgtttctgcttctgggtttttgttgttgcataatttcactgcccaaagtagtaaaagatttccattaataaaagaattttttatcccaactaacactagcaagtttcaaatatcttttacacctaaacaatcatcctttgcatttgtaaatgccatagaagttttccctgctcctcctttaaattttagcctcggtgaagctaagaacgctggggaacagcaacccacttcagttttgcaaaccgtttacaggatcaatgttggtggcccaagaattgaatcagatagagacactgtatggagaaactgggaaacagatgatagttatctcgtcgacaaaagcagtgcatatacttataagacaaccgtcagctttaaaaacctatttgatgagaccccagaattagtctacatgagtgccaaagtaatgagtaacactaccggaaattccaaagtaacgtggagttttgtggttaataagaccgctgggcaccttgtaaggacacacttctgtgacattattagtatatccgaaaataccttagcgttcaaggtgtacataaatagcaacatcagccaagagatcaatgccactaactatctccgcaactattccccatttcacattgattttcaagttggttcccacgattctggagtcatgaacgtgagcataggccctgtgaatccagaaattgataaatctccctttctaaatgggctggaaatattcgagataatggacacattgacttcaatgccggcggcagccacagagagcaactcacccaagactacagttgtaagttcagttcttggaagtgttgcatttctctgcattttggcaactggtttctacttcttttctaaacgcagaaggtcaaaagctatcgaaaattccgtttggagcaaaagatcaagcaccactaaacaccctgttcaaaatttaaacttgggcctgaaaattcctttctctgaaattaagtcagcaacgaagaacttcagtccaacgcagcaaattggcaaaggtggatttggaattgtctataaaggaatcctttcaaatggcacacaagtagcaataaaaagaagttcacctggttcaggccaaggcttgtccgagttcgaaacagagataatggttctctccaaaatccgccatcaacatctagtttccttaattgggtattgcgaagaaagatcagaaatgatactggtctatgaattcatggaaaatggttccttaacagatcacctttacaactcagacttacctagtttgtcatggaaacaaagactagaaatttgcataggcgcagccagaggactcaagtacctccacaacgactcccctcaagtaatcatacacagagacgttaagtcagccaacatcttgctagaccaaaatctcatagctaaagtcgctgactttggactctccaaatcaggtcctcccgaagaatcacatataagcacaaaagtaaaaggtaccttcggttatcttgatcctgaatacttcacatcccaacaattatcacaaaaatcagatgtttattcatttggggttgttctcctcgaggttttgtgcgcaagacccgccattgatacccatctaccaagagatcaaatcaatttagctgaatgggcaaaatactgcaacaacaaaggagtaatcgaaaaaataatcgacccatcaattaaaacccaattaagccctaattctctacagaaatttatggaaacagcggagaaatgtctgcaagaagaaggagtcgatagaccttccatgggagacgtgatttgggacctcgaatacgcattgcagtatcaacaaacgccagtgcccagagaaccccacgaagacagtacgatcacagcttcatcggcgttcgtaatgtccgacgcccggcggttaccgtccctagattccaccatctacattgacgatgactcggcgactctgagcgaaaatttgccccatttgaatgctggcgaatcatctccccaaatgagaactcagaatttcgatcaataacgaaaaattagggtttatattggataatgtataatgaattgaattgaattgtatgatcttttccttaaaagactcttgttttgaattttctgatagttttccgttttgtttccctctgaaactgcctgaacagcaatagcaatactgggcctgggcctagaaaatgggcctccacataggcctggtcgtttttgaaaggaaaattacacaaaatattattttattttaaataaaaaattaatatttttacaataaaataatttaagaagtttttttatttttacacttaaagatagtttttttttttttt

SEQ ID NO: 28542 - DNA, 2128 bp, Cannabis sativa
gcttgaaaataaatatgacaaaaagtttaaatttcaacaatacaataattagtggaatttgagctgggcttttacatattagacctaaataaatataaaaattgatatctttataatatacagtgggatataaaccgcatattaataatttaaaatcgcaaatcgtaccttaccgcgcaatttaattataaaaaatttaaactttgatatcattgtaaaaaatttcaaattatatattattttttttttttttgcaatgtgttgcgctaggagtgatttgagcggttagataaaaagccttacatgttcccataggatttgtgttttataaaaacccatcaagaatttaagagaaattaaagtaggggagtgataatacatatctgaccgaccagtccttttagcatcaataaaaacacaccaccaagctccttttacttctgtcacagtttcccactaaatgtcctccaggagtttagcttcaaatttactgtgtctctgtgctcatgcaaacaatgtgtttgttaatatgccccacacacaatatataaatatatatacatataacaatattaaatattaaattgaaagtattcaaaataccgatgagactactacagccaaagtaattgcaaaccctagcttgttctcattacattttgtatatataggtacgacataatattacttcttcttgactctgtcctcttcctccataaaaaatctggtaataattattagctaaataaaaaccaaaccaatggccttattataattattactaaagcaaaagctatagctaagttcagactatttgacaagcaaataatacataaatatgtatatatatttatatgatagtactggccaaaatgatcttcaaataaaacaatgagtagaagaaacggcaccgtcttacactgcgggtaaaaccttcaactttggccgtagaaccttataaaaccacaaccatatatggtatgctatgccctggactcatctcattggcttttagtctttcactaaatctactcatacaattaactacatttttatatatataaaatatatctatctacatgtattgttgggtaggatcttttgtcaatgtagattttctgatcaaacttttcctcatttttttgccacaaaatggaaacgaaatctattgattagcttttttcttttttcattttcattttaatacaatcggtgaaaagaagtttattgatgatctcaaagctatatgcagagatcatcaataactatactcttactattttgtaaccgaaagaagttgaggtttaggttgaacgacataagttaaccaaaacaagtagtgtatgaaacgacataattcacatcataaccattgaatagtttttctttttaacaaattggttaggtataaatatctactatctatctctatctaggccaccagatatactactggttttaattcatatatatttgtttatttttataattaagggggtgaattgatatgatatgtatacatgagaacaaataattatagtactatttatatgcagctattcgcatagtacatgcactttgtctatattataaagacaaacaagtcttaaactaagaattttttctgtgtaccaacggaaaattattattagtgatgcgtgtttgtttggatcagaatttgactgtttcagttccctttatataaatactcaactggcaaatgcatttaaatctttggctctagtactatgtaccttctgttctctgctggtaaaatgaacttgctttaattattattggtattattatcagaatatatataatgagtatcatagctcaatggtatgtgaaatgtaatattataaagtacacaatgtaggttcgctcaccaccaacatatatataaatacaattaatgaagttatatatgaattaaattaatattataccccatgaaccgatatgcatgatttatatacacatatacctatatatgtgtggattagtatcgattgcaaattaaactattagggtgtgtatatatagcataaaaaaataataaaaaaaagactaacaaatattatgttctttgactcgatcttctttataattattcaatgtattgtgc

SEQ ID NO: 28543 - DNA, 1830 bp, Cannabis sativa
tttacagaactaagatagaaagtaggttcaggtagtgcttgaacttgtcactactagggagagcctttgtgagcatgtatgatagattgacagcagtaggatctttgagtttaaaccttgccttcattgattatttctctgatgaaatggagtctaacatcaatgtgtttagacttatcatggaagacttggtttctgctcaaatgcaatgcacttttactgtcagaatattggtgttgatctttaatcactaccaagttcctttgtaattcccttgagccagagtttcatttacagcttcagtgcaagcaatatacttaggctctgtggttgataatgctacaactgatttcaaattggcattccaacttattgtgtaacctttcatctgaaatgttataacctgtttgagacctttttgagtcaatatttccacagaactttttcttcgcgatataaaaccttctgctatgagtaaatgacataacgagccaaatacaaaaaacaaggtttttactcttttactctaccgctagttccttcttcctttcatcatcatttgagtctaaatgtatccattgaaaatgcacaaaaagaataacgatttaagtaatgggactaaagataatatagcactaatattcctatatatcaaactcgtaaagactaaagatatctctgtttaaaacactaggaacatatataaagatatctagattgacatgtataatatgtataaatataaatggtagcaaagataagaaggaatactatgattattgagtcaaaaagaatgaagtatagtatattacttgatggatctgttgcgacatggaagtacttgttctgaaacagctcccaactctccttgtcattgaggaaatagaattccttctaagacttcacgtctattacattgctgagatatcgaggcccaagcagaacaatcaaagtgagtcctaacttgaggatgctgatagacctttctggcaagagtggtctttcccaaacctcccatcccacatatcgaaatcgccttatgtttatgagggttctccttttcagtcaaaagagttaccaactcttctcaactctttttgcttctggacatatcttgaagaagcttcagctgcattgtcaagtgatctgtttacaccaagtgcttctaattgtaaagtccaagtatcaatgttggatgagatcctctcaatctctaatccaactttgtggacatcaattccctctcttaagatgttaatagttcttttgagtacaccttcattcctcttcaaagccacttagaagacataagttgcaataacatcctccaagtcaagagaatttttcctgatttggacaaccaaaaggcgaactctctcatcggtaccatttctaaccccaagcatctgcatcttttaagaaagcactcatacattgaagcttgatctgtgctttccccacttggcctttgattccatgcaagaattcagcttcagaagtcaccaagtctccaagcctttcaatcacaaacgaaacaacaacatctgccataagatgatttgctcaaactcagtaactgaattgaattgttataatgatctaacaacaaaacagattatttaaggattcaacaatggctgctgttgtttttccctcaatattccttgctttttgaaaagcagttttctttattactttttgaaaaagaaaaaggaaaagcattagccaaggagtagaagtaacagacagttttattcttcttcttagtcaagaaaccttttaattcatttactctgccttttcaatttcattaaatgttgatgggttcat

SEQ ID NO: 28544 - DNA, 1688 bp, Cannabis sativa
ccttcaaccccaaaaggacctgtagcgccaaaagggattggtgcgaaagtactaaggcccaatggaaggaaaaactaccctagtaattcagtaaaccatgacgatgagacagggggacagtactctgacgatagttagtccacagtagatcttagaaggcgtttagatgccaagtacgagaaagcaaaaagtgagaaggcgagactacgtggtaatgacctcaggaaccacttgaataacaagatccgcataagagatctctcagacagtgatacaaagaggttggaagaacaaatagccgcactaacgaaattagtcaagaagtaaagcggggccctcgtcgattctgaggatgaggacctagagccttgtgtgaggaggattgttgaagcttcgctcccagagaacttcaaaatgtcccagattgagctgcatgatgggtgtactaaatctaaaactcatttggccaagtacaacaagatgatgcaggtgacaagagtcagtgaggagaccaagtgtttgtgcttctcctgaccctaaccaaatctgttgaggattggtggaagaaattagctcatggatcaatccactcctagaaggaactacagtctccctttcagaaatagttcattgttgcccgcgactatgacctagaaatgggttccatcaccaacatcaagcaacaagcgggagaaagcttgaagagtttcattcaacgaatgattgaggtggcaactaagattaaagtgtctgatgacatgaaattggtggtcctacaatctagacttgcagtcggttctctcccatcgggagaaatgcagaggagaaaggctgagacattgtccgaattcatggcaaaggtacaaggctttatatcagtttggaagacacttatcagcaaacattcggtgtccctccagcactagctccagttacttccactcttggatttacctttccagttcctgttcccgaagctcaatacaccctgattgtttacgaaccatctgcattcataccagcacccacacagacccatttctttgggtatggagtaggagtgaaaatcagtcgattatggttggtttttacaattttataaccgaccggtcgattacggtttttattttacgaataccgtaaccgaccgtttagaaattttgaccgtataaaaccgactgtacggtttttcagtttgacagttttggatgatttttggcagttttaggcgattttgggcggtttattgcagtttttggcggtttaaccacttttttattttaaaaactgaaaccgaccgccatgtcaaaaaaatcgaaactgaaactgaccgccaaattcagtgatgacgtggaaccaaaaatttgattacggtctggtcggtttcggattatcagtttttatgaacacccctaatatggagcgacgaaagaggggaggaaaggtttcgagatggagtgagaattccaaaaaagccaagaaagattattttttggtcctccgaatttctctaatttatgctaatttaattctaaaataaataattgttgattttactaatattatatttacttttttaggtggcgtttggtaatacttttttaatcagttttctgtttttaaaatttaaaaagtgaaaatatttttcaaaaacatgatctataaaattgtttttacttttcaatttt

SEQ ID NO: 28545 - DNA, 4233 bp, Cannabis sativa
  modified_base (1961)..(1972): a, c, t, g, unknown or other
  modified_base (2776)..(2784): a, c, t, g, unknown or other
  modified_base (2878)..(2887): a, c, t, g, unknown or other
tttcctatacacaaatttgagctttgtacaaaaaggaaacctttggtggcgctttgtacaaaaaggaattggtatatattgtaactatcttaaaagatttatttgtggcgaaagtctttaattgaaatcggttagtaggacatatagactagttcttttttgagaaaaaaccaccttattaaaaccttaaaagtaaactcaatgggagaaactttaagagaaaaagagcgtcaaataataacattaatcataaaagtgtgatccacactgttagcaatcttaagacagtatataaaagaaatatcactaaaatatttacaaaaagtaaaaatatctttaataatacaacctagataagactgatcaacaatatatagactaattcgatctacgagctaggcttctaaaccaaatattattattaataaaaataatattattattattattattattaacaaacaaatatgcattgatccgagtcgaattcagcctagctttcaattaattatataatcaattaagtaattgaaaaatacagttttattaggaacctagccagatgatgacactccatgtgctatcctcagaaacgtacatacacatatttatgaatcaataattcatattaataaaaaaacgacaaatttaagataggtaataaaccaaaaacgatttaattttctagatgctcttatgggtaacagacaaattaataagaataacaaagaatttttatccgaaaactacattactgtggttcctcattaacatgttttttcatttacaaaatgtagataatttgacattagacaattatacatatctatgcctctagctataggcttcctaatctaattgaagttatttttttaatgtccaagtcaaattcagcctcaagtttttaattgaataatggtcatgttgagtttgtgttttgtgaaataaccaaaaatatagagattgattgtcatttagtaaaggcgcacaaagacccatccaatcttatcaaaattcacatatagctacacaagagcaaatggtagacatcttcactataatactaatttcgagtatgtcaatttatcttgagaagaagtttcaatatattaaaagtatgttgtaataaaaagtagttgatgtggttacaacttgttagtaaatggttacaggtactaatttgtaactaattctttacttactcgggtagtataaattgagtttgtactcattcttttcatccgaataaggagaattctttccctctttctaccttctcggttccatatagctaattagattaggttataaattttttttaagatatgaacagttcttgatagaagggtcaaattggaaaggattttggatttatttaattttttctttaatttgaatgtaagttgatatatatctactaagttgatgttacgtgcaatgtacgtataattctttttttttaattaggtttaattaggtgaagttaagtgtaatacatgtatgtttaatttattttaattaagtaatgtattttttttttatttttgaaatggaatttgagattttgatctttgatgatttttttagctattgcggctacattggtatgacttttagatgtgattatatatatacttattttatatgtacaataaaactcaagtgagatatctcgtgaatcgttgtatgcccaattgagtggaattgtctaatataaaattatttcaagtattttaaatttaaatttaaatttcttaatagaaaatacgaaatttgtggcataaatacatattttctttgacttgttaattttatttttttattttaaatttaattttctaaatttatataattagttgtttatttaaatatattttcataatttttctaaattaaacaagttagaaaatgacacatgtcattttagaagtaattaacacaaatatctatataatttttannnnnnnnnnnntataataatattataaaattaattgtctatcctaagggcatctaaagatagagaactaggcaataaaaccttaatatatcataaaagaaaacctctaaactgagatttgtaacttccgatccaccaataaaacacttacaaaataaataaaaaatatttaacatataaaatattaaattttatataatattgtcactcatatttctctgatgtaaagattagaacttatctattatcgtctctaatactaaaggtggctatagtatagatgtgtttatattagaccataccgaccttataaaattaaaactaggcatgtaatagctttataaaatcaaaactagtggtattgaccttataaaaccaaaaactagtcacagtggccttacaaaactaaaattaaccatattggccttacaaaattaaatatagtcatattagccttacaaacacaaaactagtcatattggctttacaaaaactaaaactagtcatactagcctcacaaaaaccaaaactatagccacattgatcgtacgtacaaaataaaactagccacgttggccgtgcaaaataaaactagttacattagtcgtacaaaacaaaacaagccacaatggccttacaaaatcaaaacaaacgaaacctgcccatatatgtgtgtacttttggtgtatgatatatgtattttttgttatacggtatacatttcttttaaataatattaacttctatttttaattgtatttttattgacgtgacatacaattttattagcatactatatatttttatttttatttnnnnnnnnnatatatatatatttatatttctattgtaaggtatataatttatgttatatggtatatacgatttattatacagtatatcattttattttagatnnnnnnnnnntagtttttattttattatatataacggtgatatataattttgtaagtatggtataattattttatggttgtttataattttgttaatatggtatatatattttaataatattatgttattttgttttatttgtttattgtaggtatatatattttgttgtatgatatatgatttttgttgtgtataatatattatttatttaagatgatatttagtttctattttattatatatataaggattatatattaatttttttgatatgcatacatattttaatataactatatataattttattagcatgatatatatttttgaatattaatttagtattgttaagatttctttatagtatataattttattactacggtatattaattttcagtgataagctatatcaaatattattgtatatatttaatgatctaatatatttattcatttttgttacaatatattattctacaatactaaaaaaattatacaacttaaatatacatatttactacatattattattttaaatatatataataattaaattaagttatataattttttaaaataaaaaattgtatttataggcgactaggtgacatgtcaaattaatctggcccaatacggggttaatccccattaagctcactaatttagcatcttcaacactaagatttgactagttccctaagtacaggccctaccatgtgtataagaggtctttaacatgtcttttggtctcattttataatacttgaagtgctaacgaaactattttagtgaagatgtactgatagatgtcgattttctctagcggtagccttttagaaaaagtgtttgtgtcttatgtcagaatagtgggtgcatgaatctccacatttattatgctttatgagaaatctatttttccgaatgtacggagggttcaacctgtgataaaggttgtccttgttgttgaaggtcgaacaaacacatttgtaggctcctagtggattatggagcccttcgcttcaagaactgagtgatagagtatgtagtggtccctggaggacttgtcttaaagtgggaaggtgactccttctagaaactagtcatttcgaatatagtcattgcaacattgtggacttgtatcttttgaaacccatctatttatacaaatccggcccgtctgaccatttgaatttaggccctaagggaaagcttgtataaagaagtatttatactcgattcctttttaggaatggatatgtgacagtcagtagtcccgagatccgtaagggaaaatatcgagtaagctgtgcaatcccacatcgcccagggaaggtcaagtgtgatgattctaa

SEQ ID NO: 28546 - DNA, 1263 bp, Cannabis sativa
tgaccttcatttgacccgaccgaatttccctgactcctatgaattttggaaggcaaacccgtcaggcaactttgattaccttagagattctaaagaggcatatcttaattactgtgcgggtcaggcagccaaagaaagccttgacgcagctaattctacaggtccaaccgactaatgcactgatacccctaccgtccagagtgttgagcctctggccccttaaggccaagttgatccttacaagaagcttggcacccctgctgtctaaaataataataatcatttttttctttttatatatctgtttggcccatgggcctttattagagaaaaaatgaccggcaaagcggtttttaaacttgggtaatatttcattttattttgagacaattggctgatcgggtagcctttaatcctgggtttaccatgctttgtcttttttttaatgatttttttctcttgttttgataatattcgtacaaactattatgtttatttttttgagcttgctatttacttttaccaatgctttgtacgggtatagttgccccccaagcgaccgagcaaacttataactcttgatcacttgcacttcacaagtatggtttttgtctatcggctatttggttaagcagacctttgtacacatttaatggtaaatttataacttgcttatacaattgacacaattagaatggaaataaacatctttattcgtttattggtcagaacagtcttgttaccgtaataacttacattcataaaagctattacatgatttaatctgatctttagctaaatttaaacataaaacaattgcacttatgaaaagaaattgtactgtaggtggtcatctaacctgagttaggtccaagcacaccagccatgctatcttttgtgttcaagaatactcttctgaggatcatatctcccacaaaaaatttccttgccttcactagcttgttcaagtatcgagccaacgtttgttgatgggctactaactttaggtttgctaacgctcgtttttctttaattttgtcaagtgattctgctacgagagcgtgattagcttcttgatcataggtcaatcttctgtgggacggaggttctaattctacaagcaacatagcttcataaccataagccatagcgaataatgtttgttcagttactatttgtaaacaattggctgtctgtttgccattgtctgagatgattttgtgctcatattctttaccacaaagtccaatacttttttagatg

SEQ ID NO: 28547 - DNA, 2445 bp, Cannabis sativa
gtcacggcaacaaattaagtacattatagcaaaaggggtttctaatttcttgatgccccaattaaacaaacatcataatcactgattgcaatttcactctccacgagctgcagagtcactccttttaatggctttgctcataacttcattatttgggtaataatgaagcttgatcttcctctgcttcttcttcttccattggttcatttggtacatccacacattaactgcaagacagtgtactcattaattaattcatgaattcaaggcaaaatgtttgtctttactatgtcataaattagctgttatttgctatatcttgagtgttaggcaatgcataatatgaggtggtgacctatgttaaaagtgattatgagtcatgacagcaaataagcttgtaaaaactcacagttactccttaagagtctgttactcttccttcatctgtaacaaaatggtgaagacaatttgataaacttgctgtattaatatcataaaagagtacacataataaggccttggtggagccacttctgtcagttattattaagagaccttaaattaattcgatcttaacagataaagaccagagaagtgagcatcccaatgcatcaaattaattcatgcatgccatggttagttactaattatatctccactgctgcagcaccattagtagtctatcagtgctcttctatttatgattttgttagtgaagtatcattttccctgttctctttctccaggagcaaagatttgtgcacatacatgttaaggttgcatcccaatgtatgtataatgtacatgtggattttaagatattttcaatccaataatatgtataatatcccttctgttattgtaatgtaacaattcttatttatattttggatgttttgctaattacttcaatcaattaagggttttttgcactactaaaataacacatatatgaaatcagattacatgtttgctagagcttgtttgttcttttgcaattgaatttgaatatatattacatgtttagtttttacataatgaaagtggagtttctttcactactaaacattaaacaaatagttcaatatggacctttgaaagcatcacaatatatgaatacagattattttgtattgataatgaataaaagagttctgaaatcatttattataattacagcaagcccaacaaatttataggaatcacttattctcttgtacttattatgtatttgaaaccaataatttcctgtattgattttccataaaaacaaatcaataaaggacattttaaatcatacagtaataattgagtctatgtcccaaacattattccaatatgaaattttcaaaatggggatgaaagaggttccctaagcttattttgttccacagattctgttctgatgatagttgtaggagtgcatgtacacgtgcactgacaaggtatttcaataatctctcttgtttctttcaacacacgaccaacttcatcttctttttcacttatttgcttcatcttttggattgaaccaccaactggtgtcattctctacatgaaaaatagaataagaatcattcaactatatataattaaacagaggaaatattaatgaaggaaatatgatcaacctcgatgaatatgattgtggcttcatgtggctcaagcttttgaacagcatcggctgctacttcctgcacaagatcaaattcaatataatgttatgtgaagaatataaaaatgtatatgtaaaatgaaatttgcatgaattaaaatagaacagaaggagaagatataggcatttgtattgtatattgtgtacgtaccctggcaaggttgagttgctcttcttttaaggtccgaggctctgactcaatggagctattaacattagccatgaaaaacagagggtgttataaacttatatctgatgacttatctatatatataaggagtgaggggagagggaaattaagcttggaaacaccaaccaaccaacctaatcacaatcacagacattgactccaactctagtggctacagtttctcaagaaattagatcaaactaactcaaaagttaataaactaaaactgtataaacactcactcactcactcttatcccgtgtacttgttagggaatgacattataataactccatgatcacgggggtcaatcagtacttggtgctttattttatactttgtgggacaaaaaggtgttttatgtgagctgtaaatttggttagtcaaatggcgatttgggttatatctaatccccatagcgtccgcccaaatattagttaatgttcactttcatataccaattaccatattcgtatgtatgtataccatttaatgcttacacttcagagcgtgtgtcaagcaaaccaataatatatttttacggtggttagaccatatctaatattaaattttaacatat

SEQ ID NO: 28548 - DNA, 2116 bp, Cannabis sativa
  modified_base (2083)..(2085): a, c, t, g, unknown or other
catatatatcaaaacatatcttcattttcccatatttttgtaaatagcccaactaatattccaagaaatttactatataaattaaaaaatttagttttacagaattttttttatatttctataattttttataaaaatagcataaaaataacaaaaaaattaaataaaagtaacatgaaaataacatctaaataatattaaaataataataaaaaataacatacaaataacaataaattaataagtgtacaatataaaataccgtattttctataaataaaattaaaaaaattataaaattatttaaaatactgtgaaattatatttttataattttttatttttgtatatttataaaataatccctataaattattacctaattgactagtccaatcgatctcaccagcagaatcatatatatacatacatactatcaatcacttttctcatttttcttctcgaacattctggttctaattttggcctatcccaacttgttaggagggaccgcccaccgatggagaagataatatgttttctcttcatttattggcgaaaaaaattatgacaaggatggcgttgttctacttccttttatttatatatctatgtggcttgatatgtatacggtcacaatatcatctctcctaataaataactaccatacatacacatcttatgttaggccttatattaccagaaaagtttgtatatttgtaaatatatatttatataaatacagtggtgaagtcattcaaagtagtactagtagcgatgttactgtttttgtctcttctcataataaagattttctatacttcttatcccattagtaaactgtattattagatagtgaactgtatattagattgggaattattaataatatgccatatactgtaatatgtaatatgtaaaataaaacttttcgaaataaaatgaaaccttttagtcacagtaacttcacgattaatgtagaatctccttagatgctacaagctagctagtgttaaagtacttactactagataatgagcatgttattattaaaaataatcaatacaaactcatgctgatattatttgagattaaatatttaattttagatcattgatataataatatacatatacttttaatcttaaccttaatcttcaataatcatattaattacacttctttgatacacatatggagaaaaggggagcttgggtgtaatgaaaattattcttctattctctctatacaatatagccacactcattttactttaatcaccaatcaagagcataaccattttttaggaggaattatgggccaattgagtctatatgcccaatgaaagagaattagttgtcttggtctaagagactaaaaacgttttagaatgtgtccataggctccagacgtgttagtatgttttgtctatttcattctggcttagtagtaatataatgtattgtcgattatataattatcattatatgttaatactgattctgagtgagcaacacttaattatattaatccacataaaatattataataacaagtttctatgtattcgacttccatgttggaatctataatactgatttgtttaataattctcttacactacaaatttttttacttttagtacaacaaaaattgtgactgaaagtaacatagttgtaactaattatacactactacaaaatagacttttgatgttggttcaagggacttttttttttttacaaaaaaaaaccgacactgaaaactaccctaactctttggtatcggtttataactgacacctataatgactttaagtgtcagttagtagaccggcactaaaagtataacctagaccaaaaagagtttaaaaaaatatacatgcagattgcgtataagtatcagttcataaccgagactaaaagatcttttggtttcggttataaactgacacttataaggcattaatttaaaacaaaaagccaaactaaaaaacccatttccaaaccctaccctaatgatataaaaacaaaatttaaagggaaacttacaaaaatactagaatttgggttaacttttacannnatactgtcacacggaaatctttttaaaaata

SEQ ID NO: 28549 - DNA, 1978 bp, Cannabis sativa
gactccattaccctcccccacacagatatatatctctatcctttcatagaagtcatctaagccatgcaactctcttttttgcatggtctcccatagtccacttccagggcgtactcctacagctacagcgattttgagttcatctttggaaacttttcccaccttggtaactctcttctttttcttactttacaattgtgatacttgtgacaagcataatgtaatcacatgcaacattatgtttttagaggaactcttctgaaagttgattccaggatgtgattatccccggttgtatccttttcaacaacttatatgcaactcattttagtgtgaccatgaagtattgacccttttccttatatgtcacttttttcatctttattaactcattaaaagcaccgaggtggtactatagatgacttgtaccatcatatagtgtcatctgcagctcctcgaagctcagtggaaatggttcaatttgaatctcccttgagaaaggggattcttcatcaaactctttatcatcatttatgtttccctttgagacggtagctatcttttaacgtaggtcttgcatctccactttcggcttctttattcttttgttcatcctctctcaagggttagcgaacggaacttgggtcctctttgtggtttgcatagggtctgtgagaagaacttgtcccatcagtgtgtgacttctcactaaagctaaaggataatgccttttgtttgcctttctcttaggaaaagccataggcgagatgccccctagcatgagatcttttaggcaaaatctatccctaaggttatggggtgtttccctcaattcgaccgtctcatggtaggtaagcttgagttgtctcaactgacccatagggttcttatcttgcgtcgaacctcttccacgttgacctattaggggtgctattagtgaatgacatggaaacccttccaccgacatatgtggttgagactctgttctcttatcagtggcttttgtaacaaaagtgtgatgcttgggttttttctttgagtatgtcactcaacactttttacatcctagccaccatagtttctagcttttagtttttccagcagaggttgtttatctcctccgcatagtagcgagttcaagagctcgagctcttcgagtacacttgcttctcctttctaggtccatgtcttgaactatcaaaatcttgtggcacagatggtggagggtgccgcactggagatggccttctcggtagttgttatcaagtcatgatatgctggggactctttttgagcattggcttggtggtgttgcaaatgtctacgcatggtgattggttaatactcagggaaagatgtaattatggatttttatttcccacggacggtgccaacctgttgacggtgagaactcatgaactaaactttagttaaaaagtcaaatgcaaagagtcgatgatgaaaaacttacaaaaaattaagaaagctcaatcatcaatggagtaagatactattgtattgaatattagagctctcttacaaatggttattatctagccattttacaagtatccaaatgaggcttttacacttgagctctaatggctatgaaatacaagtgatcctaaaagtaagggacaaagttctaattgtaccatgagggtcagtgtgtcaaaggggtagtggaggagtgctaagcggatgtcagcttatttttagagtgagacaaatggtttctgcactacttgtacttgtcgtaactgttgtacaaccccctcctctttttaggccttatcaaaggcgtgctggcttcaagagactcgtctttggtcatacatccctttggtgtcttttccatcatagcctatacttataatgagggagcaacacttacaaatttggctaagtataattttcttctaagtgtggatcaagtgataggttatgggcatgagagagtgatgtgtggaaagataag

SEQ ID NO: 28550 - DNA, 1995 bp, Cannabis sativa
tccaggttcttaatgaagctaatctgaaaaatgcggttctggcaagatcagttctcactcgcagtgatcttggaggtgcacttattgaaggtgctgacttcagtgatgctgttttggatcttcctcagaaactggtaactgctaagtagcctattctggttttcttgtattctaattgctcttcatgtagtgttataggtctccttgcacagattaatcctaataatatggaatactatacaaaagcttcttctgaagctaattgcaaagagaacatattgtctttttcattaagcatgaatgacctttttctagccagaaaaccatatctttaaaaaaaatctgcttgaggtgctgttagttttgatactgtggaggttgattctctaacactgaaccagttagtcagattacatttcaagaatccttcctcttttggaagtattggttacttcagttaaacttcgattggcttcttttagtaagccggctaccaacttagtcctttgtgttagttttaggattatcacagttatacttttgtagaaagaagatcattgagagtgtttcataatttttgagtttggttctaaaagaggttcaagccattggtaaagggtactgtattgtgagtttgggagaattttcggtaccaagaagccattcctgaccttcaactgtaagcaaagtgtattggtcaaatttggatgtaggctattatcaaaaccattataatacttggtgtcaatttcttttaaaggttataatttctatttgtttaagtttattgttttgtacttgtgttctgttcttgaccttgtgttgtagaaaaacacaacaaattttacatagctagtaacaagatgtggatcataaactacataaccaaataaatagcaacttcaatgactcaaatatcaggctgtgaaagctaggccaaattattggattttcctaattagtaatttaatactcttgatatgatcatttttctcactgttagtagttttttggtagatgctgcaatgacttttctttccttctaatccttctgtttgtctaacaaggctctctgcaagtatgcaagtggcacaaacccgactactggtgtaagcaccagagttagcttaggctgcgggaacagtagacgaaatgcttatggtagtccctcttctcctctattaagtgctccacctaagaaaatgcttgatcgtgatggtttctgtgatgaaacttctggtctttgtgatgcaaaatagttcaactgtatattttttttttgaactaaaatgcagtccttataccttttaccatttgaactttgaggaatgttattattactgtaaacacttcaaaaaactacaatttttagttgttgatatatgttgctatttatttgactttcataatcagaaaaagaattgtaaagtgcccaaatcttttgtatgggtggcattccatgctttttcccttataacagaacgttattctaattatatgtgatagtctcattctattctggtatcaagtgaaacttttatttgtagatatctctgtttctcatgcttaaattcaagtcttacagcatataatggcataatgaggtgttaaacagtatgtactccagttaccatcgaagctttgaaatggtctgatctgatttcagctcacctctgagaatggtagtgagttaaagtagcagagtatgtgaaaaattgtgtttttgcaaatgtcaataattttctttaataacagtaaagaaaaaaaaataaaaataatagtgcagaatttaaaatttgacacaagagatttgtgcctgctatgagcgtttttttaaacactactagttcacggggtcacgcacagagaatgaaatcaattagtaaattattaaagattacgaaaacaattgacttaaacaaatttagactccctctagtgatttgccacaaccttttgtagtccaccttgctaatatgattttttttttttttt

SEQ ID NO: 28551 - DNA, 1927 bp, Cannabis sativa
gttttgttttcttttagtattttgttttgttttcttttttggtgtttgagaaacaccataatattttaataatcaaatttagggttagatattttgttttctatgaccaataattagaaccattaactacatacaagttatggtcttagaaaaataaatacaccaaacaatatatgatcttgtatagataaatgatcacgaattaatattatcaaattgtattctatattattgtaggaaattgttgtttccatatcatataatatacttttttttaaagctagctagatgtgtacatgcaaaaggttgagggggtagtttgactgattgtgttttagacccctctattataaagagcacaattaatagatatttccatgttagtaggtgtgttttaaataattgagatatcatatgaatttatattattacgaactttatgtcattggaatttcgatctatatattactttcagttatttaactaatgattaattatataatttgctgtaagattccaattttatcatgaaaagatttgaatgagtaaaagacaaggctttgatggttaattacttgactctgaagaaggattttggaaatgaaattttgtcaggcaactttaattattgttgattgaaatggaaacagatattgtggaactgtacctgtttattgtgtctagctatagctaactatattgctagggaatgataagatattaattacacatcaaaatcaaacaactacttgagttgagttgatagatcacctcagattcttttaattgagtaattttgacccctttgataattagataagaataaatagaaataattaaactatatactgaagtgaagattaatttaactcccttattacaagattataaactctctttttggttgtttgttttaaggtaagatcagaaattaatggtctttaaaccttattataactaatttcagtcaatgtttttcctgaaaagaccagtaaacgaaacttgtatatgtgcttatccttaccaactacattatggaccttaatatttatcattatttttccttctttattaatgctttgagtcaatattacatgattaattgatagttagaaaacatgattcgaataaattaataaattacatataagtactaaagctttgaattttgaccatatcatttatatgtatatgtatatgattaccaaaaaaaaaataaatatcattttagattttgtgttttgcaaaagttactaattagattttttattttgttaaataacaaaatagaccttatattttttaaaattgtacaaataggaatctgaactgatttttttatcaaaataaaatttaataataatccgatctaaacgtgttataataaaattgtttatattttctgtattcgttcatgttaagaattgtcttcaagttggttatatttttaaaaaaatcgtcaaaaattaagctcaggatcctattttttctattttgaaaaatacaggatctattttatcatttaacaaaataaatggtccaattgataactcttacaaaatacaaggtccaaatagtattcacaaaaaaataataaaatcatatataattattttacaagttatatcattgtaaaaaattctcaataattttctaatttgattatgttatcactaaaaagactttgttggtaaaaacattaattaccaaaatcataatttgttattaggaaatgtatttttagttattggtacctaaatgtaatattttattcacaagttactttttatattaaaagtgatatttagtttttttttttgtttttaaaaaaaagcgccatttaatcaacaaaaattatgttgccactgaaaaattattactatttattagtggtaatgcttttttttttatagtgtatatatatata

SEQ ID NO: 28552 - DNA, 3937 bp, Cannabis sativa
ttagccgtaacgacgctccaatcaatgctggcctcgctaggttcataactggaatagtattggtcgctgttgtaattaggtgtcatatgcagagacatgttgtcgtttttccctaacagcacttgtctactagctggcttcaacactagtacagacgacgtcgcctgcgccggtggctgtagaagctccggagatcgggttgcggcggttatgttctcgatctcgaagagatctgagctggcatcactgtccaaattataactgctgtcttcaattttgtagactgaggaaatgtgcttgttatgttggtggtggtggtggtggtggttgtgatggtggttacctggttttactggaattgcgtcccatgttaggacggagagctttctctcaaggtttgttgccacgtcatcaatatcatcccgatcttctcctcttgaagttgtcgtttttgatccgaacacctccaacgacaaccgatttgggtcttctgtctgattaatattattgatgacattattattgctattattttctttattactcagaattggaaaagcaaattgatcttctgatcttttcgatgatctttccacaacagcagtagcagtagcaggagcacgagcagtactattttcatgatcgtgatcgtgatcgtgatcatggtgatctgattgggctgtcagtactaattctcgcatatttttgttcagctcatgatgatcatgatgttgacgatcgacataaactgatttctcatccgaacaagatccactgcagccaaaagtagcgaaaatgctctttctatacccattcgttctgatcttcttcttcttcttcttctcactgttgctgttatgttgatgacgagatgagtttcttaataagaatgctgttgatctactagtccaagtactggcttcagaataagcactcggagttcctggagctaatgatctttccccaccgccgtattgaggaatatgatcgatgtcgttctccatcgtaattgatgatgatcgacggttaatggtattgagatgattattatttttattgattctattactagttttagtgtcttcgagtgctgtattgaagtatctttcggcgccaaacacgcagatttcgccttcttcttggtgatgatcgctgctattcttgttcttcattttttgattcaaattctcttccctcagataagaaaaagaggcatctcggaaattatgattgtcatcgttggaatactgatcggctctcacctccatggttttggaaaaatttcaggtactgtgtttggaaaaatgatctctcttatggtatatatgttattaggacagaaattcaactgatgtgttttgaacacgagaagttgtggatataagggtagtaataatagtaacaatatttattgcatgtgaaaggtgagttactttattacagcatatacatacatatatatgtgtgtgtggttgagataggtttgttggaaaatatatagcaattaataagttgatgatgaccatcatcatggtgatgaagtatgatgtgattagtgtgaccttgatcagctgatggtaaatgatagaattaaaggacaaggatgcttgacaacgggaattattgattgaaagaatatatatataatgtcaccacataggttttgttaagaactaatctttcttcataagtaagctttttaattttatttttggatttcacatggaacatagtttatcaaaatggtcctacttttttttaaactttaatatgcaataatgtgacccctttttctcaatgaatattgaatgtgaattgtatactaaattttctcacttacttctctaaagagatggtaaaaggggagagaaaatatatagaaaagaaaaaaaaaaaaaaaaacaaatagaatgaatggttttttttttttttaacaaaagagtgaatcaattttattatataatgttgtaaaatattatggtgcatcctctaacactaaatggtaccattttcatctttatgccatctacacagttttagtcttaaaattttatttcacagtgtacattattttactctatgatatatcccacaaatttccaagaaatttagaattatttagtgcaccgaaataagattaattcaaagagtatattgcatgctcacatgtctctttcattttatgggttttttatttttacacttcaagatagtttttttttttttttttacatttttatggaattctacataaaactacctatttcaattagctctgcaacctaaattgcaacaaaaaattgtatagaaaccgttattgcaactactgctgcaaccactttacaaacccaaacagtaaatttgaaataattgataaaataattttattttatttgtatataagatttcatttattatcgtttatatcttttatttatttatttcattaaaagtgaattaagtgtcaatctaatatagaaaagttgaacacaatttgtaagttttaatgaaaaaaccaattccttatctttccagccgtttttttattgtattttgatcctatactaatttctataatttgatcacatcttttgtgaagaaaattgaaataatattttccttttctataaaaagaaagttccacgtattgctcacaattttataggtacagaataaatttttaggttgattgaagatttattttaagaaaatttcctatgagttatgggtgtgtctagtccatgtttgagttatctaatatgattatatcatctacaaatactcatattgactgctaatttttgtatctctttcgtctctttgtattttaattcatatttaataggaagagtgtatttgtttcgtagaggagagtaagttggactctaccttgtacatgtctttgttgttgttttgagtttgtaatcaagtcaacagaaaagaagaacaaaagtgctaaccttcaagagaaggttcttcaagctttcgagagaaagttgttcaagtcttgccttgagaggaagtaagactctttaagtatcgaatgagttcgagcacttgaagttttagaaagataattcctttgagaaggttgaatacatcaagcttggggcatataattagagggagtgtttatgcataactcaattactttgtattttttaaatctatctaatgattcttatccctgggcatggccccgtggactagtaagaatcttcatggattgttgataccacgtatagaaaccttgtgtatttttgtttttcaacacttttattctttactggtttttctattcagtagttacagaataatgttttatagctacaaattacctattatttttgtactgacttttttattattattcaacatttaattaattgattaattaaataataatttgatgattatataatttgaaatttaatttggtattagagcaagtcactaaactcctagtgagatatcgagattattttatttagttaatttttttaagatgtcattttttgtagaaaaaagctccattacttgagcacccatcttgaatgacacaaattattaatattggcaagttagattgataacattcattaaattcacaagtgacaaagcttggagagctatacttgcatgtttgtctccacatactgcagtggatgataaaggtaattttgtggtaaagcctaaacttaagtggactactgaacatgtaaatttttttggttttaataataaagcattgcatactatttttaatggtagttgtgaatgttttattaaattgatatcttattgtgtatctaaaaataaggcatggaaaatccttcttacttaattcaaaggtatcgctgatgtaaggagatctcattttaccatgttgcaaactagatttgatgaattaaaaatataagaaaatgaaactttattt

SEQ ID NO: 28553 - DNA, 2119 bp, Cannabis sativa
cttaataataagtattgtacctctttcttttgtattgtgtctttttgttattgctctctctgaaatgagatgagtgatccttttaatatagaccaaaggactcaaaatacttacggtcatatttgacagttaagttagttaatcaaaaactaattaactaaccgaatattggttgaggatttaaagaataataccataatttattatctcctctcacctctcatcttctctccatccctcctaccaaacataatgtaagtctggctttgcttaaatagttggtcctaatctttgacgaaccaatgaaatagtagtttatacttcataatttcaaagaagttcttattttcaaattaagttagaaagtatgaacaaaataaaaaacaaaatgaataaacgaaaacaagttagagctgatttcttctataaaagtagaagagattggactcaaattagtactcatgaatttcgcagaggtttataaaaaactaattctcatattttggttagtaatgatctctatatttttaggcactaagttaacattagtagtttaatatttgaattaaatgtttttaatttttttaaaaaaagataatttgaattaaatatttaaattcaagttaacaatgtccaatttatattactatcctataattgagattttttttatatataatctttcaaactttagatttttgaacacacaactctttatattccatttactatagaatatgccttaataaagcaacctcacaaaattttgatggaaatggttaggttgtctttaaatgcaacacacacctacaatattaatgagacattttgatttattattagaagttcttggttctcattctctataaattgtttttttttttttttgaaaataagcattcattgatagataaattgctttagatgatattcaacatttttttaattagatatatcaacatattttaatttcagtattacaaacatttgtttaaatggtagtaaatatacaaacatttactagtataaattcacaaattcaccccaaaaatttagtaaaactcaatctagaccaactaaatatattgagacctatatttataaattagatgttaataacatttatgcttgcttaaaattatattagagttactattatccgattattaatttaaataataataaaaattaaatttaatacagctcaattaaattttttaaatatataaactttaattgatttataaaaaatatatttaactgattatatcaaacaataaaataaataaataaatttagatattttaaacaatataattaataattttttttataaaatataattaattaattaaattaacatctaattcagatttgaatcaatattgatataaaaaatagttatttaattttcttaatatttttaaataagtatttaaattatatttaataaataaattaaatttaaattattttttaattaatttaattatattaattttaactaaaaaatatataatgtaagagggaaataaagtactcttccaaatcttttgaaagaaattttgacatataaaattttgtcttttttttttaaaaaaatattgttggttgataattggtagggaagagtgacataatcacaaatatattgggactacaatgcatgtggtccttagtagggttccacatggatatgtcagtcaaaatttatcatttttttcttcttaaattataaatattattagtatgtggtgtggatgtgatatctgataaggacttccttcaacttatcatccattaattaattaatattccaattaaaagttattaagttttttcttaatgtaaaagattataataataaaccctcttatcattgcattattgtcttgtcgtattacatacaaaaatttatatactctaatattataaagtttttttttttttttttaaaaaaaaagtgatgaaaaattaagctaattaattcatttttattcaaaaataaaaagctaattaattcattttattttttgattaatattttaaggtgcattaggtttagggttaggttttacatgaaattatagtattattttctaataattaagatttttac

SEQ ID NO: 28554 - DNA, 2421 bp, Cannabis sativa
  modified_base (2389)..(2392): a, c, t, g, unknown or other
tctcattggtagtttcactttgggatctttcttgttgttaagtgatagtgcatccatgacttgtgtaaaggagtttgtttgttttttttctttctttctttttcatgggaactgtcttatttagtttcatgtgcttaatgtcttatctttcttagaaacagcggatttaaattattgattgatagtcttttctgataattggaatcaaatgaaaggttctgttttgtaattcttgtcttccaattttctttgtaggaagatggattctcaggtaaagcacgctgtggtggtgaaaattatgggccgaactggttcaagaggacaggtgactcaagtgagagtcaagtttctcgatgaccagaaccggttcatcatgaggaacgtcaagggaccagtcagggaaggtgacattctcaccttgctcgagtccgagagggaagctaggaggttgcgttgatgggaatctgtcctcatgttgctttcttgttctttccttttgcagtcttgttttggtttgatacaaatttaattttgttttagtgaatgggaggggagaccataatcagtccatgtgagtttagtttatgttttggtaatactgttattagcatctcagagttttgatttattaaggtaaaatcgaattgtgagttctgaaatgttttgaattgtcaaaatgtggagaaaacattttaggaattctacaatgcactctcataaaaaaattgtatcgatacacccctatctagttcaacatttgaaaaaaaaattatagtcaattttttatggtcgggtgtgttgtagttatttagcacattcggtcaaattttaaaaagttaaaatgttgaaaatagaattcaaataatttgttgcacatgtgattcttttattttatacgtgtggaaaatatacggtttaattatttatattgtaaattattttaaaattttgtaagatgtattaaataattataacatatacgacaaaaaataaaaacttaaactaaactaaaactttcatatggatgtcaaaatagatggagatatatttgtttcattgtagaaacacatctattttataatttatagttctattaaatgtgttttactttttagttgaattattaagtgagttaagtcctaatttataacatcttaggatagtgattatagttggagagtacttggaaccataacaaaataaataaatataaataataatataataactcaaatataatataaagaaaccgattatatttatcaattagttaaaaatttaagataaaaaattagttccgtaaagcaactaaaataaaaactaacacaaaaaccagttaaataaaatagttcaaacaaaaacctccatttaacatactccaacccaccaaatatttacactcataccatatctacctaaaaaaatacccattgattatgctatatataacagattctatttttatttatatttaagacatctaattctggtaactttttcagtgacttttttcgacgacagtaactttttcagtaccgatgacttttttggtgacttttctagtgctgataactttttcggcatcaatcttttccgacaaaatttattattgtttacaaatatgagattttcatcttttattttacaatagtatgatataaaaagagcctatataaatgtaaaaaaaataaagaaacctataatcctttaacattatttatttatcccataaaaaaccctagcagcagtgggtcgggaaagcgagctgaattgccattgcacaccattctcgtcggagattgccaatatcgccggaactcctcattaatgtaacaaactctcgcgctttatttcttcattttacaaagaaccggttttccctttctgttcttagtattgataaggcaaaacacacgcacacacagaacacttatacctgtattatatgttggcataagctgaagatttcttttttaccagaattttgttcggctttggctaaatgattttgatgaccttgacccctaatttttaattttgtagatagatgctgtcatataggcacgcacattaagtgtttgagtaattgtctgcgaccaagaggctgttcattgccatctgacattttggaatgataaaaactttggttctcccctgcaaggtgggttggttgcattttctttcttccctatatttgtcctgttattccttgtaaactgctttaattatatcttagtaaactttgctgaataatggttctggatgcttggagcaaaatctcaagtttagcttgggatatatcttagatgctttaatgaacttgacccttttcgaaaaatatttcatactaaagattaacgaactgttattgttgagaatcatggggttnnnnctcaaaaccaattggcaatgagtggagta

SEQ ID NO: 28555 - DNA, 1782 bp, Cannabis sativa
  modified_base (1651)..(1655): a, c, t, g, unknown or other
tgcaccttatcattgttcttcatctatttgagccatagtgatagagtaccatgtccacacatagcaagtcaagtactcaatcatagtgcgaaagatggtgattaaccaaaacccaaaagagagaaggagatctaggctcagatcatgttattactctgtgacataaaggaacaaaggttagagatctgagcggaaggagtcatattattcgctgcgattaatgtaaggttttttaaacccttatatgtttaatttcaccatattagagaattcatatttagagtgttaatcaacatacatgttagtaaatctaaatcctagtaaaataatcctcaacaagggatgatgtctaaataggtccgatggtttagggtgtccgatttaggtcaattgtgtgttcgatggcaaattagaatgtggttttatgggtcaggtacgattatttgtccgatagtgtgatccaatttttatttgttgaaattgttcaaaagtgatccaatatttgtccgatatgggcccgatggtgttcggtattttatagatttatagttttttgagaactttttttatcacttttctagtagtttttcgttcaaaatttttaattgtgatttttttaatgtctgtggatgacaggttcaattctttttgcgttcattatgtataatggtgtttgggagcttaagggtggagattgggtttataaccgagttgaaaattcgacattcgagattgatacgaacataacttactcatgtttggttgatcttttgcacgaatagctcaatgttgaaaaagtgcagtatgccttgaaattagaaacgaattaaaagtacaaaatatgattaatgtatcaccctgaagttattggaaatgataagcgtctaaggctatttttgtctatgcttgcgaagaatccatatgaatttactctcttatttgtgactttggtgaagaacaatgtccatatcgatcttagtcctacaccaagtactaataaggatactcgtagcgaggttgggaccttcattccataaatgaattcagaggtgttggcaaccgatgtgttacctgaattaaatactaagatgctgacagttgacaatgtagcacaaatgccctttcatgatgataatagtcattatacatctacgggtggcacactaggtggggagttacatctaggaaagttttagagaccaagagcatttaaagatgcttgttggcttgtatgcaatgaagaaagggttcaaatactttgttaagaagttcaattatgatgtgtgggacattacatgtaaggatctagattgtgggtggagattaagagcgaagaataacatactttttaacatatttgaggtgactacatttcaaaatttaaacatatattcccttgatgttcgagggaaagataactgtcacacatcacctttgataattgcccacctaattaaggataaatttgcaactgacaactcggattatttggcctctgatataaggaaagatatgcaccacgattacgggatccaaatgagttacgaaaaggcttggaggtgcatagagaaggcactacacctgttgggttttatgccctaaataaaactccgtttcaatgtaatctctattattcaatatcaataaagannnnnaagtatttttcattcatttgtgtgctatttggttcatgttatcgattacttgtctatttgattgataaattcatctaaaccctttttcacatttatattcttctttattgtgttgtcagcacagtgg

SEQ ID NO: 28556 - DNA, 3558 bp, Cannabis sativa
ttggctctcgggtccaggtctgagtctggctcctgggtccgagtctgggtctagtccctgtccgagttcgggtgcaggtctaggtccgagtttaagtctaggtccaggttcaggtttgaggactaaattggataagaaaaaaaatattagattggatagaatgcccaaactctagtatataagtatataaaaataaaaggataaaatatttaggctgcaaatatccaaaaaataaaaaaaaaaactaaaaaattggagcaaataaaagaagacagtaaggtgcgtgagggggcgacactgatgaacgacgatgacgacgacgacggcgatgaagaaaaagctcgaattggtggtgctccttgcttccatatctatatctatatctgtatgcttggccgcttcctcaccgatcctcgattccaaatccgacgcccgaggagaatggcaactcctcaccaagctcaatttctcttctcagatcagactccatccccatatcctcctcatcgtcactctcccctgtacctaatcactctctctctcttcccaattatcaattttctccaacttgtagaaaagcaatcaatcttaactgtttgttactcaaatacatgaattttgtctttgaatttcatttttttctttagtttttatttatcgataattttgaacgaaagggaacagattgaatcaatgctgatctcttgtcttatctgattttcgtggttgcattttcagtcgtttcatatattagtagttcactaaatgactttataagttcaatgttcaatcacactgtgtttatatgatgatatgaatttgtatttattcgtttagatttaagccattacagccattgtgttcgtgataattggctaagaaaactagtgtgtttcagagttcttttaggtggcattgccgagcttaacatgtctaaaaaattattttgattaccgtgcttgttattgcttccaaagatttttaagctttcagtgttctatctatgtcattaaagctttcagcttgttaaaaaactagggttgcgattggttggaggtaatggaatggaaatgaatcaatattcattccattcctttgtttggttctattttgaaatggaagaccattccaatgcaagagtaccaatttttctatatgcattttaaattttattctatttcatatgtttttattcctatttccgagttttcattcctcccgaccaaatgtaccctaaggtgttattatatctctttttttttttgtcttggtgggttctttgactcttgttttgttgctggttttgatttgcagggtctggtgagtttcgatcacttaagagagaagtatcaagtatggttactgacagacaagaagggtttaactccctaaagttgatgtttatgtacagaaatacagaaaagatgctagcagaggctattggtgccatggcggatgaaataacagttttatactatcacaattcagtatcctacaagtatcgaggaaggcttcgagcacagaacatattattttcaattaaccaatttgtctcagtttttcctgaagagattcctctcaaatccctgagtactccagtggaattgaagacattccttgattcaactgacaaagcattacttctccttgaattttgtggatggactcctaagttgcttgccaaggggaggaagaatgttactgaaaatggttttggcagacaaggttggtaaaaatttatatggaaaacgagacaagagttattaatcattctttctgtcaactcggccacgcatgtttcgcttaatattagccacttccacgtacttggaaattttcccataattttgatcttcattaaaatatatgttagatttacaattggttaggacactctagagtgaatgtataaatttagtattatagattcacattggcgtaagtcattttgcaaccacagcatggctatgtgcagcttatgagaccctggaatttagttggcttatcatgaatttattgtcagtataaacatagacataagtagtctttctagtaataacattgtattatgtttgctatttgtagtttaaggttttgtggtgtttattttcaatctatgccagaggttagcattgatttttcatttgttatctatttttcagtaacatttttcaaccacataatttttcactggtttgtatttgtttatttacagttagtagaaagaatagttttccataagaaacattggggtttagattaggcttgaagatggtgactttatcactttaataaacaactaaattgacttttcagtacatattttcgaaacagagttcagaggagagacaaacagaaggcggacacctatgggacagaatatacagaaggttgcgggtagtttatagctgctcatcattgtgagacacatttctcagttacaatagcataaatttcatagttataattttgttatgcattgttccttttacaaattgaaacaggagatggaaaatgcaaacatgatgtgcaatgtagatgatgagattaacagatttccttggcttgtggacttaagttcagtgaatgaaagtgctcctttcaaggagacaaataatactgtgcctggtgtcttatcatcctgtacatctgaaggatatcagcaatttgaaacttttttcatgaagttcttgacaaaggcaaaagacttctttttaccttcagaaaggtatagatatggcctggtctcagaaagatctatgctttcaactctcggcattgaagaatctggttcatggttggcagtgcttcaccatgctggctgtccaagttgtatgaagattattgagaaagaggatgaccttactgatgtttttcatatggatggtgctattgtttcagaggtgagtttatattaccgaatttgttatgtgatcttgtgtccccgatcctatattgttgaattcttgacatgtatgcatagctgctctaatggttttggcctataatgtctcctttgacgtgtttaacgggactttgcttctattaaagaaaagtaacaatgattttggcgtagaatagttctgttagtttgtgcgttgtaataatcaaacagtttgcatttttatttgttggactagatgtgacattggtttcaaattgtgcaattttgtcataaaggggaaactatatgcaataatatggttctctacccaatacgagtttatgattgtttcccgtgtgctggtcctactttagagtttcgggtcaggactcaaggaccttctctaagtcaagtttaagcaggggagaaccttgacacaacttttattgataaagttattaactcgtaaaatcttttttgttactttaggcataatcgcatacacattttcttgaaatagtttccatgattttccactcttgccaaatagtaaattattcaacagctgtgaaaaaatttctatcatgggtgatgctaccgtcttagtgttaataggtctattttctcctccatttcacattatcttggcgttatctctttctctttctctctct

SEQ ID NO: 28557 - DNA, 1306 bp, Cannabis sativa
ttaaataaggtgcccacacggtagctgctgatgggtcgacaatcgatctttggactcaaccttggattccctggcttgattatggggagtttcgaaggcttatgaatcaattccacctaatctatccagagattaaaactgtagctgatctctcacagggaaactcgtggaatagagataaagtaattgaggtgtttggaggggagttggggagccgtattctcaacatacctcgcctacctcagtctcaaggaaatcggttggtatggaaattcttatagaagggtcatttttctttgaaaaaagcttatgagatggatcaacaacatcgatttggagaatacaatctgatttggaaactcatttggcaccccaagattcatccccgagtgtcgttgttcttatggcgatgctgcaatgatgcacttccactcaaaacaaaactgccttttgtcaaagagaaggattgtttcttctatcaagcagaagttgaagatggcctccatctctttagagactgtccttttacgatgtgcctgtggtttgcaggtctgtatagctgcagagtaaattgtattctaggtgaaaatctaaaagtatttttgttgaaccttttacagagtatcatgggagaggatagtcacaagatgttgttgtatattggttgtctagtggaggaggtttggttccaacgaaaccagatgcgattcataggaaaaattgatctgactaaagacttgatcgcgcaagttaatgtcaaattttgtgaaatggcagaggtttcagacgaaagggagagtttcgaattaaaccgtgtggagttttcaggaaagccaaggaaggattacgatttaatattcatgacagatgaatcatggaaggattgttctgctgggcttgctgtggttttgattcacaaaagttcaggaatgtggactacgaattcttgttgtaccacgactgtcttttctcttgatgctgaaattcaggttatgcttttggtgctgaattgggcaaaaggtgaaagttgggataatattgctattatctcgaatgcttcttttgcagttgtggcatttgaggcaagggagtgtccccctgcctggaattgttggcatacttcttctcaggtcttagagttgttagcttcctttgtttgttgtgatttttatcatttgtctagaaagtttacagcctttgctgatttgctggctaagagtgctagatgttctagccataacgctagtgttgttcaaggggaaggaatcccccctgtgattcctaatttcttttcctagtttaatga

SEQ ID NO: 28558 - DNA, 1914 bp, Cannabis sativa
cctttttcttttcttttttagtgaccgacctcaacaaagaattcaactcgaggttgtgaacatggaggaggcaggggtcgaggcaccgtagaggcgccccctcaggcccctgcccttgagaatcctgttcttgaagctgttccaaaagtaaaaataggaaaattcaaagcatcaaggaaaggtaaatgcaaggaaaaggcctcatccttatctccccatgtttacaacaactctgtttgggagatggaccaaaacattaactagtttaggagttatagtatgatggaaaacatatccactgagggaggagtctgcaatatcctcgggctagtgtggaaccagttatcaactacaaatgagtctacctcccagagcaaggctgggctcaacgcttagagctagacccatttatctaatggggaacacttgccccgagaacatattttgtaaaattctacacaaaacttaggattgcacatttttcagctgatcccgccatcttacaagctactatctgggtaatatgtgatttttaagatgggaaaaatggaacccccgactctggaagagattttacactgatacgccttcaaaccttatcccatgcgtaaaaataatgagaagattggtttttactaactggaaaaataagaggatatgcattgccctactagcttcacgctgtgttcttcgaacatcaaggaatactggtttttctccacatggttccctgtaaggaggttctaaacctttctttggacttcaaaattcctggtaagaatcttttcctcggttttcctttgctttttttttttaattgagaacttacaactgatggaattcttttgcctatgacaacgctcatgcctcggactccaatgaacgaggatctaaaggcaagactagccttttacacctcaatcttggaaagtactatggatgtgagcaagtttgttaccataaagctgctctgcgagtacgggcttatagctgggtttcaaagtgttgaaaatatcaacaataggggcattggaaattttctcatgaaggctaaggagaaaattgttgttgaggttgtgcagatcatgtagggggccttaaaagaaaataagcatttgatgacgtactgggaactctatcatccaaactccctgaccaaagaggaagagcttgcagagaggtttgttgtgacatatctagataagggtgctcttggggctagcacctcaggaagaggtaaaaggcccttccatttgtttcatgtctccagcgtccatagaatagatgaagtccttaggggtcagagtagtcatgtatcacctcctgatgtggtcatggtagatcctttcctgtccatgtctttcccaaaacttcagagagtatggcagctttatgaacttggaaaacatagctttatttgctcagggagagccatacagtagctcacttaatggtctcactcacgctcaagtcttagtctttgtcaattgtctacttgtgtttgcttggatgcattgcttaattgttgtttcataatcgtgttatgttttcttggttttgcaaaaatgctagagtctaaaatgttgcaatcaatagtaggctttatcaatcgtattgtatctcaggcagtgggggacaaaggaaaaggtaaatccaagagcatggagaaaagaacccgtaagccaaggttgcatagttcccattcatctttcagcacccaagggactccactgtctaaacaaactttagtcaacgtagagaaggttctccgggaggcattccaaagtcaggtactttctcgcagtggagtggtcctagaggttatgcatctgcaacagtttgagctaaaccttatgcatgctccttttgggaacaccactccctcactcgaccaaagtggcatgggggccacta

SEQ ID NO: 28559 - DNA, 1703 bp, Cannabis sativa
tgcttgtgtctgcaactgcaacggatgcacctgtggaggggtcaagaaacttcaagaacaccaccacatggaacacatcatgtcattcctcatggggctatccgattctttctctcaaattcgtggaagcatattgattatggatcccttgcctgaaatcaatcgtgtctttcatcttgtatctcaagaagaaaatcaaaaaggaaatcctaccaacactgctgatccaaatccaggaattgcatttgcattccaaggcgataaacaaaactccaacaaatctgattcccagggaaacaagacttatccacccaaaaggaacaggcccttttgcactcactgcaatgtccttggccatacaatcgagaagtgttacaagatccatgggtaccctcctggatacaacaaaaataaaaccaaagatgctgcagcaaatcaagtgcagatcaaagaaacaggcagcactcaagaagagaatcagactttgttgcctcaattaactaatgtgcaataccagcaactcctgaatcttttagctggacagcaaactagcattcccaaatcagatgctggaaacattgcaggtaactcaggtattgtaatgtcaaacatacttgattttcctatacataactcatggtaactagactcgggagccaccaggcatatatgttctaacataaatctatttcgttgtgtttataatactaagcctacgagattattattgcctaatggggactgtgttgttgttcaccaaagtggcactgttgtcattacagaagaaataacattaaacaatgttctctttgtaccaaatttcaagtacaatattatctccataagctgtctaacccgagacaattgtctcaaaatcaagtttaccactgatgcttttgtcttgcaggatctacccaacaagaggacgattggcagaggtgaatacaaggatggtctttacatactggatccaacacctgctgctgctcctattcttagtgttactgctgatgtttggcatgctagactaggacacttatctgataaatgcttgaaattgttaggaaataaactcaattgtaacacctctgccctgcataaaaactctccttgttatgtttgtcctatggctaaacaaaagagacttccctttttccaaataacaataatcttttgcttgcaaaatttttgatcttgtgcattgtgatatttggggcccttaccatgttccttctcactcaaatttcagattttttcttacccttgtggatgaccattctagatttacttggatttaccttttaaaacataagtctgatgctttaaatatcatcccacaatttctatcttatgtcaaaaatcaattcaattgcatgattaaaacttttagatctgacaatgcccccgagcttactttcaaagatcttttcttgaaaaatggaattatgcatgacttcacttgtgttgaaactcctgaacaaaatgcggttgctgaaagaaagcaccagcacttgctcaatgttgctcgagctttgtattttcaagctcacttgcccataaaattttggggagaatgcattatgactgctgcattcttgattaatcgaacccctactgctgttctgcaaaacaaaactccctatgaattgttgtttaacaaacaacctgagtatcagcaccttaagactttcggatgtctggtt

SEQ ID NO: 28560 - DNA, 1110 bp, Cannabis sativa
gccaagggaaaccctttggctagtagtaacttaactcatgtattttacttcataatcatcttagaattactattcctttctaagccttaagtcctaaataattttttgatatgatatctagaaattacaaaaaaccttataatgctcccatatacctagactatcaaaatttcttttggaattatcacactaataaaattcgcaacaacaaataatatcttctgacaaaataaccgcatctaatccaactatactcgtggctaacctttaagtggtttgcttaacgcagcgtggactctattatcttctgacaaaataagcgcacctaatctaactatactcgtggtgctaaataccgctgcatccaccataagtttagagtataacctctctccttgggcacctctaaaaattccaactaaagcttccctattccttccattattttagagacttttttgggatcctcctttgaaaaaatcgactcataataactaattatccacgcaaccacaaattgtggttgtcttatctgttgaccatgagtaatcttattcctttcagtccatattgcccaggaacagataatgaactttgcaaaggcatctctttccactacttcagaagcataaactaaaacattcttgaaattaatctcttcttttacttcatgtagaaaagagaattccataagattccaaatgccttgtgcaacaggacaccagaagattgcattcgactctcctccaaaaccgcacagctggcaagaggtgctggaggcgatatttcgtctaaacaaaccatttcgcgtaggtagaatcttgtgataacccctccacgcaaaatgtaatatttttcttggaattttcaacccctagaatggtttccaccacaatgaaaacacatcacttgcagaagaaggttgaaacttatctatagtcattcccaggttatacccactccccacagagtaactaccacgatatgtatagtgccagaaccacgaattctcgtgattaaacagacttaaaggtatggaaaaaatacattctgcgtcagatacattgaaatattgatttactactgtattattccatttccctggtgact

SEQ ID NO: 28561 - DNA, 1678 bp, Cannabis sativa
attttattttgaacactttatgttttttttaataaagttaatttacttttcaaatttatgtgtgcaaagttaactaaagacttcaatgctcatagtaaaattttaaaatcaaattttaatgtattaataatttattttgactaaataataaataagtaactattagctataataacttatcgatgtttctgcaattatgtttgtaatgaatttaaaatatatttttgattctacattactaaacttaaggattaaatgagatttaattgaatgatttgaattattattgaaacatatagatggatatggaattccattcaaattatgtataataaattattcattaagcaatcattagtagaaacacatacaatcaattagattgtctaattgaaataaactcacatttaaacattcaatagttgaatctattaagtgtattaaattataactaactatttaaatcgatttgagatatgatttaaatatattaaaagaattttagtagatgtggttggactaaatcaagattgaaaataactgatagaaactatttatacaattaaatctcaataaatattacacttaaaaggagaataattttgaataattaaaattaaaccttaatagtaataaccattaattaaattcagaagtaataaagtatttagtgagtgaatactactcaataaaatagtaaatgattttgagaaaactaaattgttattcataaaaccattagtgtttctaaataaaattatgatttccaatggaactgaaccgttttcaatgaatgagatttattgaaatacaagatataccaataaaagtttgaatgtttaactaatttaaattagtgattattttgacatatagaacatcaaatccttatgagaaagaaattaatgggaaagttaacactttctaatgtcaaactcgggagtcgaaatataattatataataatcatgcattaataatctcattgaattattcaatacattaagatgatatcaaatattggattttaataaatacgaaattgtaatcttattaagatatattgattatgataatcaataaatgtatatgagaaagtttagagaaatatccatcaaaggaaggatgacttggtcattgcttcataagatgaacatttgagttattatatttagatttgaattgcgatgtgattaaattaaaataatataacaaagtagtaattattagatatagatattcttggagaatatagtatttaatatccgtaatgaataattactaataaatatcactattaaatgtggatttaattatacaaatatagaaataggggatgttattaaagtattggatacataatttgaaatagatgtcctaagtatgagatacaagttttgaatattataattgtttaactgttgaaatttagggatacttgtacaatgagattaaacatgtaataaatttcaaatcataaaataagatcagtcttaattaaaatgatcaacgatagtggacaaataaggaattgtctaattaagtgggagtattaagtatactaggagtatatttaaaagatcattcataaggaactgtctaattgagtagagtattatgttgttgggttttataccttaaataaaactccatttcaatctattttattcaacatcaat

SEQ ID NO: 28562 - DNA, 4422 bp, Cannabis sativa
tctaatcttctattgataacaaatcagattgtattgtaatgggttttatttatggcataaaatcccaacatgatgtatctttcaaaaaccagattctcttctcaattagcttgtaaaaggcaggtattttcccaataatagttttatggaggctgactattgtggcttatcttctctaacatgacaagggatatgttgggggcaggatctcttagtttaaggtcttcatttgaaagttggtgatgacagcaacatcatgtgtggctcgaaccctttgattccactaaattctgaattttttctactatgatacattgattgtgatactaacaaagtctctgattagatcagaatggataaagagtgggatttatttaatttgcaatctaatttttcacctattaatattgagtacatcctatacattcctttcccattcatcatgctaaggatgaatggatttggtaccacaatgaaggatgatactcggtgcaattaggttattggtttgcatgttctttggccgaagaagcagaatctacatattcttcatcaatggaaacttggtgtaaatctttttggggtctagaactcctacaaaaagtaaaaaaatttccttggagagaaatctagaatgcactacaagtagcatctatgctttttcaaaagaaaactctcacttttgttgcttgtactttgtgctcaaatgcttgggaatatattggacatgccatgtttagttgtaagcatatcaaggcagtttggagatacacttattttgcattcaatctttaagatgctactatgatgaaagttggtgatttttttgttttatctgtccaaatcttacaccaaatctaagattgaaacaatttttggcactttgtggtttatttggtcggatgaaaacaattttattcatggtaaaaaggctcaaaaggcaccagaagtctatgcaaaagctattgcatatctgaagaattatcagcaacttgaacctcagctaccacctgtcgtaactcgctgggtttctggtgttccagatcacattccatggaagcctcctccacaaaattaccttaaaataaatatagatgctgctactgattcatcaaagaagaagattggttcgggagtcattatctgtgattcaaatggagcgattcaggttgctctatcaagaccaattgttggctattttcggccacaagaaatggaagccaaagttacgtttcatggtttgcattgggctagaaatttaaatctgactttgaattttgtggagatttactctttaatccttgctaactccatcaatggttccactcatcatcgatcctcatttaaagatcttgttgtggacactcaaaatcaattatcctatctctctacaatttgtgtgtcccatgtgtgtcgtgcttcgtatcaagcagctcatgatttagctaaacaagctttagttttagacaatgattgtatttgcatagaagaaatatcttatagccttttctctgttgttgtaaatgacgctctttaatttataataaccgaccttttcaaaaaaaaaaaaaaacaacgtatgtacttttctttacaaaaataatgttaattcataccaattttttaaaaaataacgtgtgaatatgttagtaccttatacgcaccctaaaaagcatttcaaaatcttgaatatatgtatatttacatttctcataaagtttagtcttatactatttttgcccccaaactattactactattttattgtgccccctaaaatttttaggttatcttaaatccccctcaactattacagtggctaataggtatttaaggtggcatattgggcactaaaatcatctctaatgggagaaatatttatagttgcaaaatacacacatcatgttgaaatattttttttttttcattttctctcttatccacataagattttatctcacattttctcttaaaaaaaatactccaatagttgacaactttaaaagatgtccaccaaggccccacgtcacattaaattaataactttttaggttaaaaataacactttttaggttaaaaataactttctaataaaaaaaaataactttctaataaaaaaataaaaaaaaaaaaaacaaaaaagagaaaaaaagtcatgtggccattgtttatattgagcaacacttcacataaaattgatcttaaaaattagaccacattacatatgtggcaagaccactccaatgggcaacccaaagagcatcttcaatgggggttgcctattggagtggtcttgccacatatgtaatgttggtacaattttgaggactaattttatgtgaagtatcgcccaatatagacaatgaccacatgacatttttttttttattttgtaatttattttattagaagaaaattattttctacccaaaaagttattaattcaatgtggtgtgggactatggtggacaacttttagagttgtcaaccactggagtatttttttttaaaaaaatgacaaatcttatgtggatgagagagacaataaaaagaattattttaggatgatgtatgtattttggcaaccataggtgttacccacattggagatacatgtataacatcaatgccacatgtataactcaaataaaaaaaaaatgaaaatattaaaagttaattcaatcttttaaactagttttacttttaaattaaaattgttttaattaagatttcctccaccagaccaaccttttcggtccatctcgacaatggcgagggccgctagtcgataaatctttttttttttttttttttaatttttaaggcataaatctaaatattaaaaccatttgaacaaaaaataaattagtatttgtattgtttcaattacatattttcttgctcttattgagagattttaattaatgagattataagactatctcaccccttttacgccacgtggaacctgttcaaaaatacagataatatttacccctaagctttcgagtctctttgagttgagggagcgtgcagtctttttttaaacctcaaagataagtttacaacatatggtgattgctgggattatagaagtgtatcttgagctgtcattaatcaaaggaacaagaaccaatggtgccctgcgtggcacacatgttgcacatttaatgcatttgttgataacacgcgcatgcaaggggcatgtcttttagaaaaagttataatgatggcaggtcaattgaaatgacccatctttaatgtatgcagtactcgaggtgggcaatgatgaaaaataaatgccctgaacaagttttaaatgccatcttttcaacttcccatctgtcggatcaaatcgtgctttttggggagatgatttggaccattcatttcaaattttaaggatttgaccgaagtatagatagattcatcaaactcattttttcttttcactacttttgacttttgaagacctttgcgttcaaacttcaaattagagccccttattctagaaaaaaccttaatcttgcaattttttccagtagtgaatgaaagaagtttttgattacctgatctagtatttcttgaaccttcatttaggccaatttcttaatgcagagccattaaaccccgaactattccacctgcagcccgacaaggattttgatgtgcaggcctgcttcgatcgtgtgattgactgggtacacaactgctgggtagatttccacaacaatctttcatttttcactcacataccatgtaagtatcccgatgttttgttgaatctttctatttcatatcttggatacaaatgcttagttcaagctaggtctaagatatctaatatgtgtaaatagtaaaatggtgtccatagaatttacatttccaggatagggtcgtgttgcaatttttatcaaggtagtgctgctattgtctggatagttagggtatggtcatctgagttttatatactttttcatgtacttagggtttgaactaggcaggatggaatttttagtgagcgttggttccatctatcttctatatattaatttggagttgttaggactgcgaatggacttgatttctagaattttcttttaatcttgttcttgcaatgttctcttgagttcccaatctgtcacttcgagtcaccacgcaaggacaagctttagggagtgatgagttcagtggggacctttccaatcaattttaggggaggctttcccgatttgatgcccatattatcatttggatggtagatgtctatttgtttggtttttgttgacctaaaaaagtgatcaactaacagcatggtcgtatgaatctaatattttccatgtgttacacaattagaatctaaaattaaagaacacacagaattttatagaggttggatccccttagttagcgggtaatgac

SEQ ID NO: 28563 - DNA, 1112 bp, Cannabis sativa
gagtcaaagagaagagaagagacatagtgggggatcaatgacgaccgaggctaggtgggggtggtgttgtcaacatctgctgctcaaattgaagataaaggaggcaatgcggaagggtggggtgggtagtcgagaccattggggggactcggagggtgtgtgcaacgattgacgggggctctagttggagctgggtgtttgccggtggtgagatgaagaaaatgttgaagggaggggtcgagattaggttaggttataattgggttattatttttttttaaaaaaaaatagttaggttttactaaaattgaaaatatatataaatttatctgaccgagttggcgagcaggttgggtccaacccgcttctaaatatttgaggataacacaacctgaacccgctagttcaagcataccgagttggacccaacccacctgtaatgaaagggttttttatgcaacagggtttaacgggttgaatccgggcaggttaattgggtctggggcaaactcggtacaaatgttcaaccctagtaagaacattaacaatgttcttcttatgaacaacaagattaattgaaaagaataattaagaataaagtttaacacaaatggcataaagatttttttagaaaacatcacaattgatttttatgaactcaattcttcaaagaaagcttgccacattggtataattctatctgttatagtgtgaattttttgcctagaaatatgagtatagactcgcaaaagattggcatgcggaccgatttctgatggaaaaggatgatgtgtcaacagatagctccagaagagttaatctcgcatgatgtaaacttgcatgaaggtgcgaccgagacaagatctaatcgcacactatgcctaacatagttaaacaagcaagagcgagagaaattagtgttggtcctgcatatattgattatatacaatgagcaagtatatctctcctacgacacataatgtaataccctagaattgggaagtggattagcaaaaccctaattagataattatgaataattgaataattatattattatatagttcaatatatgagaatttatttgattcatgctatgttaagaccccgtt

SEQ ID NO: 28564 - DNA, 2014 bp, Cannabis sativa
ataatcacaacatcataaccttaaactcatcaaaattgagaacaccatccccatcgagatcaaatctagaaatcatgattttacactcgtcaacgctcttagactcaccgagtctactaagcattttcttaagactttttggagtaatacaatcagaaccgtccatttcatgatacatcttaaaagcctctctcaaatctttaactttgtcttcttcttcaccttcttcaaccaacttaacaaaatcatctaaccccaacaacccatctccgtctgaatctaagtactccatcaccgcctcagcctcagctttcgaaagctcgcctcctattgctcccacgcactgttgcaactcgcatgaggatattctcccgtcgccgttggagtcaaagtggttgaaaacacgttcatattgtttgagtttgttcatgtatatagaaatttgaatgaaaatttgatgaacaccttaattgttagcaagggttaaaagttaaaaggtagagctagagaagagggaaaatggcggcttttgaattgaatttcataaaaaaggttagggttgaggatatggtttgtattgatcatttatttatatataagattatgacgcgtgtcgtggttgaccaagcattaaggggagggacatacgcaccttcttaaatatgaaaaattatatgtattttcgtaaatataaagagatagaaagaccgttgacctattctggaatcttctttgaaaaaaatttagttttgcacctgaaattatagaaaagaaaataagtctgagtttggtaatattttttttaattaattttttgtttttgtttttttctgttttttttttttttttatattatgttgtataaaattatttttattttttaattggcaattaaaaatttttaaattttgaaaataaaaaaagtttcacatttttaaaataaattttatttaataaatagttagttttttttaattaatattttagactccgattccaacttaaattttggaatctaaattcgaaccctagccctgacctcagacctagttcggtccccaattccaacctcaataatcaattaaaattgaaaataaaattaacaaaatatatatggttttgttttttgtttttaaaattaaaaaataaaagtagttatagaatatatttttgttttttaaaaataaatttttttactggtatttttgaaattaaaaaattaaaaaataaaaatattacaaaatatcacctaaaagttaattaattgtaaatttacaattgacttaactgtttcaactgttagtcaatacgcacgtgcgagtttgaaaacattacttgttttcacttttgtttttgccttctactcttcaggtcccatttcaaaataataaaacaaaatagaggtaattataaaataaaatataatacacattactaaaaatatgttgcctaataagtgtttggaatagcaacttgaagattaataattcaaatcccagtacccactcatatagtatatctcatgtagtatataaaaaaataatattcaatagaaatataaaccaacaaaatacaactttatgcttaataatacaaagacaataatcaagatcaaaataatattacaactctattataattaaaaataaaaataaagtgtagaatagaagatagaaaaagtaaatataaacaagaaataaatatagaaagaaagtgatgtgatagtaatttcaatactaacactttggaaagaggaaacagtaaagtgacaaaataagtaagagaattaccaaacttcaacaaaaaaattactttccacttagatcgatttagagattgggtggaccttataaaaatagaaattattaaaccttttatttaagaaatatgtagtatttttgaaaattattaaaaaaacatataattagtaatttttatcctgaactttgacatgtactaaatcgtgcccctaaatttttttgactgttagaaattctccctgaattattgagat

SEQ ID NO: 28565 - DNA, 2163 bp, Cannabis sativa
  modified_base (1748)..(1748): a, c, t, g, unknown or other
  modified_base (1821)..(1836): a, c, t, g, unknown or other
  modified_base (2088)..(2123): a, c, t, g, unknown or other
catatgcaactctagattttagcatttttataaattaatattaattagaaatttagaatatgttattccatctctcttcctagcaaaacaattagtgacaactaaccaattggtttggtcttatccattgaaagttatatttttttagttcgtattataaaattcatttgtaacataatttgtttatcattaaagtgtgtgaaaaatagattaatatgagatgtttagaggttgagtttgcccgtgccgacgattgaaaacacgtgacatttataggctttcatggtaaggtacttgtggattaactctgcatcgtgtgtcatgcgcacccttctcttcatcttccaaacttattaattattctacgtattcccatctcaaatctcaatatccataattaataatttataaacaaataacttgctaacattcttttggttgacctttcatgtatttaatttaatttctatcacgaaatcaacaaaattcagaatattttgagttacctcggataattacttaatttggaagttcatacattgtgaacattcaactaattacttgtaaagtttagattctctataggttttttttttccttaccattggagacaatgtctgttttacaacatagtctcccttacaagtgtgacaattttttattatcattttgtaatgtgacaaactttttatattggtttgacatactcacaatatcccatttaaaaaaaaaaaaaaaaactgctgtccctaaattggtgtgccctccctgtcctcaccaattgttttaggacacatcatttaaagcttaaccatctcaggattgagatcaattgatctaaaattaactaagtgatattgacttagaaaaaaatataacagtaagtttataatatcttttctactgtcaatattggtccagtctagtgtaatcgatacatttaatacaagtttactttgctaatgtcctagaaaagatattcaacttatccaagtgtatacgtcagtataaatctagtacattgattaattatttgactaaatactttgaagcaaataattatgattattttccactatgtagagaataatataatcatgagtacctatatgttcagtatttaatagaatttatgtatattaaacatatagtcatgaatgtaacatgtgaaccaagcaacataaaattatttatgatctttgattgatagtaaataagattatattgaaattaagttttatttagggcataaaatctcaacaacggatatacctgtactatttcatcaagttaagcaatgcagcgacaagctgaaaagataaaacttatttggaattgaatccatgatggcatgcagttatatgtgtgtattgttaatgagatagttgaagcaaatattcctgatcttagcgagtccattttgattgaggcccatagatccactttgttgtacatcttggaagtataaagttgtgccaagactagaagagacaatattggtgagactgtattaagagatatatggctagtttcgtagccaaatatatagtttgtcagcaagttaatatttattttgtggtactaaatcagatgtacagtaagcattgaatatagattatcgttgtgccatatcatatgatcctccaaatgtataaatattaaattagagagcattgttattaagcaccagtggtgcctagcactttctcgacatgtcacgttacgattggctagcgatactccctaanagttattatattaaactatatgggacccgatacttagttggaccaataacgatactgacacataggagggtgnnnnnnnnnnnnnnnngccctttagcatttctctaaattagaaaaacaaaagaatgaatgggaaagttacctcttgatgatcaatcaattattcttgcaatcttttcgtaagttgtatccaataacaataatgacacttacactagatcttctaaatttaataacagtttgagtcagtgtccagtattcgagttagggtctaggtcccgggttaggtcttggtctatgtttgggtttaaagtgatggaaatattttaccatgatctannnnnnnnnnnnnnnnnnnnnnnnnnnnnnnnnnnnatgaattctaaaacaatgaaaaaacacatataaagtttag

SEQ ID NO: 28566 - DNA, 2718 bp, Cannabis sativa
taacaaagttagttagggaagttgatgatgtggcaatccaaagatccataatgtgttgtaattataacagttatatatattcttagtcaaatcacttagtttcctgtatatcaattgaatttaaatcctgacatgattaagctaattgtgttattcgagttctttgacttgttcattcgttaccaatttaccttacagtctagtccatacttacatcttgagaattcggtagcataactaagtgggagtgttagtcatagatatagaaatttatagttactatgttagaagtaaaacgacagtttactttgagctcagttgaagcatttaataattaactacagttcttgtgggatcgacctcactcttgtgagtcgtctattacttataaacgatatgtatacttgtgcgttgaaaaatccataacaagcatttaaaaggagaagatagatgagattgcaatacaatattaaaatacatctaaataaaagaacataaataaattaaattatgagaacacaagagaatatggaaatcacatcgaagtagtttccacattgttactgttgttttgttttcttgatcttcttctcatgatgatgattaggtttcttaaccatttaaacaactttataacaacattaatcgtatggagtagtacaatcaataacatgactccaccccagcttattactaacctccagatcacgtaacttagagtagtcatggtttggcgttgcgacaacaatagaaataaggtatgtgatggtcatagttgtgatagtcatccacaaaatcactattaagatcaacatcaagaatttgcgacaaaaaggcaagcccgtgatgagtagtaatattatgctcaatgatccgacaaaacccaccgtgttactaattaagtaaataccgactgggggagttattacgacctgagaagccatagtagcaataagggatgcaacaaccattaacgattctctctttcacttaccagttttctagaattgttgttttctaattgtcgccctcttaaattttttgtatttgatgaacatgatcatggcgaatctcgaggctagctatgccaactcgaatgataggctttttcataggtaagggttgatctatggttcgtgaagctccataaaatcaaagagcctctacaatgtcaaaatctttctcgcttcttggattttgcgctaggatgtccattgcagtgaacatgtttgcattgacagcgttgacttctttagtatttgtaagcaaaaactttaccgtcttattaaagggaagtaaaaaaaaaaaactagttaatgattcaaattataataggaatgagtacaagaaataaaaatgagaaatgagaataacaatacaatacaaaatacaatatacaatgaaataaaatttaaaatacataaaaatttgataatattattatttatctttcatcgaaatggtctttcgtcatatttctaaataaaatagttatataataaactaaaatagtagaaaaatcaattttaataatattatttcaatatcttaaaatgaaactaaagcaaatagaatgatattaaaatcaatttctaattttcataccattcaattttttaaattctaacaaaacacagactaaacatttatgtccattaattaaaatattcgtagtaagttacatatctcaatttgtttatttgttattgccaaatgcaaaatagtcatatcataatcatttttgacattcacaaactggtaatcatctataacatccaccaaaagctttatagcttccaactgattatttctcacacaaacatgcaaaagagtcccactttgacccttcaaaccgacttgaccggcctctggagctactttaattagctccctcaacacatcaattcaccctctcatggcagcaaggtggagagggtttctcccttcttcatcccaagtcgtgcacaagaattcacaatcaacaaccgaaagtaatagtttgactgtttcaaggtggtcgttcgccactgccaagtgaagcggcatgcaacgccacatgtcaagttccttggcgagttcgggcttgtgattgaggagctcctatacaaaatctacatgaccgagcatagctgacacatgacgaggtgtctcggaaaaactattattgatgaagagcttgtcgagaattaaattatcttgttgaagaagttctcttagagctgtgacgttcccttctcgggcagcttggtaaagcaagctactcttcatgtgttttttttttataccaaagaactttgagagagaaatatttatttatacttatagtttgataaaaatgttaaagttattctctaattaaatacatgaatgaaatagcacgtcattacatataatttgtctaccaattaacttagttatttcttttttataataattaaaatgatctagctatgtgattattgttccatggtttacattttcaagatgtaactctcaataattatgttctttttcaagagaaagagtcaataaattaattatatgtggcctatatatataacacaatgatattttgatatggctaattattaggattttttgtccccccaaactttgtattgtaccaaatcatgccctctaaacttttaaggtcgttaaaaatgtcccctgaactattgagattgttgaattaacatcctaaatatgaattttctaaaa

SEQ ID NO: 28567 - DNA, 1433 bp, Cannabis sativa
caatttatatccactggaatttcattcacgttagggttttgttagtaaaattagacaaaaatctttaaatctaataatctcaataataaggaagaattttaacagtatgaaaagtttaaggagcattattttatacatgtcgaaatttggagagcaaaatagttattgagtctactttcaataatttactagctaaaatagcatatataagacatgtgttgtggatccagaattagttgaaaaggcacgttagtacgttctttgttgattaactcagaaagttaaaaaacttgtgtaaaataagtcattaacttgtagtttcttctattaaatctaattagaacaaaaaataagaaagaagaaaatgattattaaaaaaaaaacaatattcaaaagaatacaatttgagaaaaaatgtgcttgtttctttattaattggagtgattattaaaaatgaatcatattataatgaagaaaaaagtgcttggcatatgatgtagtcatctaattatatagtgatatttgagagaaagaaaaacacttacagttagatttataatttataagagatagaaatgttgatatgcttaaaaatatttaacaattattcaacttgcctatatatattcatgtaaaatttgagaagtattcaggtaataattacatttcaaagatgaatgatagaagtaagatttcacaaaaataacaattgtaccaaatagatgtgattatcatctctcaaatacattattttagttagcatttgtttttgttctcactaagactaatttttgtccctaaactttttagtctgttaaatttttttttgagttattaaaattgttgatttaagaaattctatttaatttcgtttaattttactaatgtggtgattgttcatatattaaatcgtactctcgaattttgacatttaccaaattatacctgtaaattttcatctacattaagcttttattagtaaaattagacaaaagttcttaaatctaacaatcttaatagttcaaaagaaatttttaattgtctaaaaagtttagaagacataatctaatgtatatcaaaattaatttaaggtaaaaattataaataattaatcttttagtaattatatgtacaaagctcattgcagtgacataggctcattaaagtacaaagttgagagtcacacaagtcatcaatttatgatgtgcaaattacaatttttatggggttttcatgaaatttgtgcaaaaatatatatatttttttttcaaaaaattaattttcatgaaatttgtgcaaaaatctactttttttttttttcaaaaaaattcttttaatggaaaaatttcaacaaattttttttttaataaaatatggaaaaataatataagataaccgattgccttaatgaggtaattggttacctcgttagt

SEQ ID NO: 28568 - DNA, 2424 bp, Cannabis sativa
ccacttcttagattgataactgatcctttaggacaatttgagtgttcccaacgtgctttgctctgactcgcacgttttatgggaaaacttcctaaaatgaaatcactccaggtcaagaacagctaatcgtaaagttctttcgtaataggataccaaaagcaagatacatctggctattataggttgtctcaatccatccattcaagtcccttacaactatgtagtcccatacccacataatctcagaatcatcatatacgatcttctcccatgcgatgtaggattgtatatctcccaatctattccttgcagatcacagggctctgattgtcgcagtttgactcatgtccctttcaatcttttttttgtagtaaatatattaacccacataatcgtcacctttaattcacttaggattctggacaatactcataaatcgtctcacctaaactaatactagattacttctaaacaaaagattcttttctctgaattgattaaatgggttcctcaattggttacacatgtcttatattccacttatgaatactagcaaatttaactcattttgtcaattctctaatatgtctaccccattagatgagttaccactaactaacaaacatgcacagtctattcagatcttttgatgtcttctcattgagtgtacaatgtttaatatcgatatcaattgaaatagtaattataatatttcccataaaattataacttgagtcagtcgaaggaccgatacccgagtccccttgagtcataaccagcacttgggcaggacccatacacttttttcctttaacaccagtctttttaactgcaggtaggttcttttcagatgacctactaccccacaataaaacaaaatctgcctctacattggttgatatggcatcttttacatttgggacactcaagatagggtcgtcatttctcgttctcaccttgatcgctctcttggtcaccatgatacttttgttccgtcccataattggtagtttatttagttttcgcttcctaatctccttgtaagttagtttcataagtttcaccacatttagtggcacaataggaagtgtcggtggtacaagaatagacataagacaagcctattgttctctcaaatctcggatttattacccttgttgtctaatcatatcctgcatagcagaatttacatgttcccagtgttgtggcgatagaggattctcttccttaccatttaccccgagctcaaacaactcgctaaatagactattcgatttctcttactacataacttatcacacatttagtccacatcttccaagcatttagaactcagacagacatcgatatcaatatgcgtataccatacacatattcttatcataatcattactatactaatttttccaatatactttataatagtataggcaggtaatacaataacaaataatataaatacttactataccatgagtcgacctttcttcacaacaaatatacatattcgaccaatcttcaggacctttaaaaccatgattgctctgataccaagttgtaacgtcctaatctataaggacaccaggtgttaaactagtttaatactaataggttaattaattattaaaaacagtgatgatatcagaaacttgactaaaatataaaatactaaaaacgagcatcataatggcattaaaaacatgttatgaggattcttgttataaaagatttataaaagattatatatgacaacaattcaaaaacaaaaactaaaatgcacagcccaaaaaccctcctaggaactcagcacgcaagccggtagggtcaatatgtacattactagagaagattgcaacctcatgattgatctagattttctttgtctttacctgcaccacataacacatgtgagtcataaggactcaacaaaaaaagtaatagtaacaatcatatagtttattatccaggtattatcatttatacacaattagaataaaaccatcacagattgttcataagatgaaatccaaatcactactggcatctgccatgaataagcatcagtataaagatatctagtaacacaaaactattacaccaataatagaaatcgtattcatttaataatataagttatatatatgttacctcataaagtaactattttcattacatcacattgcctaattaggcaagtcgatactttagtctgataatcatgtattgcgttgtccaatcaggcaagcctgtactatagcctggcatctatatattacataattgtatcacctaatgaggggagcccgtacctacggtcggtactcatctatcattgacgctcgtacctacgctcagtacgtcaccaagaagaaaccctacatcagttatgaaaaaccgtgtttttgcaaatgtcagttgtatata

SEQ ID NO: 28569 - DNA, 5279 bp, Cannabis sativa
tgggttctttctagtttctcaaatttcgaagcctatatatgagctttttagctttgttgcttacaacacacgttatttaagctgtttcgcggccttgaaaaagctgcgatttaacagttaacactcatttgcctctctctctctctctttctctctccttttctccaaagtctcaatcattccctctataaaatcaccaatatggtttcgttcctttctgcacaataatcacactgccgatctctctaaactactttcacataaaaactttctctatatatagctcatcctctttttctcttcgtattccttttttcttcttctttttgttttatatagtctcgttaaaacaaaaaaatggatggagaagagagaaaagtttcattagtggttagaaattatgaccccaaaacagaccttttgggagtggaagatgttgagcggcggtgcgaggttggacctagcggtgagctctccctcttcactgaccttttgggtgacccaatttgccgagtccgtaactcacccgcttacctcatgctggtaatttaaatttaattactattctatacacacactaataaatattagtacaataaaagcttcttttctttgttactctgtttttgttatttatattataactttctcatcaacttttcgttttttttttaaaaaaaataatttgtaagaaaaatatatatgtgtattcataacgtggggtttgtcgttacatattctttgtatttgcatatataaatatatattaaaacaacatctaatatggttggaacatgtttattttccaataattacaacaggtagctgagtcgataattggggaagagaaagagatagtgggaatgatcaggggatgcatcaaaactgttacttgtgggaaaaaactttccagaaatggcaaaaataataacgaagctactcctaaacctgtgcctgtttacaccaaagtcgcttatgtacttggtctccgcgtttctccttcccataggtactactaagtactataaacctttaatgatcctttctcagaaaagtattaacaaaagattatcacaaatcattgtgttttcttttctttagtttggctctgttttctcattcttgtcattatgtaacttaaataataaagatcccattattgtagctattattattattattattcttttcttttctcgagttctgaaaaaagaaaaaaatgcccaccaattattatgtctttattaaaataccgttttgtttatttcggtttttgatgatgatttttttttttatttttattttaataataggaggatgggtattgggttgaaactggttcgtgatatggaagagtggttcagaaaaaacggtgctgaatattcttacttagcaaccgataacgacaatcaagcttccgttaatctctttaccgacaaatgtggatactcaaagttccgtacaccttcaatactcgtcaacccggtattcgctcaccgggtccgggtctcttctcgggtcaccgtgatcaaacttccgccttccgacgccgagttcctataccggaagcgttacgccaccactgagttcttcccccgcgacatcgactcggttctcaacaacaagctcacgttggggacgtttctagcagttccacgtggcacttacacggcgcagacgtggcccgggtcgaaccggttcttgtctagcccgcccgagtcgtgggcgttgctgagcgtgtggaacgccaaggacgtgttcacgctcgaagtccgtggcgtgtcgcgagtgaagcgcacgctcgccaagactactcgtgtcctagatcgggccctcccatggctccggctcccttcggtgcccgaggtcttcaagccttttgggctgcatttcttgtatggtttgggaggagaaggcccacgcgcggttaagtttgtgaaagcgctttgtgctcacgcgcataatttggcgaaggagcgtgggtgtggtgtagttgcgacggaggtttcgagccacgaaccgcttaggttaggtattccgcactggaaaagactatcgtgcgccgaggatttgtggtgcattaagagacttggggaagattatagtgacgggtctgtcggtgactggaccaaatcacctcctggcctgtccatttttgttgaccccagagagatctaatttcgtaaagaatccaaattagcttcaaaaacatcattagctaataatttaattttttttttaggaaaaaaaagaaaaagaaaatgaaatctttttcctttttctttttcttttgattttgtaaccttttatatttagatgatattctcataggataagcgattttaataggagtggggaaagagttcctattcacaaagatatgggtcttttgttgtaaaagggaatatcatcaccattgttttttttttttttctttttctaaatgtcattaatactagtcatgtaaatgaatgtgacatttttagatcctccttgagccaaacacagccttaattttaatgtggggttggaattagctttttattttttattttatatgatgggatttactttaattattctaaaatccaaaatgtcttcttcctagcaattgttcttccaatatggttcagaaaactttattaagttcatctcttttgtttgtgtcagtatagtatataagaatatacgagtgataaggtaacgtaatgactactaagtagaaagtttttaatgaacttttcgagcatataatttgtcccacgatgcacactgctcaggtaaagaaccttatcttgttcacttttagttaagagattattattattactcttgtgggttaattaggctcctagtatctttctaattaagggtaagtggtcctagttgtcgtatccccccggggcaattctgacttttcacaaagtaaaagtgcgtatatatgttatcaaaactcatgtgacatgatataacataatgggtaccttttttttagatgatatgatgatatttttcttttttgtgggttttggaattcctcttttgggctccatttatataatgatatacatatatattgagtgatgatggggactatgaaatagacattagatttggcttttagttgttatgcgtacatttttatatataaaaaaatatatatggaataaagataatgaaattttaaaaagaatatgaatagaaaagatgtagggaaggcagataggaatgaatagaggtattttcttggcctttaccctcttcataagcacctatttcgctttcattccatttatttgttattgtttggaataatttgagtatatagtttaacaagtggatttaaaagcttttgaccatgacatttttcaatactatattcactgcacaacgtatagttgctcttacaaaaataaccaaaatatccattaatataagttattattattactattaatattaggtattataattattttatcccacacaatatttataataatatattgcactcttaatcgaagagttttctacatatccagtaacaaattcgagattctaaccttaatttggataaaagaatgaccttcaaacagggctcttaatttattacattttattatatttatttatttctgtttactttatttgtatataaaatatttgtataaagtccgtatactatattatataaaagaagtggatgataattattttaatgcgtggatcacttataggattttacttacaattctagttaccgcggttattcatgcaaaaatgagttttttaaaattgaagttgatcaaatcttatatcttcaatcaactatatcacaagataaataagtaatttgcctatgctatctactaattagtatctttgcatcaaaaaatgcaagactacgaactacatttatgtaattaattagcatgattttttttgtgtggtcaatttgatcttgtttgtttgtttttcatttttaaatatttatatagtatcatacatgtttagttagagttatattagagttgctattacataattattaacttagataataaatctaatataatttaattacatttttttaatatataaaatttaatatatttttaaatttatttataagaaaatatatctaatcaatcttattaaacaacgaaataagtaaataagtttacatattttaaataatataactaatatatttgttataaagtataattaattaactgaattaacatctaatttaaattaagatttattgaaaaaaaaattatttaattttgttaatatttttaaattaaatttaaatatttgaaattaatttttaaaataaaatataattaataattaatttaaccggattagctttatctattaattataacaaaaaaataaaaaaaaaaattgttaaataaataattttctataaataatcatatataatataagagatatatcactttgcctttcattattttttaatgcacaacccaactatatattggaataactcttatattatagtgtcacgtgtcaataaaattgtgcctctaattagcaaccataataatgtgtgaaaaacatatatatgctatgttttcttaaaattctaaaatgaaataagatgtctaaaattatattagataataatttaatattttaagttgtgttatatcaaatctttgaatttgtgagaatataatcagtcactaatatagacaaattcttagcaatgttaatatatttttttttaatgttccattaagttataatctattttatatatattatactaaattttgtatgctttttatgctatgctatattttaaaatatattgtgttctataatatttgatgtaatgaattaatggaaatacaataataatactactactaataataataaagaaattagtagtgctaaagttacactagaatagggacaaccaagctcttaagattgacatgtgtgtcttttccacatacaccaatgttaggtacatatgatcttcgtttcagattggttgataacaggtcaaaattgtaaggatctgtatgcagtaaatgaatgaccacatagattggaaatatatatatttatgaaataaattatccattatataataggattgagaccttggagcttcacggggtttgtacattgacaaagattgatatgaaatatgatatgatgaatcatgagagttgtgtggagaaggtggaatagttgaaactacaaattaatgtgaatgcctctaaaagaaaaaa

SEQ ID NO: 28570 - DNA, 3319 bp, Cannabis sativa
agttattatattaaactatatgggacccgatactaaattacaccaatagcgatattgacacgtgagagagtgcccgttttgcatttctcattactattatagcttatgaaccaattaatcaacagcccactatagagtgatgcgaccttgggatcgaaaatgtatatcaattagaagagaaatgctatcattaagcattactggtgctcattaacaatacggtgctcattaacaatactctagtctctaactaaaattaacgtgtcttatgctatgttgtcaaagagcattgtcacatagtgatatgtcaaatagttagtgatatttataataattattaaattaaaacatataatatttgatacttaattacactaaaattaatataataattgattataataataggtggtatcttttcgcattcactacaataatattactgtaaaagcttcatccaagaatatatttacgatcaaataaattatattctaattgagatattataactaaaaagaattacactagaaaaaaattaaaccacaaaaatttatcaatgtaataacaataataaatgttattctaatttttgcactataatgtgacatctgactaagtgacacgtgtatcacatttcgtaacttacgcggatagttatactcctagcaagctatgcaaaataatgatatagagcccccaaagtcatacatgaatggtaggatgatcgaacaaggttactggtggatattcgaccagcttcacgtaagtaagttgcatgtataccttccatggggtgcgagttaacaatttcagagatagacatcgttatttccaagattgcctatcacgaaaaaaaatccctaaattagtgggataaattcataaatttagagaataaaggcaattagcctagattttttaatctctttattgtaattatggaaacatactaatttttttattttatttgttatagattaagggaaaccatcttcatgtaacttcactatccagagacacaaaatctaagagtgaattactcataatcattgtaagagctttagattaattagagtatcctttctaacttttctcattagtcaatacaataaaaaggaagtaggctattaccaattatatataaggggtcgagcctttataaatttagtgtttattttcttcaacaataaacaatccttaataatataattacttaataaaattatttttaaataaatataatatttatatttatagtaaaattactaaaaatagatctgtgctatatatatgagtatatattagaaattatttatagaaggtcaaactcaaaagagctacgcgcagtacgtagcttggattatctctactaacaattaacaagttaggctttgatcacatgttgtgtactacaatacagtgttattatcagattataagttttgtaataaggaagtgggggtgggggtgggggtgggaattaagagtggtaaatttgggtttgacatttgacttttgagagagaaaataaggaattagtggggagggggtgtggtggtgagtaagtaaatagctaggggatatatacttaaaaaagaatggtgtgtgtgtatatgaatgtgtggtggacgatatatgtaaataatagatatataggaatagtatgtagggaaagagaaaggaaaggcaatcatggaactattagagagagatggatcgatgcatgctgataataatttattatgatcaaaaagctgtaaaaagaagctatatatatataagaaaaactcaacgcaaatacccaaattgactacgacgttggctttcccaatcccatggccatatattatataggaatatgtgctttgatccgatcatattctctctctctctcttcaccacaccactattccttacaaatatttttgcccaccaccaaggagactataatgacacaacttaatttttcaattacaaaaatttaattccattacattttgccatttaaatggtggtgtgtcattataaattagcattttttctttccaattttgacaactatccgattctacatttgtactctcttcaaaaaatactgtttaaatattataatatcttttaaaaaaaattattttgaattattaaaaaaatttaaaaaaaaaaaactgaaaaattaattgagcaattcacaagttaattattttttattttaaaatttattaagatattaaaaaattaatttatgtaagattcattataatgggaacaaatttgaattttttgttttttctttttttttttctctccaaaaatttagcattatttaagtatacataatttttagtttgattttctaaataattttacatttttattagatttagaatattcgatttttaaaacttttagtcgcaatattttcttgaaaatgaatgcatcataaccaaaaattagtttaaaactttagatttgattttcgatcacaaacggagcatgttgagtatccaaaatttagaatttttcactcattatatcttaaaactctaaattccatgataaatccatcattttaatttcatttaacatctttcttctcattttcagttcgtattataaattttgccatttaaatctaaaataaatagtttacaagcgtagttctgcacaaaatgaatataattaacaaaaacacctctcaaacactttataaaatgcactttataaaactagtctatcaactgtcaaagaggtcatttggttgaaaggtctttcaagagttgggattggatcaaagaagtgtatagtgcactgtgatagtcaaagtgcactacacttgagcaaaaatcaagtcttctatgagaggactagacatatcggcataagaccgttttacccgagatgtcatcatagaaggaaaggtgaagctagccaatattgttaatgaagagaacctagcagagacatgctcaccaaaatcctccccacaacaaaatttagacatattgtttagttctgctgcatgtttcagcagattatgcttaaacatgcttctattttagtttttctgtaatgcctagattagcaattaggtggagaaattgttagttaattaattgctatattctcagtgttttggtctcttgatctgagttagttaatgttagttgtctctagggacggtcagctagactggctatttattctgttatttcaacaggtattgaacacttgtaaattgtaactagtacagtagaacctctatccaagaatacacttgggaccaagaaaataatattttaattgagaggttataactaaa

SEQ ID NO: 28571 - DNA, 1273 bp, Cannabis sativa
accttgttcttaatttatgaaaacaagatcatcgaattacatctcttaaaaaattatcttattccattccacctaaatttcccataaagtagccaaaacagacaaattccatgaaactagaaattttgtatttccacaaaacatagattcatacaacatcccttccttatttttattttgtcaagaaaactctccattaatcaatttccataagcagtgatgacctgttcataaagcaccttttcacatattaaaaataattaaaaaaaataattcacatggctttaaaacacaagagaaattctacagtcacactacttatgactattttccagattaaaaataattcaaaattcaaatggctttaaaagtactagagaaaatattctataatattatctaaactatagcatatattgtcaaacgacaaagatactttaatagtaatgcattctaactgaaaaatttaataaagcataatttaaatgacagaaacagggacttcaatttcattgctgaatattttggcaagtttttacattggggaatcctttcgagataaaaaggtattttgaggttttgtttatggtaagttttcttctgacattagtattgttgaagatattcggtatcattcccacaagggaaacaaaatattttcctttaatattgtaagggtacgttggaaagctatggtagaattggattagggtgtaattagaggtaataacacaatttgacatgtttgtctaaccatgcaattacaaatgtgtaattggaggtaattgagatttgagaggttcctattatctcaattagccaaaacaatctaggctgtgtggctcgaaagaaatgccagaatttttgaaggggttgctaaatcagaagcggatgtgtgagagacagttaaattctggacagctacttgggtctttagaaccaaacattttgaagatttgtcctttttagacttatgcagagaatgcaaaacaatcttataagctttctagaatgatcatgtcttaggacttttgtttgatgttaattgtaaccatggctttcctccgccataagtgaggcttattaataaataacggggaggaccctggataagtaggtctcttctcttttccaaaaaaaaaatagccaaaacataatttaaatgacagaaacagacttcaatttcgttgttgcatattttggcaagcttttacattgggaaatcctttcgagataaaaggtattttggggttttgtttatggtaaattttct

SEQ ID NO: 28572 - DNA, 2875 bp, Cannabis sativa
  modified_base (983)..(984): a, c, t, g, unknown or other
aagaactacaaccggccactcgccattttcaatggcatatggttgtgaggcaatggtccggtggaaacgctattcccatcccacaggaggaaaacttatgacccaacgacaaacaaggctttattacaagaagcattggatcagattgaggaactccgggatgagtctcaaatacgaatggcgacttatcaaaagaaggtgactaagtacttttactccaagattaaaagtagaaaattcactattggtgatatggtcttaagaagagtcttcccagccactcaagaacccggagtaggggtacttgggccaaattgggaaggaccatatgaaatcgaggatgagatcggctccgggacctacaagctaaaaagattggatggaaccatggtgcctagggcctggaacactgatcatctctgagagtattaccaatagtcagaaaatgtaaacttaggctttgttaagaaaatttgtacgaaaaagtatatgcaacctccaaatttttgaataaagctgagtgcctcaaaaacaatgttttcatgccactcaggggtgtagtaaggcataccacacggacaaatgtaaaacatgccaaaagtaaagtttagcaaaatcaagcaagatatgtatttaagaaaaatatatatttagatgcaaatgtaaaagatgtcctgacccaaaagcaggtcctaaaaaacattaagggcctcgggatgggccttaaaattgtctccccttaaaagataataactaaaattgtctgaaaagagggaaaagaggttgtaaatataaaaaaagaaaaataaaaaagaaagatagtgatagtggtaaactggttggcttagtcaatgcggggtggaagacgaggccccctatgctccttgagcaaggcgtcgagtctcttcttcttctcccagaagcgaacaaggacttcctcaggcttgggataaaaattgagcttgatgttctgggcatttgtnngccaagccatgaaaacgccatcgtcaaagcgcttggtgcaatgcttgcagacgacgggggctaggagctcatctcttttagccttcttcaaggcttgatctttaaagtcccttagctccttcacctccatggccaggttggccgtcgactgcaagtccgcttggtgcagctcctccatagattttaacttggcactcagctcatccatagcttccttggcttcccgcaactcgcacttggccttggccacagcttcgccctgagcctttagctcctcctggtgcctcgcctccacctgagcctccctttgctgggcctcctcccggaatgctttcctctcagccgacaagtctcgcagactcttcatggcctcgtccatgcccccaaattcggacatgacgtacccatggttaatcagggtcttcgagaagcggccggtctctgcagtgatctgaaaagagaaacaagaatgagatcgaatgccttaacacaaaatacaagcaaaaagagaggaatgaatcacaaaaacttaccgcagccaaggcagccctgatatcctgaacttggtaaatagagtttgtggaagcacgggctacgtatcttttggccgagaattgggtcagatgggagacaaactggctagttagctcagaagcgaagggggcgagagtaggaccgacgaagcggttgaaccaatctgtcagaggatccatgttcagtcccaggcatttctgaaggcctcctcgcgcaaagaattttgttgctcctcccgtaagactttcttcagggcttccacctcagcgtgtccccggatgaactcgtccatggcgtagttctgtttggcaattcgaagttgtttcctcccttcatttgcgaggaccagggtaagaataatgccaaacggcacggtgtactcctccgcctcgggaggaatccctgagtctaaactaatggccggggtgtccttcctcctgggcctcttggaagactcggcctcgaccatcttacccttccggttgcggtcaagggaagccacaatctcgccctcctcctcttcgtcctccccttcctcgtctatcaggacaattgtgcctaagggggcactggaagacgacctcccaggggtcatcagttgggtaggagtcggaggtagagaggagtccgggctgtaggtctcgacgagagtcgtcagaaggtcttccattggcttggctgctgcaaaaagaaataaacaaagtattagaataactataagaaggcatgcgcccaacaacaaagcaataaatctagtcctaccctgactttctaactcaaccctagcaaagtcttgaactacactgctagcttcgtcatccctaagaaagctgtccaagggaaggaaccagctagaagacaagtacgctgagtgatccaaggggatgggtgcaggaggtccaagactcatccgggaccggcctaagaaatgacctaagtgggaaaagtaaaaagccttggcatgatccccccaccgagtggggggcatcctaaacttaagaacgcgttcgtcgaatcctacaggcctataccgggaatactcttagaccgaaggaacatgatagacctttaaaggagacttaccggaaccagatgtgctggcatctggagcaccagtgttaggaactaggaccaaagacttaggcttgaagggcatccgacccgtgcctgcttccaggcgaagggtcctctcggttgcagcttgggccttgatataagccagctcctgctccctcctaaagaggtacttttggtaccggtcttccgccgaagcgataatctcagcccggagtaccttctctgcggccggggtgcgtacgttcagacagaggaccttggaacaattaaagtcatccac

SEQ ID NO: 28573 - DNA, 914 bp, Cannabis sativa
atttttgctagatctgatttcgtttgaagaaaataataagttggccttgttatttcatttgtatatgtataggataatttccaaccgagcttcttcacaaagatctagaatgaagaaggctcaatatatctctgacatggaaaacacagtgaaggctttgaaggtgtgataaccgtaattttttttatttattaaatattttaatataggattaattactttaattatttatccttgtatatttaatctagctatagcaacattattggcatatactaattattataacacatttaaatgcatatctttaatgacatgatttttttttaaaaaaaaataatggatttgaaatgacatttgtatacattttatttgtacataagcatacgtttcaaagaattagtacataatagatttgatacaaaataatatataataattttaggaattatttcaaaaaaacacaaaaacaataaaaagaaattacaaaaaaatacaattgtacgaaatttttttatggttttttaatattttatttacataaaatacaatcatttgatgtatttttatattgtactcttgttattttgttgttttgattttttattgttttttttatattgttttgatattgttttcttattatttttatgtgattttcttggttttttactcttatttttacaaacaccataaaaatgtgaaaaaataaataaatgtgaaattgtaaaaagttttccaaaaataatttatgtaaatttattttcataattttaattaaaaaacatttctaattttttgtatgaactataacaaatatagttattatcgtggtatatattttataacttagagaagatttatattgcctcaaaattttggtttacaacctatacaacacttctctctcaaaa

SEQ ID NO: 28574 - DNA, 8388 bp, Cannabis sativa
  modified_base (101)..(131): a, c, t, g, unknown or other
  modified_base (1169)..(1177): a, c, t, g, unknown or other
  modified_base (3643)..(3644): a, c, t, g, unknown or other
  modified_base (6811)..(6816): a, c, t, g, unknown or other
  modified_base (7289)..(7290): a, c, t, g, unknown or other
tatatgttctggatgtaactgattttgtgcatatatcaagtatatatattaaaccataaacatgtagcatacatgtaatcataattcacttctaaattgannnnnnnnnnnnnnnnnnnnnnnnnnnnnnngggcataaaacccaacactttctcgtggccttctcactccataatcaacttggttttgtgtagtattttcttgagtcaccctggttgcggatgcctactcagcgttttgtcggttagcctctgccagacgttgccggagttcgcgattttccaattcaaccaatagtacatacctagtgggatcataggcaccctcactcctaggtacagaaccaccagcattagtattggtttcctcattcctagtttcatggttttgatcatgaccacattaccttcttaataaacgtgttgaacatgttgttcttgaagtgtgtggtctctgtgaacccattgcttctttcccaggacgacgattagtctctttaggatgactattatcgttttcatcatgatcatccatgtagaaaaaaatttattttcgttaggaaggatttttctaagtttttatcacgcaagctctcaatgaaagcaccaaactgttaacgcagattttcaataatgaattaataagcctttatcgtgataaattaaacacagaaactataaggaatttgagaagaataataatagcaataatgacactgggttttttacgcgattttacaattaactcaacatagtccacgagtctatcttattaggatatttctagatacagaattaaggttttacattcagtgatctcttttctctcaaagattttccgtcccttcttctgtgtaatctacccttatttataggaatataggttggcagttatttacatttgaatttgaaatgcataacggtttccacgaaacgtgggctttgaccacgtcccattttaacacgtgtacagctaaaaatttgcataactgtttgttactcttatctttgaagtaatggatatggacgtgggatagaagcatctcggtagaggtttctcgctagaggcatctcactttgtacatagatgaatgacttggattatatgtactccagcaaaggcatgagcaccagtgtactgagcaaacttaagaactgctctttgaccannnnnnnnngcagactggacaatcatgtcctttaagtcctcaagttattacacttagttattataacgtgggttatactaagtgtttcaacagccgattcgtctcgtcaatacttccttatgtgtagcgaggtagatgtctcgctatgcattgtatgtagttccctcgggattatgccttccaaggcaagatagtttctcgtcaatacacgaattgatagttagtgcatctttgtctcgcctaagactgtacaatcagcaagttatgaaaatagtctattaattccatatttaatgagttattccattttgcatttaatgacatgattatcattatatctgttggttcatattccacgagattgaaacatgtcaatttctgaagtacatccgaattttgggtataacacctaaactacgtaaaaatctcttgtgtgttatttcattatttacgccttcattattttcttaagctctaaaaatattcggttgccgaaaaaatcaataaacaagtattaattttcaataaatattataaaaattacttaatttaagttggtccaaaattaattataattaatttttaacttaagtttaattttctataaatatatatgactgaattcgaaatccaatgtatttaaaaaaatatatttttgaaattcatatgaaataaaataaaataaacttgaaaaaattattctaatttatgttggtttaaaactaatatactaattaagcataaatataattttcctatttaattaaattcgtctgaaaaatatctaatatttaagtgtctcgaataaaatcaacttatataattttctatttaattaaatatatatagaaaataacaaaaatctactcagaaaataaccatataaatatttcattaactaattatttattttctaattaaaatataatacattatgttctatttattttaataaattattaatgaaaaatttacgtgattaaacatatctataaaaatattaaaagtttactcagaaaataaccatctaaatatttcattaacttattatttattttctaattacaatataatatatgtctatttacttcaataaataattaatgaaaaatttacttgatttaagttgatctaaaatttacttaatttttaactttaatctatttttgcaaaatttttaattatttgcatttattaataaaatgcatttcaaaatttaatggaaaaattgattaataaaaaaataaaccataatttaaaaattattctaaatttaagttgttatgaaatgaaaaaatttcaacttaaatataattttctatctaattaaattttttgaaaaatatctaattgttatcctaatttttgtcttcctgacgtgctagtacttacgtggacaaaatcagtgtcacgtgacagtactgctcaccaacaagaaggctaagtcagtacctcaacaaacaaagaccccgacacttaaacattaatcaagtgatagacaagcttcctcatagaagctggccagccacctctggacattaccatggtcgtccagcctgctccctacaggggtctgatcggccaagagaagctttgcagggtccactgtgcactcctacacgtggacaacatcatttgggttgcgaattgggccctaaaaggcaaataaaatagatgaataatatctatgttcgagggcatttttgtcttctgtaattaattaattaataaacaaatatgtagggtttcaagtgtaaatttggattccaggcatcctatataaaggccttaactctaacctaaaaacctaagttcagtttaagcctaatactagcctccaagctctaaacctaagtctgacgacccttcttcattctctctcacacccatacaagctatctctacacttgagattttccaaatgttgattcttactttgtatcctcaaggatgctatatcatatcccacctggagcgatctgaatagtattaacccccggtattaatacaactgaaagtggagaaggtcattattcgctatcaaatggggttgaacatctataacaaatatgtgtgctctttacattttcattctatttgtgtaccacatggcaagcattagatccatacgaccctattgttagttgatcacttttcgaggtcaacactaatattttattgtcttaaataaaatccacttaaatatgaattttctacttaattaaatgtatttaaaattagaaataaataactaagtgtcttcaataaaatcaacttaattattaattctaattttatatgtatgaaaaatattctaatttaagttggcctaaaattaattgaaattaattttcaacttaaatatactattctatttaattaaataatagaaactataaattagttacaagaaattacaatccagaatatattttattaaactatttgtgtttttcgaaattaattttaaaatannctaatgaaaaattaatttcatttattttaaaattaactatgttactaatcaattttaattaggctaaaaataatataattagcctaatacaattatttaaataaggtaaatggaccttcatagttcgggtggtttatgtgagggatggttggattcagtatgtcgtacccactactatggccccctaactcccacacaaggcccaaaggagaggaatttaatcttaattaaataattgttattaattgaataagcttaataccaatttgcctaaaataaaactatcaaggtgatatttttattttagcaacctagtctttttaaatattaagattaaatgggctttctatacgcatctaagctcaattgcaaatatataggctcatacaagacaaaggatttggatgggccctatgttactaggtttatcacatataaaaaaattacaaaatttacctattataaattatttatatgatctattgacaattggactatgattaaaattagatcattagatctgttaacaagttgatcatagcaatttagatcaaatgacaataagtttgttaaaaagttttgattaaataattaaacaaacaatcaaacaatgtaataatattgggaaagtaggctaagatatttctattttaacattaaaatgcttaaaaaaatatgttaacttgaatgtaaattaggttgttagaaaatatttgaaaaatatttaaaatctaacaaactcctaaatatcttaaattcaaatttgtaatttaaatatccaactaattttcaaatatctagtttatttaaatttaatttaaattaattaaataactaataagataatataatataatatcttaatttgaaaattgtagatatttcaaatcttgtaatttaacaaaataaacaaatttgaaaataggatatttattatggttaggatatcatcaattttatttaaaaaataaataaaataaaatatcctaaatttaaaaattttatagttagaaaatcctaaaatatccattcaaacaaagttaaaccaatttttcaaaatttcctgttattttaacaaaaatataaattttatttaaaataaatatcatagtaagataaaatgtcaaaataactaacatttatctcatcttataatttaaattaataaaatataatttaaaaatgacaaattttgaatttctgatatggttaacaatttgaaatttattttgattattttttaggttttactattattttaatgtcaaaataagatcatttaaaattttaataataaaatatgtaaatatctgatcttataattaaaattaaccaaaacaaaataatccaaattcaaaaataaccataatggtaattttgtggaaaaattaatttttcaaattcaaatgctactaatacctaaaactaacttaaattaattaaaaaaattaataaaaaattattttattctaataattagatttttatttaaaaattaagattctacaaaaatttgaattttatttcattgaaaagtgatttttaaaacttgaaaaatagctaaaacaagtcaacaaatgggagtatgcattgcatactccacccccgcccccgcgcgcgcacacaagtgaggaggctagccgaggaagagctcgtactacaccttagtagaccaagaaacctcggcgtgattgggcttcgaatagcccttgtttgagaaatttcaaacatgcttcttgtttgaagctcggtcatgaccgattgcctcccagctccgcgcgagcatgtggtgcaccctaggctagatatttactttcaaacttcaaaaaaattgtaactatttcaatttaaatctaaattgagttctgtaatagcctaaatccattaatttttcatctactcccagtacaaaaattagtttttgtcaaaaatttgtaattaataaacattcatcaatcaagcacataaattgttggtgttttgaccactttgaacaactaactatattaactgttttttttacagctcaacatgtgattatgcttgtcaacaactgtcacaactatacatacctactccctaactcgatctaggcaatgaggcagagaaaaactaccactacaagactaagttagtagtgtccaagagtgagagatagagcttctgtagtaaggagagaaaccagagaaaataaagtgaatcaccatgattatttctgcaattctaagttagttctttgagtggattgagggttgtaaaaagagattgttcactcttgaagtgacttctctcattgtgagctatatttgcaatcttgtgtattcatgattggtgattctaagttgtatttctctcttctagatttcattacaatgttatgacatttatgattcattcatcttaatcaagttaattttcgttagatttcttgttctattttgattatatagttgttgtcattgtaattgttgtccttgaattcttgttatagtgatcttgatcaggttatgatctgcaacaaatggtatcagagctggtgtagctcaagaagatcaagaatagttcgatcatagattcaaggttcaagaatggcaatggctaagttcaaatttgacaagttcaattgagaaaaggacttccggctttggagaatcaaaatgaaagccctacgtgcacatcaaggcatctcagaggccattgacactactgtaatataagaaattgaagataaaaagaaagtgaaggagatacagatcaaggctcatagtgccatattgttgtcttttggagatgaagtccttcgagaagtgtctgatgaacagacaactattggtctctgcgacaaattggcaaagatcaaattgaagaaatctttggccaataaactgtacttgaaaaataaattgtatactatcaagatggatgaatcaaaggagctaaggaaaaacctggatgaattcaacaagatcatactctagttgaataacatatgtgtcaaaatcaatgaagaagatcaaggtatcattattttaagctctctacctaaatattttgagcattttattgacactatattttatggaaagatactctagccatgtcagaggtaaagtctgtcgtgaattcaaaagaaattcaaaagaaatcagaggacagaattgaatcannnnnngaagggttgttctccaaaggaagaccagacaaaagagagtcaaaagaaagcaagaacgaaggtggatacaggccgaattccaagtctaaattcaagactggaaagaagtgttactattgtaataaggaaggacactttagggatgagtgtagagcactaaaagccaagactgacagagagaaaagcaagaatagaggagaagttgatatagtttctgatggctatgaatctgccagagttttggtagtgtcaaaggaaggaggcagtgatgaatggatcctggatttaggatgctccttacatatgtgtcctaagaaagagatgtttaaagaactcaaggaaatctcaggtgggacagtgttgctgggcaacaacaaggcctgtaatgttcttggcactagttctgtcatgataaagatgtttgatggcaccacaaggactcaagaagaagtgaggtatgtccctgacctcannagaaacttgatatccattggcatgcttgacaatctttgatgcacaatcaaggtggaagatggggtattaaagatatccaagggatcaatgacagtgatgaaaggtgaattaaaacgtggtctatactctctcattgggtgaactgtcattagaagtgcagcacctgctgttgctggtcaaaatgatgacacaagactgtggcatctcagattagggcatgtaagtgagagcggaatctcagagcttgacaaacaagggctactcaaaggaaaattggacagaaaactacccttctgtgaagaatgtgtatttggtaaaagctacaaggtgaaatttaccacaggtcaatataccacgaagaataaacttaattacatacactcagacctgtggggtgcatctagaaccaaaacctttggaggagccatttactttatgagcatcattgatgactaatctagaaaggtgtgggtgttcttgttaaaaaccaaagacctggcctttcaaacctttattgcctggaagaagttgagtgaaaatcaaacaagtaggaagataaagaagctcaaaactcataatgggtcggaattctcctctgacatgtttgcaagcttctacagaaatgaagacattgccaggcatcacacagttgtcaagaatcctcaacaaaatggccttgctgagagaatgaacaggaccctgttggaaagggtaagatgcatgctcataggggctggattggctaagcatttttgttgtgaagctttaaaaactgcttgctatttgataaatagatacccttctacagctctaaattttaaactcctcaagaattctgggctggcaaagctccaagctatgagcatcgcaaagtatttggtttcactccttatgcacacatcaagcaagacaagctgcaaccaagggctcttaaatgtctatttctggctactttgatggaatcaaaggctacaagctttggtgtttagaggaaggatacaagaaatgtagaatcagtagatatgtcactttcagagaagatgaaatgccactcaaaacaataagggagatcagttgagaatattttaccaggatcta

SEQ ID NO: 28575 - DNA, 4219 bp, Cannabis sativa
ttcttagggctgccgatgttggcgagcagtggacacctccagctggtaataatgtcaaggtaaacgttgatgcggctgtctttgatgatggaaggagcttcggtttgggtatggttgctcgaagttcaaatggtttgttgcttgaaggaaggatgaagtacactgcggctcaagtggatgtggccgttgcagaagcaataggcatttgtgaggtgctgagttgggtgaaagagagtcaatggcctcaagttttcattgaatccgattctctgtgtgtggtgcaagctcttcatagttccattgatatgatatccttgtttggtagcgtcattcaaggttgtaaaatgatgcttgcatctcttaataatgttgttgtgtcttttgttaaacgatcagctaatgtagtggctcataagtttgctagagctgctagattatatcctgatcgtatttttagtttggagtctgttccaactgagttgctactttgtttggtagctgatgtgagggtttactttcaataaaagatgaaatttccattcaaaaaaaaaaaaaaaaaaaaaaatttaattagcttttttttttttaaaaaaaataaataagtaaataaatgtttgaccctctatatcgatgtgacctagtgttacactaagttagcatttgaatatatataaatatatttcattaaaatggaacatattgattgacacaatcccaactttggtagtctgccctgttctcaaatctctctccagtgctcctaacatggaggaccatacctcatctagcagcagcagcagtagcaacaccatcgacgaccacaatggaaacaaccactggaatgccgaagaagccatagcaggcaacgcccaagctcttcaagctctcagagaactcatcaccttccctactctctattcacgccaagctcgaaaactcggtcatttatatatatatataatttattacacttttctttttcctattttggtttgacttttaatcttttctgggtttgctttttcagtggcctcgaggtttaatcctctacggtcctcctggtactggaaaggtatattacttcaaccccttttactaaagcttgtgactttcttcatattcgatgtgcattttgaattgggattgttatggcataattgattgtgtttgatttcagacaagcttggtccgtgcagtggttcaagaatgtggcgcccatataattgttattaggtactgtgttcatctctagttggcaatggcttctaaggtttatgaattattaattgtaattttattattaaactggttctgtatacagtccacattctgttcacaaatctcatgctggggaaagtgaaaagtttttgagagaggcatttgctgaggcctcatctcatgcaaagtctggaaaaccatcagttatttttatagatgaaatagatgcactttgtcctcgtcgtgattctaggtatgacataactcacaatcatatcaaatgggttttaaggtttaaattttgatttaaaaactcaattgcagaaaagagcaggatgttcgcatttcttcccaacttttgatattgatggactccaataagtcctcagtttcacacgttgttgtagttgcatcaactaacaggtaactaacaggttgctttatgataattgttgggctttgaagccaaatagcagttttatggttatttgatcttcatcttagtggttgttgttcaggtgaaaagatagtaaactttgatgcaatatgttagtgattgtggttataactcctctgtgttagtggttgttcatcttagtggttatttgatcttcatcttagtggttgtttaggtgaaaagattgtaaactttgatgcaatatgttagtgattatggttataaatcctctatgttttgttgtttggcttgttgctgattaatgacaagcctatgatcaagtctcttttattgtagtgatgatagtgttcttgttaagcatgtaacattgcacaattacagtggaatcttgttttccctctctctttcttttgatattgaagctataatttttgtttctgtatgaaaagagtggatgccattgaccctgcattaagaaggtcaggacgatttgatgctgaaatagaagttacaacacctaatgaagaggagcgttttcaaattctcaaggtggaattcgtttgtttaagccatagtaaaattattgaactctctctctcgcgcacacacacacttttttaaagattctgaactgtgctaataattgtccagctctacactaagaagataccaatggagtctagcattgacttaaaagcaatagctgcatcttgcaatggctttgttggggctgatctagaagccttatgtcgtgaggctgcatggtctgctagtaaaaggtcctctgatgcaaatgaagatgatgtcaaatttcgattaacaatggaagactggaaccatgcaaggtctgtggttggtccaagcataacaagaggtgtgaccgtggagatccctaatgtgacatgggaagatattggaggtttgaaagatttgaaggttagtaatttttcatgcctatttcattctgaattttcaaagttaaaaatcatactcaccacctttttcatggacagaaaaagctccaacaagctgttgaatggcctatcaaacattctaatgcatttacaaggtttggaatatcacctatgcgtggaattcttctgcatggtcccccaggatgttcaaaaacaacgctcgctaaagctgcagcccatgctgcccaagcgtctttcttttccttgaggtttgaacccttaatgcaatggttggcaagccatatttcttttccgtggttttgaacactttttcattttgttgtccttgttgtgtgatcacctattcttaaaagcttttcaaaggcggaaaaagaatgctttaggctttcagtgtttgttttccatattaaactagttaaacaaaaaaaaatgtatcatgagaacaattttataatgctagatttaccccaattcgttttggccttttagtcataattagtgcaatgccccacagctatgctgccatttcatctggttttctactgacaatgcttaatagcagaagctagtatgaaagaagatagaatcttccctactatagttttcataccctctcaccagaaaaatcgaccacctcaacagattactagcttttcctaatatgtgaataatgtctttaaaattagtttcttttgtaaaacccaagctatcatgaaaattccatcttctaaagttttttccaggattgcttgacttgaaaattcataaactatgaatcagtggtgcagaattattttcaatgtatgttggagatggtgaagctctacttcgaaatacattcaggagggctcgccttgcagcaccaagcataatcttctttgatgaggctgatgttgttgctgggaaacggttagtatatcttcttctttttcttaagtgagattctgtttatagtactttgtcgtctttttcaaagcttaacaagatatttgttgcattaaatttttctgttgtttaagactaaaattaaaagtgactgaattgacaatttgacatagaacctcctctatccattacgggtcgaggactccttctccttccccttcttcaaattccgatttgttttgcaaagcgaagaacctatcgtcgtcgattttgctgttgtagccaaacagaaaatgtcataagtttgctcaaaattttcaaatgttgtttagacctttcgcatttgctatctttgcactgtcccacttccacccttaattcatataaatatatatatatatatatatatatgtacaatagtaactggcttatgcagttcatgtttgaaggggtgtgtgcataatataaagtattctaagtatcctctttcttaaatggcagaggtgcgagttcaagcagcaacagtacagtaagtgagaggcttctatctactttgctgaccgaaatggatggtttggaagaggctaaggtaagcattaatcatgaaatggatttttctttatagtaacatatgatctaatctatcgttaactcaatcaattgtttctccttttcacttcagggaattcttgtgcttgctgctacaaatcgtccttatgcaatcgatgatgcattaatgcgccctgggcgctttgatctggta

SEQ ID NO: 28576 - DNA, 3235 bp, Cannabis sativa
  modified_base (229)..(230): a, c, t, g, unknown or other
ttttaaaaaaattataatcggttttatgaggtattatgtgttatgagattttttattgtagaactaattttgtttttaatttatgtttcagtgttttatagaaattaatttcccctttattttttaattgcaatcggtttgaattattgtgtattacctgtttgtattcattatggtatataaccagttctattttagttataaccggttctaatttaattataattannttgagttattttgttttatttatttttattctttgtgttacagaaccggttatatttcaattataactggttttatttttgtttatatttgaggcatctaagttctgatgactttttcagtaatttttttccggcgacagtgactttttcgttgacttttcggcagcaatgactcttctgtgtcgataccttttccggtaacttttccgacgccggtgactttttcggcaatttttccggcaaaacttatcattgtttacaaatatggaatttttatctttttttacaaaaatatggcataaaaaaaaaattgtataaatgtaaaaaaaaaataaaaaaaaatccataaccctttagttttatttatttatgccatagaaaaataaacacttaaaattttttcatgtaatttctacttagtaatttgtattatttaaaattttacatatctttggttctctaaactcaaagcactaaatttaaatttttgattacatatatctgaaagtaaattaaaaaaattaagaaaattttatttcaagtaagtattattaaaaatagaaaatactaaagctatatgtttttaaagacataaggtatcaaatgaatataagtcacaaaaagctaatctttgtcattaaactaacttgttttctaaatttgtagtacttaattacttttaatactactattactcaagctactccaatgattcatgtctcttacaccctttttaaccaaaaacactcacatcaatcatgctagtttgtcctcttccattgaaccaaaattaaaattggcccatttaattgtgtatgtttgcttatataatgcctctatagctcttctcttcctttttatctggcctcttatgtttacataatttaataattaatgtggtggcccctatagagacagctcttaaaaaaaaaaaaaaaaactaatcccattctataaaataatttcctcatctaaaataaaaatagctttttggtacttagcctcaacttatggttttaatttaaagctacaaaaaggaaaaaggcttattatttgattcttgttacaattctttcatcatatctatataaatatatatatatatatatatttatatagcctatatgcttggcatgtggagcttagggaaaactgatgatatcttcacaaatcaaaatgagaatattttttttaattatattatataaatatatatatacacatatatctaagtggggtctcaccatgttggaaacctttatattatctatatctaaaacagaactatgtataccctttccaaccttgatatcatacctggctataaaaaaattattcttttaagaaaaactttctagctgttaatttaattaattaatttagaagaaaaaaaaaatacattctctatatatacatacaacataaaatcatcaatcataataatgacttatatagtgacattacaaactagaatatatatatatatatagatatagtgtgacaccattatttgttcccctactaccaacttattaaatatatatagaaaagcatgcactattttatttttggtatgtatatatatagccatatgtaaatatatgttcttgttcatttaaactcatatttactatatttcatggattcgagtttgtgtaataatccaattcaaagtccttcagaggcacatccagagacattggattttctttccaatgcatggtgtaattttgcagtacaagctctccaacctcaaactcatgatgatgatgatcatgatcataataattatcattatcaacatgatcaactactcttgcccttggattatgatcatgaccaatcatcaatggctctggttgatcagaataatccaatggtcattaagaagattgataccaactctactactaataagagtagttccccatacatggttagagttcatgcatatatatagacactatatatatatttatttattgttaattcattttggattactattattaataatatgtatgatcatttaataattatatagagcacaaagatggatgagggtgacaccaagtctctaccaccatggaaatccaatgatgttaaggtacgtacctattaaaaatcttcacaattggaaaaattaatttatatagtttttacatctcttattcggtatttaggagagttttttaatctattttttttttataattacgtactttatagtcttttaagattatttgtaaacttttaaaaaattctaaatagtttataggtacgtgaataaagttaaagcagtaagaaaaaatagtcacgtgtgcgtgcaaaaaaatatttattcattattttcgattggcacagtaacttatactgaattttataaaaagttacatgtaattctaaacaactacaacgtgtacaataatgaaaaaaaaaataaattaaaaaactctactaaatatgtaaacagataaaatgtgtaccgaaaaagaattgtataaaattatcctatatgtacataacaaattagctaggtatttattttttaaagtttaaagctttattatgtacatttatttcgaactgtttggtcttaattaattattaatattttcacaataaattatcttgattatttattattctttctaatgataaagtttattatatatgataataattttttatattcagtcatggatatggatgcaacaagcaatgcatccagaattgaattacaatagctatttcaaaaaaagatgggtaagtaaaattattaattaacaagttacaacattattataaataataattattctaattgtaattattaatatataattaaatattattgtacgtactactatagatgtcatggaaggcagtgccattcaagaatgttatatcaataaaaaaatgggtgaaagagataaagcaacgtagaaaagaggaggacaggctacaaaaagccgaggtgcacgccgccatatcagtggctgggg

SEQ ID NO: 28577 - DNA, 913 bp, Cannabis sativa
  modified_base (886)..(887): a, c, t, g, unknown or other
tggctagcatacctactgaggaagtggatggccaagctacaaaaaaagtggccggccagcctgcacatgccatggtcagcctaattttttcgcaacatagatgttgcagcttctgactcgactccacctgcacctgcacacgattagattgactttctctgtattttgcatttataattttattttcatagacatattagtaccatgttatgtatggcctgctagccttttacttttgaacaatacttatttttggcctcagggctttcatgttctcactttttacctataagcaatttgttttcaaacatttttattctttagccctaaatccttttatcatgaatatgtgaacgaccagacagtctttaatcctggctatcttcttattaccttgacatataaatatccaaatttacttttctttatgcctcgctgaagtatgcctgcacttgacttagaggcaggtttagtagctcatactcttcattgtatggactaggtgccccaaattgatgacgtagacttacggtctcttcgtcacttgcaatttactgagtttcataaaccttgcatgggatttttcttgggctactacctgttttacgcatgtggaaccgaaaggaataactttaagaaactaatcttgttatcaagttgtttagatacaatatatatgaactgaaacattgtttttattcatcaattgatctttattgttgtgcagcttacatacattgaatctacaagcttataaaataaaaggtctaattctagaagtcaagtggctacccttaccatacatgccaagcagaggccatcgttgaagaattatgggagaccatgccgaaaggccatgggtactagtgttgggttttatgccctnnataaaactctttacaatctgattagt

SEQ ID NO: 28578 - DNA, 4923 bp, Cannabis sativa
gactctccgtctcacaatcacaaaactagattagttaattccatctagctcggttgcttgactgttagactattcgtcttggacaattacttttacaatattcacattatatatacttagataccatggaaaaacaaaaatagtatgtatacttcgtggggcattttattaaaataaaggggggtagtcaaaaggaaaacatagaactggagattacgttgtttggtttgactgtagagttctgagagagtccttaaccagctgtcttattcatatgttttatttacaactcaacctaataaagtaggaaatatccaaatacatttcaccctccaacaaacttcactacttgaaaacaaataaaactaattattttcttcttggttaataaaagaattttatcgaaataatggaactttttttaaaaaaaaaaataccaataatattggaaattttactttaagattggcttttataataaattaaaatgattaattggagtttggttgggaggaataaaaatataagaatgaaaatagaaatagaatagaatcaaatttaaaatgtataaaaaaaaaattaatgaaaatattattttctttctaaagcattagaattatcattcattttattttaaaatgtactaaaattagtttattttcatttcattacctccaacgctttaaaggtgattatgtaatacttttttaattaattttttgtttttttaattagaaaaattgaagtattttcaaatatgttctgtaaaagtgtttttaatttttaaaacgagaatcaaattattttctttaatttttcctctttcacaaaaaaataaaactaaattttaaatttaatttctttatttatatatataattgagtgaagaaagaatagagtgaggagaatagtgagaaacaagagagagaatgatggcttaacgatctcaacaagcaatctatgtttcttaatcttctgaattaaatttttacgttcactctagtttataaattttcacgttcactctagtttataaatttttagtccgttcagtttataaaattttctataaacttttgcaggatttggacctcatattcgacttacataaaaataaaaaataaaaataaaaataaaatttgtaaaatatattgttgttttttgttgttaaaattaaaaagtaaaaatagttacataataaatttttggcttttaaaattaaatattctattttcaccattgttacaatgatgatagaagtgatagacgagatctgtgatatatgttctatattagtttgatattacataatatttttgtaatgaaaagaaaataagttcataatatttatatcaatcttttaaaccattccatactgcataaaattaagtttgtcataaatataaaataagaaacactaaaaaaaaatcatgtttagcatcatttaaaagattattgtttctctacaggttgtgtactttaattggagaattgttctgttaaagtaagttctattattttgaacaaaatttttaattaataaatcttttgattttatccaaaaatatgttatattaatattattttatttaatgtaatatcttttacaaaatttgctaacatgtcattctgttactatttaatagttgtagtgtagcaatgctcatataatacttacactgttttttccttttggtacctcttttaatttattatttagctattatcaatatcaaatataatatttgacaaaaattgaccaaaatattcttatcgaatattaaaacaatactacagatttttttagggaacaatacttcagatttattctttggtacacatccaaaatatttgatatttagtatctcacttataaactaatatctgaaaatgggaatattttttattcgaatgatataatttgttgaatttaaaactgttttatgtttatgtttccagatttggactctacccaatcatttgattagaaggcaaattaccccaagcccataacaattacaagccttaaactttgccctttttggtccaaacccaatccacagagagtgaaacaattaaaaacgaatatataaacggctggtttccgtacaaaataccttttgcaacgaaaggtaattgacttgacggtgggatttgctgagctggctccaggctgtgccccctattaccctttccaccaatcaaaagcaattccggtcaattgtaatcaaaatagaaaaataggtcagtagctagatttttctctcaattttgtgtgttgtgtggttcacagttcacttttgcacaacagtaaaccaactgccagctgtatcctctctttcacaaatgtcactgtcatctcatcactcatcagtatgctcgaatcgggtcccacttcccaaaaaataattataatagaaaaagtattatatatatattatatagtgaagtgggctggtcccacctgcccccacacggacttgtacattgcctaatttaaccatggaccctattttatatggtccaccacgtggcctgttttcattagccatacattctttgctttggtttcggcaataattagtttccattcttttggtgaaaattaataagtttcgttttgtacgctttttaccaaacaaatatggtattaaacttgttcactcacagacttcaccaagttatcttttcgtattggatgattataaaacaaaaaaaaattaaatcaatcttgaattatattttaattatggatcacttcctttgcgtttaagttctgaaaaaccaataataaaattaaaagttttttctttaaaaataaaaaaagagattcctacttttttgtttgaacaagagaaaaaataattatccctcgctctatactagtctaacacgtgtgtaattaatcatatttgggtaatggtcattattccaagctattttaccctgtcatagctcaccacgtggcactatggaacgtttgtggtactataaaccaaattatgttaatgggtattgaattgatggtgataatcataaagctaatcaaaaaggttgatacacatttggcaggaaattgaaaaagtgcattatttgataaacaaatattttacataaagaaacactagagggaaaactaaaaactgggtcaaatggataattattattatttgtttttttatacctactacacagtactactgctgctaataataattttaaatatgagtttaatttttggggtttaatataattactccaccgacaggatatggagaggcatgtgggattggagtccactgcccaccaagctttggtttgagtaaaaagaagaaaagtgacaaaaacatgtgaagctggcagcccttattaagagttggttgtgcttcccaaataaaaatgtccaataaagaaaataagaaatatatattctacaaattcattttctttttttatattctgcgaaaatcatataaaattattaataatattatcattaatggtctactacagtgtcacaagtgagatagggagaaacattcattgctattgtgttatgtctatagggaatgaaggcaacaccaacatcaattattttataagaaacctttattcttataagaagaaaaaaaaaaatggggtaggcccattttgtcctaattttatttgagagatcatatcacattcttcttgagtgtgtgtgtatatatataatataaatataaaataacattattatattaacgttgttctcctttgtggagttgaaacattgtacgtgatttgattttgacgtgtcgaagatttatatacataaaactaatagttaaaaacaaatgatgtaagaacatgagagtaacgacgtatgtaatttcttctctctatactaagcgcacacagttcatatgaataggcatacaaaccaggttatatatgatatagatatttaatctttacttctttttttcattaacagatttaatctttacttgtgacctttttttcacttggacaaaaaattcccattaccttattttatttttatcaggacctggtcttctgacatttaaccttttatcattaattacctctttatatttgaaattttgtccacgttttgttatttataaaaacaacaacttcttgtttatcaaaaaaagaacaacaacatcaacagcttctttactccaactccatcttttaaaatacatcaccaaaattttaatttttttattgtacatcaaattacatctatatcatcttctttatatttttcctacattattaaaataatattaattttattctctacaccaactaaataataattttttaacatatatataatataaatatataaataaaaattatatagatgtatgtatattattaaaataaatttagagcatgaactatttattctttacctatagagtaaattgcattggtttaaatattagatttttaattgtgcttacattaacttttattagttttattgaaatttggattgattgaatagtttttttttttttttttttttagcccatattgttgaatatcagtagttaataagcttagccaagggcggacccacatgtaggcgagacggggcagtcgcctccttgataaaaaaaaaatgagaaaataatatatatgcaatttagttagttacaacatatatttgtaataaaaaataatatttataaacataatattagttttagtgtaatggttaaactacattacatatagggtagaggttaaatgttcaatttccataaaaagtgttgttttttccttttctaagtttactttggcccgatgccttacaaaaaaaattacgcctcgctcacttttaaatcttgggtacgtcactaggcttagcatttgtgtataaagtctaggtgaagcagaagtgtg

SEQ ID NO: 28579 - DNA, 2558 bp, Cannabis sativa
  modified_base (27)..(57): a, c, t, g, unknown or other
  modified_base (348)..(357): a, c, t, g, unknown or other
  modified_base (454)..(459): a, c, t, g, unknown or other
  modified_base (613)..(623): a, c, t, g, unknown or other
tatgatatataatccaattcaatatannnnnnnnnnnnnnnnnnnnnnnnnnnnnnncgttccaaacgagccctaagtgagttttttaatacgtgagaatcatatattttttcatcatttactgaaaaatgagcagaattaatataaaaaataactttttagtttctttttttatatgaataactaataaataatttggttttaaaccgaaacaaaaatcagtatatatcataggttactaaaaaaaatattttattatttgatatttaaaagataacgaattgtattctacaaaagtttattttatagaataattttaataaatactacaaaaaattttacttttannnnnnnnnnaacttgtgactaaaagtgaaaaaattgtgtctaattataaattattattcttatgttgtggctaaaagatccatgactaaaggtattagtcacaaannnnnnaatttgttgtgactaattaatgtatttttagtcacaatacttgttgtgattgaaactaaattagtggcaacttgtaactaaatactatgttttagtcacaagtaacattttgttgtgactaagtcacatttaatcacaaaaaaattatgttgtnnnnnnnnnnntgtcactaaaagtaacagtttttggtagtgaaatttctagaataactaagaaaatcacctattatcttaaaattcaatacaacacccaattaatagatttctctaacttttttgttataaataaaagttatcaaatgatatatttaaaacaaatctaattaacaaagctattttaatatattttaaaaaaaaaaaaacttataaaataaccaaaaatatttaaaatcgtaaaattaattacattataaaaactattatatcaatttattttactaataagttatatgcaaattaagtacctactcatgttttattgtactttatggttaaattttcaatttgatattgaaggtaaggaaaatgttatattacagataaaggtaaggtgtaaaagtatcttaaacaacaagacaatataatattatttgaaacaaagttctgtagtgtaactaatttaattttgtgatatatatatttaagatataatttagtttcttaaaaaaatttaaaaatatatataaaattacttgataatatagacttatttagatactatctaataacatttaaatataaaatagtaatctataaaattaatagtatactaaactttgtctaaatttaaaatttagttatcttttgttaataatttataaaagaaattcaaacgttatttttaattatagtcatcttttctagtgcccaaaaaataaatacctccaacatctttaaattactaaaaaataggtcacaatgatatcagcccaaacaagtaatagtgtggctaaaatttatttctaatgttaaggataatatataaatactttttcaaaagaaaaacaaaaaacaaatatatttagagagagaaatgtataatttttttttagaaattgaaatgaaaagtgacatacttatatatggtgggacagataatttaacaaaaaaaaaatgtaattgaaaatttcggtataattccattaatttgatctcagttatctatgtaattatatattattatcacatttacatatataattaaaaaatttccttattaaaaaaaatttcatcagttgattttgagtattttagtcttggactgtgtaacatgcatggttttgttttgtttcatttcgttgttggttcttctttattcttcgatggctcaccatcaaattgatgcttggttggaaataataagttttctacgactgaaggggttgttagtagtgtagttatagttgagtgctcaagctacgagtttgaataagcttgctgcaatagtttctactattacattttctgaacaatagatgaaactgaatataagtgttcttaagtataattgtgatgctgcaatctttttcatcttattttatttttagttttttatcgaacgatctcgaaattggtagttgattatttaattaactcatttttctaattttaattctggctgtatttctaatagggagatgtttcattggattgtatgctattatttaaactgattgctattaataaaattccatgatttattttgaaaaaaagaaaatccgtattaaaaattatacattttgtcctactaaaatatgtacatttctataaatgaaaactaagtcatcggctcgtttggtataagagattgtaattgcaccaaattaattattaataatgagaaggtattttttaatatgttggggtgttgtttgaagacgttatagctttattgtctaaattttcgggagcagttttatcccatggctcgcaattagttttctgcagttcatggtttggcaaaacatgctcttcggttagacgatgagctatcctgattcgaggattctaccgtcgtttgtggtttgctgctttgttaatcatgtatgactctgttcactgcgtctaaaaaaattattaattaggattaaattggattgg

SEQ ID NO: 28580 - DNA, 5137 bp, Cannabis sativa
atgtaaaaagtaaaatataaatactataatattataatattataatattataatccgatattttacggaatttcgaaatgataactaattaattagttaccttccaaattttgaaataattaaattaagttcaatttaaaattagttttctactataaataggaaaagagattccaaaacttataaataagctttccattagttccaaactatcggctaacctacctccttccatcaaaatttgctaatttctttcttctccacaaaaattttctctcactctctctaatgtctccattttcatcatgttcaaaggccataggatccttaatttctcgaagaaacagcataaggcatctggttaaattcggtgaaaaaagtggtccaatttcataccatcctaaccctactagtgttcaaggaatttttcagtttccaaccgacgcaaaaagtactttttgtagcagtggaagaagaaatttttttggttgtaacgatagtgttctatccaaaatttacgaggagaagcgcgttttagggtactcacccgaacaattatacaatgttgttgctgctgttgatttgtatcaagattttctcccatggtgtcaacgttctcaaatactcaaacaacatcctcataatgatgagaatgatgaatcttttgatgctgaattagaaataggctttaatttttttgttgaaagttatgtgtctcgtgtagaattaatcaagccaaaaagggtaaagacaacagctttagatactacactttttcaccacttgattaacatatgggaattcaatcctgggccagttcaaggatcttgtaatgtttactttttggtggattttaagtttcagtcaccactttatgggaaggtagcatctatgttctttaaggatgtggtttctaggttggttggttcattcaatgagcgatgtcgaataatatatggaccggctacccaagttcttgaataataagctgtactcatgctcaatggcggatctaactcaatatttttcttaactttcgcctttagtatgtaaattttctgagtccgtcgctgctgatgttgttttactaatttaattggagtcatttttagtccatttattttgaaatgtttggttctattttctgaaaatattgtttagtaattgcattgtatgtttttggattgatataagaattctgaaaaatgtctttcactttaagatcttagcttgtatgaaaataattataattaaacaacatcgtaattatacttaattttgaaattaacatgaacattattgcaactaagaatgatgtctttcaatacgagacctaaagacaaaacaagtcacactcgctcattagtctaacgaacaatacaatcaatttcaaaatagcaatctctcaagattgagattaattgatctaagatcaattaagtggcattgacttagaaaagatataatgataagtttatggtatctttatcattttcaatataggtacagtctgatttatagttgatacttgattatcatgtcagtgtaaatttagtgtactgataaatcgtaagactaaatagtgaatcatataactatgattaagtgtactgataaatcgtaagactaaatagtgaatcatataactatgattattttttactgtgttgacaacactataattatgagtaactatatattcgcgatttaatagaatttataaattaaacatataataatgaaagtaatatgtgaacccaataatataaaataatttattcggatcttttatttagtagcaaataagttttgagttctcaagtaatgggctaccagaaaacaaaatggtacttgttgatataggtagtcaatttaagtccttcaattgtgtagtctcattcctacacagcgtcagaatcatcatagttttcctttcccgtataatgtgggatgacacaacttatccatatttgtccttacggatcacaggactactgactatcacggatacctagttaccctatatatatatatattatttggatggttacccaatatatagggtgcttagttagccttatttaccttctattgggtacctggttatcttaattaggcgcacaccttttatattttgcatattatggtttcttttgaattttttaatacctagttaccttatttatttttcaaacgaaaactagctatacctaattcattgttaaaatagattgtatcttgttcccagctccagtcaccatcttttcaagttagccttttagtagaagaagaatatttctttgagtttggcctggtttaatattattataacatctcaggttccattgatgttaaaatgtttagatgtaattaactataaatgtttggaataatgtcacatgagcacaaactcaccagagaaacaacagctctcttttctgtgcttaaaacatagcaaaatacttcaatgcatggattcctttggtgaagggagtttttggaattgatatatatggacgaatatgatgatattttattatggatgttttccaattctacactcttgtatatatatttgtttttaaattacgattactcatgttgttagtaattctataatttccataaatccctaagcttatttcattttttaccatatattttaccattattttttccccatattattgcaaatgatatgttcaaaggctatatttatgagaaatccacaaacttaaaaacatgtagaattttgattatactaatgatatggaagaatctgatgatattttattattgatgtttgattagaattggagatttacaattttgatcaaacatggctaaggcgtttgatagcgttaattggtactatttggagagtcttatgatgcattttaattttcctattaaatttgtttctcttataatgaaatgtatgactactactagtttttcttttttaattaatggcattgttaaaggttctattaaaccttctgttagtcttagataggggatcctttatccccgtacctatttattctctgtgttgagggattatcctctctccttcgtgtccatcaagatgagggccttcttaaggggattgctatctctagaagggctccttccatctctcttcttttctttgctaatgatagtctcattttttgttctgctgataggaattcttgtccctctctcaggaaaatttttaatatttactctaaagcgtctggacaagtcattaacttttccaaatcctctattttgttttatcctaacacccctcaaagtcttagagatctctttttcagtacttttgatcttgaggatagacttttcattagcaagtatttggatcttttccagtgtctttctcgatctaagtatcactctttagctttccttagggatgaagttctttctgttctcacaaattggtctgccaagtggttttctaaggctggtaaagagactcttctcaaggttgtcattcaggctattcctacctatgtgaaggcttattttagactgcctgtcaagttatgcaaaggaattaaagcttcgatggctagattctggtagggttcttctgagaattctaagaaaattcactggatatcttgaaaaacagtttgtcaatctaaatttatgggaggattgggtttttgatctttaatacaatgtaatcaagctatgctagcaaagaagcttggagaatcttcaaaaaccctaactctttgcttagtcaggttcttaaagctagatacttttctaatttctctattgtggtggttgttcctggtcataacccctcttacgcctggagaagtatcctttggaggagagatttgatggcttctggtatcatttggaaagttggggatggggataacattatgactattgaggattattggcttcctaataaaaaatttgtttcttataaggataataattcccctgattcatgcaagctttcttattttattgatgactctggatcttgggatttgtctaaacttagaagccattttaatgattctctagttcatgatattcttcaggtgccggttactagtcttcatggaaaaatgatcatatttggtctagggagaaatctggtctttttagtgtcaaaattgcttctctcaacaagacatcccttcttcttcatcttttacaaactctaaaaaatgttggagtaagatttggaactcgaaggtaccttcaaaaatcaaacattttatctggaaagttgtgtctaatgctattcctgtagctttttccctttttgttaaacatgttattgattctcccatttgtcccatctgtaagcttagtcctgaaattgttcaccatgctttgctagagtgcaccagatcgaggaaagcttggaaatcttcaaggtttgtgaatcactactataattataaacaccttgatatcaatgagtttttaatgtgtgttttagatgttttgaataaggactatgttagtattttatactattttttgtgggctctttagaatcaaatgaataatgatctttacaatcatagcattattctagctactgatgtctttgattggtgtgttagttatttcttcaaatatttggatgcacaacaacacaatcactacataagtaaatctgctcctatgcacaccaggtttttggtagcttcttctgagggtactttttcaggtttttactgatgctgccattgatcatcacaataggaaacatagcattgctattgttgttttgtatgagttagacagggttaaagctgggatatccaagccttgtgttagcagtgttcctgctgtaatggccgaagcaaaagcaattcttcatgttgttcagtggattcaaatgcttcaccttcatgtagatgtgttaaaaactgactgtaaaactattgtagataaactcaattcttgtaattgaaaatttggaatggtagtccacaggatgacattttacttagtatcaaaatcttgttatctttcattcatagtctaaaggcccgtttggcacagcttttgaaaaagctaaaagctatttttcaaaaaagctgtgacaaaaaggtgtttggtaaatagttaaaaaacagcttattgaaga

SEQ ID NO: 28581 - DNA, 2841 bp, Cannabis sativa
  modified_base (1779)..(1782): a, c, t, g, unknown or other
ctctctctctctctctctcaccaactataggctggccaacacccaaagttgtccaacactgtaggctgtccaacacttgagatctgccaactgattcatacttcgtaattctaaggggtgctataacagatcccatctatagtgatatggatagtatttcccttggtataaatacaatcaaaaagggagtaggtcattacccgctatcataagggggccaaacctctataacaaatccttgtgtttattgcatttttattctatttttgtaacacgtggcaagcatcagatctatacgacccaactagcagttgttcatttttttaaggtcaacatctaatttcttgatctctaccaggcactagcttgttgggcagtagtcagttcattcaataactttttatccttattaatctcgcccttaagtacttttttttttctttaatcttgttccatttctatagagctctaccacaagcagcaaccttattttgaagcctatagctgaccaatctcagtcttatgcttctaatggttctcaataatctttttacattcttcatcttcacaccacgcctcttcaaaaggaaatatactttatctcttaacttggccacatttatcttctgaatcttgcactggaatatccaccataagagctctatgatctgattccaaccaatgtaaaatcttaacatctaccctcgcaaaaagtctcctccaatcctcattacagagagctctatcaagcctctttatgatcccatttgacccatgtccatacaccaagtaagctctgttttacaggagaaaaaattaataaaagcacaatcatctaacaccttcctgaaatcaccaatagccccttgggccctttccttgccgcctacttttttagctaaccccgcaatcttgttaaattccccagtgcacaaccacagaccatgaatctcctcattagttagtgcaaaaaatcccaagaaaatttgcatttagatgttttaagattctcataaaaccaatgaacttctgttgacgctaaaaagtggccaatacttgctcgctaaattgacgagataaaataagagatgagtagaggaaatagagagacacaaagaatttatagtagttcactccccttgtcgcaatggtaatggagctacgcctacttcaagtttttatttctcacgagaattataaaagaattgactaagtgtgaaagctctaaatttctagagagagaaactagagatagagatgatctaaccttattggggcacttttctgaatgtgaaaaatgaggtagaggagctctcattttatagggaaggaggtcctattcaaataataataaaatattcaaaaaaatgtgaaaaaaatacaattaagctatttttttaccgttgatgatgatctaatggtgaaattgactttgaaggtcggttgtcaatttttggagcttgaatcacgttcacgagacctttttcgggtatgttgtagttaaaatcctaactcccttgaggaaaatatttggacgtgatatcttgagaatagagattggagtgtgagacatgacttaacatagcattgaaatagcttcaaaatgcaagttgaatcatgataatcatatcaattttattaaaggctactctgatgtcggtgcccaggttgataactcagcaccatggttgacatccaaagcctaggttgacatatgacgtcaacctagatgctgggtgagggaataaacatgatggggatgtattttttgatgcctannnnatattttgacatcacttagttaatttctttgttttggtgaagttgctcaccagttctcagagatgttgctattttttgaaattaggatactcgaaattatccaatttgcgactaagtcacttagccaaaaaagtaaaattatgaagttgtgcatttgacttgtctgagttcatagctcacatttactatgaaaactagacgattgctcaatacagaatcaaaatcgaataagcacagcctaacacactaggtcatacgtcaacttgggcgttggatgctcttttcaaagcttcttggatgttgtgttgatgcttctagggtcctagaaattgaggacgaggtctcttactcaatttttgaccatgcccaagagaatgcctagagcaaaatttgcattcgagtgacaaaaaccagcgcaccaggttgattatcaacctgggcactaatcccaacaccaggtcaacctgggcacttggtttagttcctagccccttaggattctcgttttctccttatgtagtatttttgctttgttgagttacaggtgaatttcgacaagttggcgcagtatagtcacaaacagacattttaacttgaactagatttggggtccaaaattatgaataatgcgttatggcaacaatatatgatatatgtatttatttggagttatatgtgtgattgaaataacttatatacccttagatgctaaatatgttgattttaagccttaaggcaagatggtcatttgaccactaaattattatatcaaagccttattatgaatttaaagtaataaacaccaactttttgctttcaacaacccaccatcaaacctttctctctttctttatgaaaaatttctacacttttatattcacgaggattgaagctaaattaagggcgggtatgtgattgttggattaagttgaagaaggcaattgaggtattaatttcatccttatctagtgttaatttttgaaaattttattctagggtttgaacttgtgtaatgttcttgaattggttttaaggtgattatgttggaaattattttac

SEQ ID NO: 28582 - DNA, 2281 bp, Cannabis sativa
  modified_base (38)..(48): a, c, t, g, unknown or other
tgtgcacgaggcacacggtcgcgcgaaaaatgagcccnnnnnnnnnnngatggttggaaggctgaccttggcttagagaagttaaggtgttgcacgggtgttccgttgcctgaaaaggtgagccagtgacgccaagtagagtatatattatgcctacaaatttcaaaaaatgagaagggtcactcttattcataaggatattagcgtttaaattactcaaactacacatttaattacacttaatctcacaaatttaattttgggatttttttttcatttttatacttcaaaataattttttatatatatttttacggaattctacaaagaaatctctatttcaactaacggaacaaacgaaatcgcaaccaaaatccgtatagaaacccacatcgaaactaccggagaaaccaccttagaaacccaaacagtaaatttaaaaaaaaaaagttaaaaaatttgtatatggggtaatttcgctttaattttttatggtaaaactttcttaactccattatgttttgctcttcattattctgttacctctcttccatctgattgtcacatcatcctacgtggcatcccaaatatgtatccatgtcagctgttaggggtcacgtagatggtgacatgtacaaaagcatacacgtaataaacttttagtagtacacataatattaattatttaaatattaaaaaaatttatgaataagaaaaataattaaaattataaataataataaatttaaaaattattataaatttagacaaatatgagtaataaactttgtattcgtttctgctctcacttcccttttcattctttaccagttacactgacacatatatatatagatgaatacatacatgtataatatacataatcaatatacttgctactgctacaagttgaatactattactattatttagagaatactacctattctatacgttatgatcattcataacactccctcttagtatactctacattttgtttataattaatactgtctcgttgaaaaaaccttattaggtaaaacttaatggatatagtaagaaaaaaaaaagagtacagttgaataagctcccccttacaatgacattgcgagttactttttataaattttgtagatgacccattctaataccatgtctcaacttttttaaaattatagtaagaagtgactttgtaaaaagatttgatagattctcactggatctggatatgatgtgaaacaaagacctagaagtttctaacatagaataagctggttcattaaccgatcctgaggagtatatatagggcattggtccctttgcatgagcgtgtttggttgtttcgaaagtaattgtctcataattcatacggtgaatataaagtgtgaagtttaataagtgctccaaagagttgtgtatatatttaagtgtgagtgctaagtattagtaaaataaaaagtaatttcttagtgtgtattatggtctagtctttagtgtgtattgtggtctagtattgtatttaagttggtttatttatttttgcaataaagtaattatgtttttttttataaaagtaattatgttttaaaagggttgtgttatctaattaaataaattaaatattataaaatctgaattaacatataaatactaattatatttgttacttttatcattttagagttaatatatgctattattgtagtggaattcagtatatggtaatgattttaagttttatcgttcaagtttggcaattcaaatcttagaacaataaaatcattttaagttaaaaactaaagatatgactgttatagaaaataattttgttcttatctaataattgtagtggtaattaacaagtggcaagtagtttttttaaacctgtgggttgaaccttgttttattttcataactgtagattcaatgtatttataatcataaattttaaatagaccatgtatatatgattttttttttttcataaaataaaataaatttcttctgtgaaataaaaattgggttttgaagaattattttagctcaaatgaattatgttggcctaatatattactaaacaatttattagcattttcaaatatgagcggtcatataaaaagtttcaatttatataatagaattatatattaaataaaaaaatattaaagattatgtatatgcagtgacggacccagaaattttactttgtgggggttatttattattaaaaaatatttatacatatattataattactcttactaaatttatttaattt

SEQ ID NO: 28583 - DNA, 2088 bp, Cannabis sativa
  modified_base (2050)..(2052): a, c, t, g, unknown or other
gtccagatgggtgacgtgtgtcttgtcaatgttgatccgacgcgacttgatcgaaggtctttggtgactggggcattaaatatctcttaaaaattgtacctcaagtcacacattgacagttgagtgacactgcatgtatggcgtctgtacttttgcaatgagtaccaacgttcatttttgggaggaaaacccaaatatttgaaattttaaatgaattaattgcctctttaagatacctataaaaggggattaataccttcaaggaattattttagccattttcatctttagagaacgagagcagaaatttcttcgtgttttactcttaaatcttcgaagagaatttgttgggaagtctattgttgatatcctctgagcaaatctagaaggcttcgaatagtgagtaagttgttttttccttaactttatgcaatatttattgaacatacacttattttttggatttcttgttgcaaaattatatgttattgaattgttcttagaatagaagacattagggctggtaattttgactaacattcgtttagaccttctgattctctaattgtgtatcatttttgacccaaaatcattcattttcacccattcgtgggattctaaagatttctaaatatcttttgaggttttaaacttctgggtttaagaacttcattttagaatgaaatcccttctttttgtctttaattgacctggtcatcgtggtcgacatattaaacctgtttttcaactttccatctgtccaactctcatcttcttgtctctcatctttttgtagatgaaccatggtgattttcggggaggcaaagaccatatcaaccaagatctaccctaacttttgtacgaagattaccctcagctctgtgcaaattcatattcatctcgtgacaatctttcaaactctagctttgaggactgggaagtgagtagtgaacatacagactcttcaaagcccgaggtgcagcatcaccagtaccccaaccaaatacatggagaagggtatgggcattttatctgggaattaaagaaaggtttgaactgttatcttcctacatcctgtacgtacaaggtccagtctggggttactgagacattacctgaagcctgactaactctgtctgctaagggagatgttgtagctgactttgttgtgactattgcaaaacataccaatgaatcaaagcctccgcccaaatgtagaatgatggagcaaacaaagtagaccatgaggaaggcttcataaactgacccacactatgtgcggctgtttgctattgcaggaatggagaaagctagacctctgaccgaggaaggataaatttttgagggggacattgaggtccaagaagtggaggaccggggcgaggcctgtcctgccacccctcccgaggctaagggagaaggaggagaggaagaaaaggaagtttaggtacttccttttagtgatttcaatgaggacggagaatccgtctctgaggacgatgaagtcctggtggctggtcaggattatgttgaagaggaatacactgaggcctgacctataaacaatcatggtctgaaaggtgctctgggggtctcaccaccatctgtcttgacttttaagagattgtcatgttagtttttatggcccatatcagagttataaacgtggaagcagaatttgataaaaataatttttatctaatatgaaccataagcctaagaatctcaacataatatatatagattaaatctaaactactgaaagaaatatcatacctcttgaagcctatcaggatatccttgtttcttttagtacaattaacgatcatccaatctaagagcttcaattgaagaattcacacattgatcttccaagccaaactcaacactcaggaatagagtgggctattaagtcttatttggataaacaaatttaggtattacagtgtgtactcaactcatgagatactgtaattgagacatagttgtttaatctcgcacacgcctaaaagggtgtgggattgtgagactaagagagagagagagagannnagagagagagagagagatatacagagattttatacg

SEQ ID NO: 28584 - DNA, 1520 bp, Cannabis sativa
atatatgtttgtttatcttttttatagccaacgatagtgagtaattaaagtaatgaaatcggataatcagtcactaataataataataataataataataatagagcaatatataagaatccaagaaatttataaaagttgagtcacgtaataatagtaataatctactctcctttttgttatattactttgagaataattagaattacaatgtacaatgatcaagtgagtttcttgatattctcgagaaaacttacaagtatttcaacagcataatagctctttggaagtttgaaaaaagcatcccctcacaatagaatgactccactatttatagggaaaacacaagagataatgtctcatgaaaatcagagaacaatttgggaaactcaatatcatatcccatgactctcacaataaactaaatctcataaaaatagggattcgaattaagatataattaaggggatatttaaagaaaatatctagaaaatctttatttatcgcgtcccttcaattattctttatgcagttataacgagcaaactcaagagcatggtgaagaggaaggtgggagactcttccggttaggggtcccctacaaacctgtcaaggcaggaagacactcctcctctaatcgcctcagacacaacatccgaaattccccagtcgaggcttgaaatatcaccatcagactcgactcttgaggtgggagaagttacagatttaaaggaaccaaactccctatttgtggagcgtacccaagccaagaagtcttcaaagggttgtccctaattgctccatcgaagcctaccaaatcatctagggacacttctggtgttgatattattaacattaagaggcttaattttcttaagcctgcttcttgggttcaccttggaaaattaacacaactacaatcataatgatgcctgagacaaaaaaggctaaggaggtgctcggtatctattaagaccgtgtaatggtcgaggtgaacgagtagttgacaagacatgaagacctgacacttgaacttctggtcggtggcctactaaaggagcttaccagtgtgagttttgtatctttcaatttaatgcacgatatatgacgttcaatctatttaacttggatcatttttcatttttcataccaacttgaagctcagctatgtttattcatgaggaaaatctgcatctctccagaccggttcttccaccaataagctaaagaaagctttgaaagaggccaaggatgaagccaagcagaaatgtacttaacttggtgaggtgaataaaaagctcactaccgtagacaacacgatcaaggagttaaagcaatagttggccgacatgacgaccactaccaagttggaagaagacctggaactggagtcaaaaagggtctgagaacttacagatttgtaagaatgctttcggactgtccttcaaaatcaagagaccaaaataaagcatctcattgaagatcttaaggaaaaaaggaatcccattaaaaggagaagt

SEQ ID NO: 28585 - DNA, 1655 bp, Cannabis sativa
atatgtaaactatagttaggatatccaaatatacaaaatataaaatatttggggtctttccaaattatgttactccacaccctaacttaagactaagaggaacaaatttttcactgaaaattcaatttaaaaaaataaaatataaaattctaactaaattatgagtcactctattaccagaatgataaacaaataaaaaaaaaatctaaccaaactatcaaacaagtgtctataatcattattattattcgcgtgagagtaaaaaaaataataagaatgaaaattatacatgatggggattccgagaattgaactcgggacctttcgctccctaagcgagcatcctaccactggactaaatcccctattttaatcttcttacacacctcaaatattatgaaccattgtcaaaaccaaattgaaataattcatgaagctagctataactagggaccacatatgatattgaaaattaattcttttgttttgttgttattgttagggtttttgtgtggattttttttttcaaaaccctagcagctaactaactgtttgtcgtactgattttgtactcattcttgaagagaacataatcaaaaaacaatatatatgtgtactcattttgtaatttcttaatttgagtgagtgaataagtgagtgagaggaatatatatatatatcatgtatatatatatatatatatattatgaaagaggttataggcgtgtagcagaggttgagagattaagagaatatatatatatttaattatagaaaaattaagcaaagaagtcaaatagaggtttgactttgaaaccctaaagtcattgccgtgttttaggtatacgtagcatatatatatatttatatatataacacttttttgatgttgtcacataatttgacctctatggatttatagatatatattttgtatatgtaacatagttggtaatgccaagccaattttactctctctttaatttatatatatttaacaaaacttcattctatatataatgattattattattattattaagggatcgatgtagtatatattaaaaccctagtttaacaaattaaaacttcatatgattcttatttgtgcataatattgaagataatgtaagtcaaacattataaaaatattatatttattattatatatataatatattaaagggttttaaaaattgaacccaaatcatcaaatcaaaatttggatagtgggtaataactaatggggacaactctttcggacataaatttcaaaacaaaggaagaaaaaacataatacataaataatataatattatatatcttggttttctttttttaatatatcaaacagatttcaaattatcttgattttttttgttaatgatatatttatacatatatatatggaacacttcttaatgggttttacccgtaaatgggtactgaaaaaattaatgaaatggtaatttaatgacttagtatagcaggttaccaacaagttaattttttttattaagtttaaatttatttttttaaaataacaaaactaatgattacaaccaatagtagtttaaagaattagaagttatttttagaaagggaaattttatttacaccccaaaaagttctaaagacaccccattttgataatt

SEQ ID NO: 28586 - DNA, 3590 bp, Cannabis sativa
actgtagcgtgccttagcattagggcgttacagtggctctaccaacactatatcaagataagagttgatacaaggttaaaatggtaatttggcaattcttaaaaaaattgttcttcgagacaaaaatacaattatatgataatttgagttgaataattaattatgtaatttcaaaattatatttaattaattaaatataattttttgcaaatttaatagtaaaagaaattaattttatgaaatagttattttatttatgtgagagaaaataaatgaaaaaagtcaaaaattattcttgatttatttatttaaaggtaatgataataatgaagatcttttataattttgaaaaatagcgttcattaataaaatagaaatttagatctcatatttattacaaataatattagctggaatagttggcactgtaactatattagttaagttttaaacataaaactattatgaattaaaattacaaaatctaagataaaggcaaaattacaactcaaaaaatacctaaaaagtattacaattctgtataattatcaatgatccaagcagaatcgactccttacaaaatcttgacaactgtctcagaatctttctcaatgataataatgatgatcatcaatttgattttgaatttaaaatttaaattgaaacattgactctgttggttaaagcatatactaaatttaaaatattataaaaaataattagaatttttgtctcacaactttttatactacaagttgtgcccatgtggtatacgacttgttaataataccctttaaaatataacttttacaacaatagaaccctttcattactttttatttaattttatcatcaaataagtggagttataaatagtagttgataaatgaatacaaattaagtacattttattttattttttcactttaataattaaaaataaaaatatgaattattataaaaaaagaaaaaaaaaaatcttgtcttttatcattcattaacataaaaaaaaaaaaaaaagtacaaatcagttaatttacatccttttatcaactatatcaactagtattcacttcactcattttaccataaattaaataaaatataataaaaaaacctacattactgtaaaagtttataaaaaaagaaagtcttttcatttattattcattaacaaaaaagaaaaaaaaatagttaacttgcatctatttatcaactactatctacttcactcaaaaatattattaacaagccgtataccacaagaagtacacctaaatagtttaaaagttcaaaaagcaaaaatgttaattattcttttaaaaaagatcatttccaccaaaaaaatgattgcaagctatacaaatttattagaaggcaactgaactgtttatatttatctggtgttctttgattgcgactatagatgacaacaataatgaatattttgcttcttagacaaatttaattaggccataatacaattaaccccatgataaaaattaagataatggttatcttgtcttcaaattcagcttcatctgacatgtttaaataagtgacaaaaaacgtagactcattttcttgatcaggccatggtcagatttcttaatgttagtaatcagccgttggtactctgccaaagaagagtcacttaacggttccaaaaactcacatccggccaagatattaggcggtggtactccggcaataaggttggtgtcaagttttggcttaccatttttaagctctttaggcacttcaagacaagtactttcgagcgctgatggaaatgcgccggggattacttcttgcttaaacggaatcgctctgctagcttgcaagcaaaattctatccactgatgtatgagaggagatggccctcgaatccttcccccaattcgatttgtttcgagcctagatgcagcagggatggccttgaaaaaaataatacataatgtcacaaatcaataaaaatataaatttcacaataaaatggttttaagttattaatttgtattcagaaagttcgctgtgacttgggagatttactctggttccttaataggaatacatgacttgcagaaagctctatctctaataatctttcaaaagcataatgttagacaaatttcttctttttttcttttcaactacaattctcgcctaaccctacaatatttggggactgggaaactatagcaattgctaccgctcttgggtattagatgaatttcaaattattcagccaaattctatgccacctcttcttctggcaagtgttttcacctaacgtaagttggttactttcaaattctctttttgaaaagaattggttatgtatttgaaagtacagaataaagaagttgatgtgagtacttggatcttagagaagagtacctacaaatatgtatacataactggagtagctatagacaggggtgtgtgattgtttgtaaaatgaagagttttctcttgtggagtttctcaggtgactcgaagacttggatattcattgtatttcctatttttgatagaataaataagatttttatcacttgaactattgccactacttgactgtgttcatgaatctttcacgttattttaaattcaccttaaactattaccactgtcaaattatacctctatgtccaaaagagttacttgacatgctaaaaatttgacatgtaactatttcgcccactctaaagtatcgtcattacagaggtgtgccccctaaattatttgactcttagagaggcacgttttggtagttgtagtgttcagagaaatctgaaacacacgatcagatagtgtttatagttcaagggacaaaaatcctgtttgccttttgatatcattaacagtacacacattgattcaatatcaataacatcttatgactaccacaaggatatgggattggtgtctgaatgaatttcagatccattggtgcagccaaagtgttgtgaagagcttttagttcaaggtttttagaagcaaaaaagcatttttggagaacagggatggcggaagtgtggtgagcaatatgggtgaaaaggaatgaaggaccgtttgagattaaaaataatgtaaaagagacttgggacagagcgaatattgggtagccattcagctcttcaattagagaatttaataatgactgttaggaatttccacatcaaatctctcaaaagaagatgaatcttcaatcaaaatctaaaagtacttctcttattgtttataaaaatctgaaattacaaataaagttccaaactttcaagagatttcgatctctcccaactagagtttctgctctcccaaactctaagcaaaacctccatatatgaaagatatcaatgttttaaaaggcgtttgaggcgtatgcctcgaggcgcgcctcggaacgaggctttcaaaaaacgcctctgaggcttagcctcaatcactgtccatgaggcttacgcttcggccttgtgaggcgtacgccttgaggcttaagcctctagggcgtgtgaagcttacgcctcagctaatttagttgttttaggccttttaatgagtttcattgggctttttttaaggga

SEQ ID NO: 28587 - DNA, 1428 bp, Cannabis sativa
gatcaaacgagagggaaagagagaaatgggaggctgaattttttgggtttgagaagagggcattttggggttaccattaaaagattagcatagttacaaaatttttaggaagatagtataattaaacaccattagtcatttttaagcataaaatgtaaaatttccccttataattttctatccattttaattattagagtattatttaatacaataccatatgttttgtattgacttgtattaatagattatgtaaagttataatatattttcaataaactcgactcttgcaccgactacgagttgggtttggatctgggtatggatctcgggttcgtgtcccgagtccagcacctggtctcgaatcctaagttcggcacccagttttgggtctgggttcgagtctcaggtttaggtctaggtatgggtctcgagtccaagttcaggttctgagtctaggtctaggcccttgtcctgggtgctggtcggggtctcgggtccgggtctaggtctaggttcaagtttgggttcggttttgaatcccgagtctgggtctgcatccgagttcgggttcgggtccgggactccgggtcccgagtcttaagtcccaagtacaagttcagatctgtgtctgggtccgagtccaagtccgggtctaggttcggatcctgggttcgggtttggatcccaagtctaggtcttgggtcgtgcgtccagtcccgggtccatgtctgggtcccaatccttgtcccgggtctgggtcctagttccagggtctcaggtcctgggtcttaggtcttggtccgggtcttgagtctcagtctgggtcccgggtcttgggtcccgatcctaatatgggtcccagtctaggtctgagtcccaggtcgagtttgggtctgagtttaggtctggtctcgggtcacaggttttagtttggatcccaggagggtttggtccaggtccgggtccggttccaggtgccgggggatctgagtctggattcgaggtatgagtcttgaattaagtttttttaatatattgaaaccgaatcggatcagatccgatctagaaaaaaattaggtggggcggagcagatctgatccgagatccaataagtatctaaatattttctattagaagtgatctgtcggatcggagctccgacccgctccaactaaatggatctttttgacatccttattgggcactagtggtgcctagcaccttttagacatgttgccttgggaatggttagtgatactctctaaaagttattacattaaattatataggacccgatacttagttagaccaatagcgatattgacacgtaggaaagtgctaagtgtaacatgcgtgccaagatagcacattacaagctagatgatgtccacaagttggccaagtggtggtcaagtggtggcgcat

SEQ ID NO: 28588 - DNA, 1799 bp, Cannabis sativa
  modified_base (533)..(533): a, c, t, g, unknown or other
gcaaattgattttttttttcttctgaaccgacaccaacaaataaaataatagtttcctcaaaaaaaaaaaaaacaaataaaaaaatagtaaaaaaattgaaccagaaatctaacttgggcagccgatagatttatcaaaaatctaaaaatctagaactaacaaaaaaaaacataaactaatttatacaaaaatatacacaaatccatatatctaaccaaaaaaaaactaaatttatacaaaaatatacacaaattaatcttgatctaacaaaaaactaaatttacacaaaaaatttacaccaaattagctgggtggcggtgggtctcagttggcctgtgaagagcttaatgagagagaggtgacatagagagaagagaaattgacgagaaagatagggttaaggattacttatcaacagtggctctcagggtatctcgatgggcgactagcgacggtcaggtgatgagctgtctccgagggggctagtggttgggcggcggaatgcaattacttagagagagagagagagagngagagagagagagagagaggagcggtagctgattagggttgaaaaattataatgttaggttttatattagatgtaggttttttttttctaaattgggtggaagcccatatctatttttaacgttttttttaaataaggttttttgcgtcattggcacaaataacattagcatcaatgcacaactgacacaaattaatttttttgagaaacaacactaaacgtacgttggtgcaaagccgacgtatattatttcacccattaattaatttcattggttatataattatagtgacgccatataaccgatgtaaataccaatttttgttgtagtgacaagaaacaaactcttcgataggggtctggtctgggttatatagttttttttaaaaaaatatatgtatatatataaagttctaattttgggttcgtggggtttgacaacgatagggggttggtcttggttcgtggggctttgacgacgacaaggggctgatcttggtttgtgggtttgacgacgagagggggcattgctagatggttcatggggtttggtgaaatggtaagctgctatagctaattaggtctaaggggaattgatggaggtaaatgaatattttattggtcttatacttgacggtttaaaattatctaatatagtattgctgacggattatattaaaattgccgcctatttcgttaactagtgagtactactgggaatatctaattttttttttatgatttttaacagttgcttattttttttttagcgataatctccaaaaaaaaattaattttgcagccttcgcgatttttttttttttttttgttaaataagacatttattgaaggaaaacaaactagaacaaagtcattgctacagagggggcaatgtccctaagcacatcttgagaacaggactttgagcctcttgcccaatctgctaaggcatcagccactaatcgattaaatttataaaaatctttctttaatggaaatagcccaaatataaaatataaatatattatttatatgatataaaattataaagatattgatgcatagattatagaattttaataaagtagaaaaagtagtgggagtgttctagatctaaagatactcatttttaacaaatgattgagaatagaaaattatgggaaaacaaaatgttattgatgacaaaatttattggtctcagctttctttattattattattacattattgattagactttggtgatagataatagagatgatgata

SEQ ID NO: 28589 - DNA, 5449 bp, Cannabis sativa
ttatttctaaatataatctttcattggaaaagaaatgggagaatttgactgaaatcacaggacagaccttttatttatttctctaaaataagatataaacttagtttttcaaataattttttttacgttaataataataaagttattaatagctgcacttaaatattcaataaagttttttgatataatactaaaatttaatttatttttttgtaggtaattctttttattaatattagtatattacactaatctaacgaatttaatagagaaatgtttctataataaaaatagtttggtcttgaatattctttgttttccaaaattaatctggtagatacatttgattcagaaaaatatgtgagtaaattgtcttcttttttttatgtttccacaaattaaattcaatttgtgtatcttctattatctatgtgttagtaaaagttaaaatatttttgccatagaaaaactgattttgtattttaagtgcttttattagcaaagatcttatattattactataaatatataataaatttgatatttttaccacatataataatactttatataataagaacattaataaacataaatatagattatttagcatatctttaataaaaattatattactattagtgaaaaatatttatgttttcatcaattttacagtgccaaatatatcatttatgctaaatttagagaatttaatactacaaaaaaaaagtattttagagaatttaattgaaatcacatgacaaaccccaattcttttttcctaaaaataaaaatatatatatatttttaaatactaataaaagaaaagaaaagaaacagctatagaaggagtgaatgagtgagaatcatgtgacgagccaagccagtccatactccatgtctgtgtctattaatcaaaatcaaaagccataaactttgtgtaaatcgcaagaaatcccctttttgtttcagtttttgggtctgagactgagacagtgtctatttcttggtttggtttccatggcttctactgcttcaaggttcatcaaatgtgtaacagtaggagatggagccgtagggaagacctgcatgcttatttgctacacaagtaacaaattccccactgtatgttctttcttcttcataaagatccatctgggtctctctgttttgacttcttttttttttgctttattgtattttattttactggtacgcatctgggtttttgcagctttttcgtgttttccaagattttactactcttttttctctctctttctctccacccaaatgggttcctttcatgagtttttgggttatatcatttgttccctgcagtaccttaaatcaccttagcttcatctgattttgtttaaactatagtgtttcttttgcttcttcttcttttaataaagcataaacagggaaactcgttttcattgccaattgctgttcttatattcatgttgttgacttgttcaatcccatatcgttgacttaatctgtttttgtaggattatatacccactgtgtttgataacttcagtgctaatgtagtagttgaagccaccactgtaaacttaggcctctgggatacagctggtacagtatgcttaccttctatgactaaatattctagtaatcttatatgaattaaaagctataactaactatgccttaaaagtttccatattatcatgtttggcttatgataagttggaaaacgttttgctgttttgattttatgtccccttttttgtttgtttcacaggacaagaggattacaatcggttaaggccattgagctataggggagcagatgtctttgtcttagctttctcattagttagtcgtgctagctatgagaatgtactgaagaaggtgagtttttacttgtgaaattcatgtttttagtatgttttattttaggttttgctctttgtaaatatgcttattgatggtgtttaaaatcattctctttgttagtggatccctgaacttcagcacttctcacctggagtccctgtggtacttgtcggaacgaaattaggtgagcaaagaagctttaagcaatataagttttcatggcagtgccaataaaccaatctttttcctatgaatttgttttctcaaataataggtttgatgctaaatcttgcaaccagttccttgagtaggttaatgcatactagtttcgaaactttttgaatctgtttagaagaatgaactctggtttgaatgcctcaaatccaaactgtcaccatttcctttctaaaatgaacctattatatataatctgaatgttaaggttgaaaagaagaaaatgaaaaacaaaaaggtttgggaaaggtcaagcacaccatcaagcaaatcctttactttagtgcatgttcttcttactatgttaaaagcccaaatcctgtcagtgcaggatatccaaaccagaaattgtctccactagtttgtcctcacaagtttgaaattgtctcctattagttatttgctctcatgcttaaaaattgacccaataagatatggttagtcttaggtttgatatgggaacacagtactctcattttctctttctttcatgaaacagatctccgagaggataagcactatttgtcagaccatccaggattggtgcctgtgactactgcacaagtgtgatttctattctcagaagtttgttattttctctagcatagttggatttgctcactttatttacaaaactggttttctcattgtttttttcctagggtgaggagctgcggaagcagataggggccgcatattacatagaatgtagctcaaaaactcagcaggtatgtgtgtgttgcttttagtcgtaaaaaaattacttgttcccatggttgcaaactaaccctttttaatattattgcatcacatacgttgaattaattttgcaaagttttatagaagttgattacagaaatgatagaatttcctttaaatagcacagcaattggttccattcagtgcatgaatttccatgttaattttaaatcagtaggaattttcatcacaatgtgggagaatagacacttttactgcgaaagcaattcggaacaacttaatccgtggtatattttgagataataaacatttataattatatacaaattgaaccaaaataggaaataaaccaatcagtaatcaacgataaagaataacattctttccatttaagaaataaacttaattgatgatgaatagcatatttatgatcacacacacctacaaacatattcacttttccgtataaacataatagccttccccctctctctctcccccttctctctgtgatggaatttccttttttccttactttttggatcttaattttgtaaatgacccatgtgaatgcaattgcagaacgtgaaagccgtttttgatgcagcaatcagagttgtcataaagccaccacaaaagcagaaagagaagaagaaaaagcaacgtagaggatgcctaatgtatgtattttctttcttctacattctgttgtttagttatacaagatcgtttgtatacgtgtattatgattatcaaagtagattaattagtagcatgatctatctattttagaattttgctttggttttgttttgctgagtgtaatactatcccattgtgttggaatgcagaaatatactatgtgggaggaaattcgtttgtctcaaatgaaagatgtagagcacgtgcatgtatcatcatcacagctcttgcttgctaaaacgtgacttttatcgtccatgaccaacccacctttcatttttattctattatttttaagctcatatcaagaaaaacagaactttggaaaaattagtatatttttgtagacactaacttataatttgcatatactatatactagtccactgtaaagaatgaggctaaaagccctctgtcctctcattgaagttaatttcagcttattgagcacaacaaagagggagctcgtacctattgcaaatgaaaataagtatataattcatctacaattagaacatacacagatgacacagactagattatcattagcacattactatactattcgccatttggcctcctattaaaccaaggcaagaacctattccttgtgttgccaaaaaaaaactccctcaaagacacaactttacaagttatcatcctacaagcacaagtgatatttaaactttcataatttgacaagacgtttttatatgatgataatacaatctctgtatcacaaacaaccaaaagatccaaaagggtttctatagaatagaagtaacttaaagcatttttcccagaatcaatcatctcctggagtgctaccacagaaacaatcagcatcagcaataaataaaatacagatcaaaactacagattagtccgtatttgaggttaccattagaaaagaaagaatacaacagaacactgcatggtcaagaaaagctaggagccaaaatttgaccgccattctgctttatatatatatatatataaatatgtatatttatatgatactaagagaataaattaacaaaacacatacagatgggtgtttttcttttgggtaaagatatttaaacaatccaacctccattattggcagggttgagaatggacatacttttggctccaattgtatattaagttgaagcattaaaaccagtatgagcaccaatcttgagattcctaggaaatagtgtatgtgtgcgaacagttaaatatctacaaaagggacactgatctgcagccacccataacaaatttaaggaacaacagcttgtcgacccaaacaaattcccttcagatacaattgatacagcaaagaggtgggggtcagagactaggaacaacatcaaataactcacttaccacccatccccaagaagcacacaagttagatgatgacctcaggggttagcaaatgctcatcctcaaatcactgaaaaataaaagattcaagtacatcaaccagtaattaaaagatctaaaggggaagtgttaaattatgacgaaagactaaacaggccaaatataagatgaaaaacctttggatgtacaagaaagaggataatgcgcatgattcagcaataaaaaaaaaaaaaaaaaaaccctgcagttgagttcaaaataaaatatatcaaccagagtagaaagaaagaaaagaaatcttcctcatttgctaatacatgtcaacggaaataataaattgttgaatggtcttgacttctctcatttatttcctactaaaattcccttttcagtcccacattcttcctatccacaaaaatctatgttgaatctagggccaaacaaggagtactatgtattcattcccctttccagaatttacaatcacagaaaggctgcaagtcaattgtaatcatcagaatcaaccaataacaaaaaaagcagtcctgtg

SEQ ID NO: 28590 - DNA, 1255 bp, Cannabis sativa
taaggctaaaaaaaattccccttgcagcagaaaaatgaagtgaatttgatatatgatcctggaaaaaataagaaaggaaaaattagatattgatgatgtttataaaacataaatgcaaaactttatgttcatcacatttttcattatgtcatcaatataaaaaagattataaataaaatatatcccaatgtttaagcttaagtactatcactaaccaaacacacagtaaatgctaaatcaagaaaaattccaaaattagaaatagctaaaactaaggcatatttgaaactttcaacacaatagtccagcaaaataaaatataaccataagtaaatttggatgatcaacaaattcttagagcaaaatttgtacatgacatagcccaaatagcccaaaaacaaagaccttcaagctgaatgattgaaatcccagactgaaaacaaaaagaagcataaaacccagaaaaatcacttcttgactttctctcaattctcttaacagccaaacaaataaagaaaacaaacccaaaaataatcacagataaagctcaaatctttataatagctagagaactgaaaataatgaagaagaaaaaaaaccgagaaagacgcaccagtaatgatgcatccatgaaaataagaccaaaagaaaaagaacccactaaagctaatatgttattctgaaattttcttcttcttccttctctttccactctcttcttttctccttgcccttacttgcatttccatgtgtaatttttttttttttatcaaaaccaaaacctgaaaactcaaaaacaatggattatattatagctttatctattcccaaaccttccaaattattttattatatataaattaaaaataaaatattgtgtgggtcatcatcatcctcagaattctctcttctccacccttctttctattttccactaccatcaatttttcattttctatttaccttattattcaattccctctctctcttttttttaattacataataataataattattacatgtttagagttgtttagcaaaagtattttttaaaatatctttttctgaaagattcttaacaaaatagtttttttgcctagtttactcaactcttgtcttaaaaatattactttaaaaattccaaaataacattaaaatttctatttttttgtttgttactcaataataataataagggtaaatagtggcataagtacccaaagttttgagtttgtaagtggcataaacccaa

SEQ ID NO: 28591 - DNA, 2400 bp, Cannabis sativa
gaaggacctactaatccgcctaatcttaaaaatcctgggaatcctactaatcttgttaaacccaccattcatccaaggttggaacaacccagatgatcttgtatagaagagcaaatcaacatggagcaacctgctcataatactaatgagaatgccttgtgagtttatgcaggagaaactgggctaggagttggccaacttgctattggtaaaccttgcttggaccttggggataatgctgagatggctaggctcatggaagctgtaagccaggtctgttaaacaggataagaagaaacacatgttgttgtatgcaatgccttcactcagtagagacatgaattcctgaagtggatggattattaggaggccacactctaggcccaccacgcggagttgaactactataatcaggaggccaatgacctaataaggcagttcaatgagagaataggcttcaagggcaaggccctaataagagatcccttgctagagaaatccacaaacggggcgaccaaggtctaccaacaggtagacaatgggcaaacaacccgtctaggtccctcgaatagggggccaaactctatcctccttgaggacaaacatgtcttgctcgacagaccatatggcaggatgactaacgggtcggacatcttatagcccacataaggttgggtagtcagcctgtagaaggttggataacatacaacatatagaaggttggatagcttacagcctgcagaaggctggacaacttacaacctgcagaacataagtgtaagacatctcatcatcatctagacaaggtagccctgtacggttcttcaatccttaaactgtcaaaatcgtaaggagtcaaataaggagaacctagtaagtctacaagacaaaagatgtacatagaagctatacgacaaagctatatggaaaagttgtacgaaaaaggtagatagacatgccggacaaaccctaaaagtagggttggccaggctagacaaccttcagtaaggctcaccaaccaactcatgtagacaacctcaaaaaggcaggccggaggtctatccaagaaaggaggtttgtttgaccaaggaaggttagccgaccaaagaggtctatctgaccaaggaaggctggccgcccaaggaggtttgtccgaccaaggaggtttggccgactaaggaaggctgtccggctaaggagagctgtccagacaagaggccaacagaacagatccatatgtacaaacatagttagataagctcagagacatgatcaaaggcccgtcctgctgaaagttgtccgacctagagctggatagatcaaggtgatcaccgtttacaacatacattaatgcacttccccttcctaagattaaaatgacaacttggaagatgtacacgaggaaaaagatcccctagcgcacataaaatacttaaagatccaaacagatcttcaaaatataattagagatatgcgatgtcggatctttctggcaaccctatctgacatagcccaatagtggtatttcaagctggcaggttcaactcttgggaggaattttctcgagaattctatactcagttctcttccttgaggaaaatacctacacaactggaggatcttgttgaaataaagcaaagacatggtgagcctttgaaagactacattcaaaggttcatggccaaggccaccaagatcaaaggcttgtcagaagaatgtcgatatatgaccatacttaaaggtatcttgccgttgagtaaagatatcagaaggaactcgacgaacaacatgaaagagttacttgagcgagctgatggtttcataaagttggaagatgttgttcaacaagcccagataggaagaaaggccagtgtcagacagactcaaggtgtcatacaaccccaagttctatccaacatgccgatcagcacatgctatatcagatagcccaacaacaataagaataatggaggtaaatgcaacaacaatggctctggccaaaataatgggcaaaagataaattcaacgattcccctgtgccacaaaaccaaagggagaagcagtagaagtacacatgcttcactctcctaatagaaacctaaagcacctggctgactactcaagtaggccactgaactcaacctatatgtgatcacttaccagccaagaatggctataaaaggtcaagctctcgctgacttgtagctgaatgcacaagcacatctcctaaaatctctcaagattaaggaaaaaagcaagagctagagaagaagcgagagcaagagtgagaaaatttagcctagaagttgcatgttgatgggagttgtaccgactacctgtccattgcaggcatttccctcattacacttgggggtaaacagctggacgagccaataaagt

SEQ ID NO: 28592 - DNA, 3716 bp, Cannabis sativa
  modified_base (2604)..(2610): a, c, t, g, unknown or other
atgttattattttcaatttttacctaaaatactctccctttcatttctctctctctctgtctcttcctcttcctcttcctcgctctctcttcctctttctcacaccaccgagacaccaagacccaggcaccgagaccaccaatcaccaccaccgaacctcctctcctccaccaccgaacctcctcatctacccaaaactcaacccaacaacctccaaatctcacctacccaaatctttctctcttcctcctcctcagcttatctcaaccatcattaccattcgtcaccacccccacgaatcgagactaagatagaccaccagcagctcttcctcactctctcttcttcttttgaatttgcatggttttctagccaaaatgtgattatcgatgggttatcgatagttttgtctgtgcactgctatttttgagtgcaaacagaaatcatcaataacttatcaacaacctatcgataacaaatcgataaatgtcatcgataaatatcgataaatgccatcgataaatgtcaatttgacaaaattgtgttacacaaacataaatcatcgataaacctatcgataagcatgttttggtcagaaaatatcataaccacaaccatctaaggtctgaaacaaacacaaatccaataaaaaaaacaaataaacacgaagatgaaggcaaaatttggtgagcatctagttgggctcagagacgaggtcgccttctcagtatggacaacgctcgcagacgaagacagagaaaggttctgggcctttgggtttttcaatgcttgagtactatggaggtctgagtcttgggcctctgggtttcgtctggatttttgagtagatggggaggttcggtggttggtggtctcggtgcctgggtctgggtgtcttggtggtgcgaggaagaggaagaggaagagacacagagagagaaataaaagggagggtattttagctagaaattgaaaataatagcatttaattgtataaattaattatgattctaaatttgttagggggtatttttttaaaacatgtaaatgaaattttctttgtaaattagtaattttagcccctaaactttgacaactatcaaagcataccccctccctcaaaataaaaaaataagaaagcttcaacattttttttagtaaatcttaaaaaattaatttagattttaaataaattattttaaatgattatgaaaattaaaaaaataaattaaattttaaaactaattaaaaaaaattatttattttttattaaaaacttccatgtagatattaaaacatgtattgaaaattcaatttttgtaaaagctaaattttacgggagcaatcttgagtctttttttttttcaaaaacctagatttgtttaagtaaatagaacattttttaagtttaatttttaacttttttttccaaaataattttatatttttatttaatttttaattataaattttttatttcttaagatatgagtttataaatataaataaaattgaatttctctttaaaaaatcttaatttgtttaaattatttattaaattttaaataattttggtttaatttttaagattcgtgtttatagataacataaagtttgaaaatatttttgtaagaataatttaggttttttaagtaaacttatttttaaaaaatttcagaattaatagaacattataatttttaaagttaatatttttttaataaaaagggaaaaatatttgtattggtcaaatttcagcatgtaaaaatgttaatttttaacagtaaaagaaacgaaatctaacataagtggcataattatatagttgttatattttaagggaaatttttaaaaagtgtatattttaggaggcgggatcagatagtgtcgaaagttcatgggataaaaatactaattattcttttttttttaattagaaaagtagaaatattttaaaaaaaaacatattctataaaaatgttttgactttttaattttaaaattgataaacaaattttgaaaattttaaaaataaaaagaaaactaattatactctttttgtattttctatcattaatatatgaaatcggactctgacccggaccccggactcagacacagactttggacctggatttagacacataccctggacatgatcccgacctcgaacgaggatccaaaccctagactcgaaccccaacccagaaacgaacctggaccggactcggacccgaacctggacttagggcacaaacccgaacccgaacttgggacccagacccgaactcgaacccagaccttaaccccaacgacggacccaggctcggacccgaaccacgacctgggtctcgaccatggacccggaccccgaccccgacccaagacccaaacccaaactcgaactctagacttcgaactccagacctggacccgacccagcaccgatcctaaatcctagacctggatcccgtcttggtcccagacacagaccctaatgctggactccgacctactttctctaacttcaattttttattcctcacttaaataaaaataaaaataaaaataaaaatagttataaaacacatttttattttttannnnnnnaattaaaaaataaaaataattatagaatatataatttttaaaaaacaaattctacttatatttttgtgattaaaatattaaaaaaatgactatccttaaatttaatttgaaatcatatatgaattgatcattgatgagaaaaattaaaataatataatgatgagagaaatattgaaatagtcaattgacgggtagggagtaatgatacggtgggagggttcacatgagtttggtgagatttgattcatcattacacaagtatggctactttttatttttcgagttggatagagtgctaaaagaacagaggatactacttttaaccagtttctcatgattaattgtaacatttttttaaataccatatattattcacacacaatttaagattgtgaaacttgagttggataaatattatagaagtgctaattaaaaccttttattataatcttttagttaatttttacgtatgaaattacatgtcaaaatatttttttaaaatttttttttatagtagtattcgttatagttacaatatcatccttgtaaagttttaaaaaattctaaatagtttatattacagaaaacagagttcctgatattccagtttagcacgtgtgtttaaaaacatcaaacgtatttttggcactataaactatttgaaatttttcaaaaatttacagggatggtgttgtaagtataacgaatactgccgtgaaaaaaaattgaaaaaaaaaatatttcgatatgtattttcaggcgtagagattgactaagaggttggcattagcactcctctaaatattatatttggtgtgattttataattaaaaaaaaaaaacttgtgtatatttgtcatacattattcatgtgggagtgtcaataatatgtggtatttatgctactaaactataactctacaataacattttaataattgaataaaggctatatttaatttgattttattaaaaaaaaaaagtgtaacaatttttttaatcaattttgaaagaggggccacctcacaatcagcacacaatttgtcattttcaaaattcgaaaaatattaaatgatgtcaatagtgtccaatctatatatatatata

SEQ ID NO: 28593 - DNA, 3126 bp, Cannabis sativa
  modified_base (2407)..(2408): a, c, t, g, unknown or other
ataaagaattaaaattaacattgtgtcaaaatttaattaaaatttattttaattttataaaaaaaaaggcctcgttttaaattttgccctaggcctatcagacggccctgattaaaactatatgtaaagtatgctataaattataattctgatcatgattcaacattcattaaaatcaatggcatgcatgttgttgtaattgtacaacacagaattcaagccaaagaacattcatactagttaaaataaaatataataataaaaaaatcaagagtttcggtttggctttagtagcgtttggttggaggtaatgaaatggaatggaatggataggaaataattttcattccattcatttgtttggttgcatttaaaactattggaataccatttcgatgaaatgacttttccatcattttagtggaatgactattccattttaaaatgtaaggaaaaactattccaatgcaagatttgaaaaaatttaataatttttttatgcattttaatttttattccgttctattcctattccaattctcattctcatattcctattcctatattttcattcctcctaaccaaacgtcatctactttctgttactaatcctttgagttttcttctctattaagatcatgaattacaagctattgagtgcaccctagagaacaatattacagactgaacctctgaaactcagctcgagtttcagctccaaaaatactaatcttggtttagatttcccaactctatctgttttctctctttctttgtctctctctcactcgatcacactctttctcaattgatcagtatgaattattttttacattaatgactaattctttaaaaaaaaggcaaaagtaagacataacaaactatatcaggtgcacttaactaactgaacaaaatgctacaacataacattacaaccaatgttgtagcttttaactaacttaatagttgttatagttaaaactgttataatcccattttatttgttctatgaattaccaaacaacacatgtttttttaaatggatgcatgtcttaattaatgtaacatttcaaaatacttacttttgttgttgaaaataaaaaacctattatttaataactacagcctttttaaactaccattactaacattcactactgtaaatatttcctcctgtaaaaaatctagattcattttcactttgtctatatacttgagacaattaacatcatatagtacaaaccaaccatttagtacaacgaatcaaattatccctaccgatcgaaaaatctaattatttggctgctagagttacaagaagttaaaaacaaaaggaaaaaagaaacaaagaatctaattaaagattcgttgaaacttttgaacatggcagattacataataatataatagaatagaatgaatggccagcaacaacatgacataaaatccacactttggcatacactttaaatggggccttggtgacttgtgttaaatattatatatttgtccgaactgagtctgcatatactctttatttaccgatgactcaattaagagagactgaaatatgagtatcttatagctaacatgtaattttgagaattgtttaaatacgaccgaaaaagtagggaaaaaatcagtactacgtgatccttttttttttttattcttagcgaaaaagaaaagtatgcatgtgtccgaattgttttgccctatttaacaagtgttaagtaatctagtaagttataatacaaagtctcctttttattatatggtaaaaaaacctaattttttgattctagaaaggacacaccgaccactaataaagaaatcaaagtgttttaattcattaattttgcagtgataatgtggaattatggcaaagatataatatggggccaattctcttatacatgttataatgttcatttggtgcttcttctatattgtggaatacacactcatttatcaatgaaaaagaaactacccaaaggccaatcattcaacatgtgtccaattttagggatcaaaattaagggcggtgaaaaggagaatataaatattaaagaaaaaaaaaaaacctacactttccatggtgatcataactaagtaaatcattgattttgatatcgacgcaatataaaaaaactactacttttagtgataacgttttagtcataataaatttttttttgtatctaattgtgatttttagtcacaataaaatattacttgtgattaaaagatagtctttagatacaagttgtcactaatttagttttaatcgcaacaagtattgtgactaaaaacacatttagtcgcaacaaattgtaatttttgtgactaataccttttgtcacggatcttttagtcatgacatgagaataataatttataattagtnncaacttttttacttttagttacaagtttggttgtgactaaaagtaagattttttgtagtgacgtgtgataataatcatggagttccatttcaaaattaattggtgatgagtagagtaatccaatttcttatctcaagtcgtgtcatctttctcgctttattttgttcgaatctcaagcgtttttgcaccatctgaatctcatccatctagatgtggatcgaaagcctgttaccatgataataatatggttttatctcaaaatcaattactggtggtcatgagaggagtagctcatattcttgtatatgactcaatactttttacatttaatgctctcaagtgtatgtatttgattggttggacatggattgaggattagccaatgagaatttggcaagtgggtgccacgttgattatgatcatgatcataatcaatatcatgcaatgcaatttgatataaaagaaatgtgggttagaagggttggtagggtacaaaattgatttaggatgctattgatgtatatatttataaaccctagctagttatatatataagatttataattataatgaaatttttatttattcttatcatgttccctatctcacttttattccactttaatcactgtcttcttgtccctaattcccactccctcacataaatatttacagctagaatcttacttactcattttgtcctcaatagtttgttaat

SEQ ID NO: 28594 - DNA, 1414 bp, Cannabis sativa
tatttatataattaatcttaatcatatcatcatcatgaatttatcaggccactttgatttagtaagtatgagatccaattgggtgtatttatatataatttcaaacattaattatatatattaataaatatgcatgtttgataagtacatatatatatttattatgatatattagactccaaatatcaagtataaaagcagtgcttaatccatgatcggcgtgccttgttttttgtgagagctaattaagacattatgatgttctctaaacattttcttgttgcaatatttcaagttgcattggtcactctatcaattattgttcaagctcaggatcataaaggtttaaccttatttttccttcctttcctttcttcaaatatatgctaagcattttagaatacttaattagtctaaattatctacacatttatagaaaaaattatactaaatttttactatagaaatttctgttcttcaaaaatatatgtagattcgtatattaatatatatatcattaaaaaaaaaatgatttttagtcacaacaaaatttataactaaagctaaaaaattgtgactaattataaattactattcctatgttgtgattaaaaattccgcggctaagatattagtaacaaaaatcataatttgttataattaaatgtatttttaatcatatataatatatatttgttatgattaaaactatattagtgataacttttatctaaatactataattagtcaatgaagattttatccatccttatacctatgatccatacctatgatcctttctatttctatcaaatgtagaatatttggttgcacacccaacaactctccccttaaacaaaggaccaccttacctccccttaaataattccccatcagtcaactctttactaactattctctctaatgtgttggggtgcacgccttacatggagtatcacccctacttcgagagtcgagagttcttactctttctcagaatcgaggctcatctcctttgtttgacaccatctatctcgatatcgataaaatattgtttgctttggacttaaactcttatagttttatttttaggcaccttccaaacactactacaaatatcagaattcacgactgtcctaaaaatgattttttttggaccgtcgctaaaagagattaactatttaaatatgtcaggaaaaatttaatattcctgacggtttaaaatcgtagtaaacaaaatagatgatgtttttttttaataaaatgtgaattttcacgagagccttatacccgatggtttaaaaccgtcagatataagggccattaaaaaatcgtcacctacttctccccacatttcccacgtgcccacctacttcttttcaatttcccacatgcccacctatttcttatcacc

SEQ ID NO: 28595 - DNA, 4160 bp, Cannabis sativa
taattacggagattatattggaatatgtgggtatcgtagataccataatttgaataaaatattctcgagcctgacaaatgtggaacttgacggggaggtcagaaatgtcacgacaataaaagatgaattgaattgtactttataccggactagtttagagttttgggttgtcagtttggtggattagctagaattactaaaatgcccctagattttgaatgatttcagttttattaagaaggcaatatggtcttttcttaggttaatttattttgacattcagtgttatttaggctaggttttatttgtttatattagataattttgaacctatttttagaataataagtttttttatttagaaatcaagaaaccacaaaggcttcatctccctctccgtccccctctctttcttgagcaacttgaaccagccaaaaccaggggaaattcttcacctttttccttgaatttgagtagaatttgtacccaagttcaacctagaagcattggaggtaagttccttactttgaggattgagaattttcaagttttaagtttattttcgggttagggttttgtgatttcatggctgtaggattaaactggttagggattgtgttttcagacctgttttgaaatgtgttaaagtttgaattgaatgttttttgctggttgtttagtttggattgagttaaatgaaataaaatgagttttcttcacttgagtatgtgatttttgaattaagagttcagatgttgtaattgatgcttgggatgcattatattgatgatattgtactattatggagcttttgggttgctttggtggtgtttggattgaatatggaggaggaaaatttgaaaattgcagccctgccagaaccagtcgaccagttggtctagtgcagcaaaatcggtcgaccggtttgcctacaaggggaaattttcagttttcttcagggccagttttagggctcggggtgatttccatgtctggtgtagattgtttagaagttttaaaacctattttggagctaatagaagttaaggtttaccggttatgggaattagggttattccccgaattattgatttaaggtatttattgaatgttgttgtcgtgacataggacctgagatcgtcaagctttgttttccacttaggccggcatgcatgcttaatctctagattgaggtaagaaaagtattatgcactgtttatggttaacgactataattgtgatagtctcgattatgatcgagatcccgatatgtgtttgttgttactcgattctgattgaggtaatgatatagaatgattattatcgtttgtgactcgattatgatcgaggtaatgatatgaaacgattattatcattgtgactcaattatgatccagtaaaagatacggtcattaccgttatgagtaattactcattgaaactgcggatagttcccgtggctactatcaaattaatgaaaattatatatattattatattctttatctcaaaataataatttgagatatgagctatttcaccttatatataaagtttttatcatcattttcgagtaacatattgtctatatataaaataaatattactcccatcgatcttctagtatataattaattctataataatcttttcaaacctaaataaaagatgacataatgaaatacaaattatgagaaatttgttttaatctatgtgaggcttttaaagcttgcatatattcaccaccgtcagaggaaatatttagggttgtttgtataccttctcttctagttcactgattcgtaattgatgaatatattgaaatgagtaataaatgataatgatattaatatgttcttaatttatgctatgcaggctccaccccatgtgcgacaatgcttagtttcttaaacctgtcacacactattatttgggtgtactaggtatatgtattgtaaaatgaacccatgcttttaaagaaacttagcaactgtggtgggagtttatctatccttacaaattttaatgtagtattaaccatctatatttgatctcactatcttaatatgcaaaatgcattatttctctacttaagatttaaatatctttgaagcatataaatctttaattttgtagcgataatatttatgcgagaaatcattaataaattagatgaaaaaatttgtgaaatacgagtccatatctacaagtattagttgacttgtatgatttctaatatgacagaattttaatgtgtaccattttagcttgttggtatacctttccttaatgtactccacacatgctctaaataaagttagtaaaataaagtgaaatgagtatccctactatttactaatacttattctattttggagatatattccataatctttgatgacataatgtagaggaattcttattaataacacattttttgttgccagattgaatatgcagatccttatgaatgacatcattttataattaatattgtaaaagaattttagacatgtggctaactcaagcttctaaagaaacttggagcattaggtctttaataattgtaaaacaaagctctattatattgattattcttgaagtttctaaatgtgaattcatcttttctgtagataagatttgctcacaattactgactgccttaggttttgttatccgcgtttctagcactgaacatgtagaatcaaggttagcatccaaggcccattagtgggaccctcaaataggatcaagtggacaagcccatttggataagtccttccaggaacgtatcttagctctgtaatcataaaagtttttactttcgggaagtcgtacctggaagcatgtacagtatcatgagaccaaagggataagacggtgtgttcctgaaagacccttctagtttccctttttattcctatgcataaataaggaaactccaactgccagatcacaatagagtatatataaggataaatggggaaacttcctacattgaatattaagcaattaattcgtagattaattgcccataatcaaagcatacggtattgaccaaatcatgctaaatctaatttgcctagtcaacagatcgtctccttcatgggctggacttcatgagataaccgaaatgtataatttactatgaactccccaatatagggaaaacagaaactaaatgcaattctcccactattatatatacccattgaatcctatggattaagggttgaactctcttgcaaattttacttaggcaaacttgagaacatatattcttggtattctcaaaggcttttataagataaagagttactaaataatactaagttgtggactaagactaattaacgccacaaccacgtaaaaaactatttgtctttcttactctttatcttttgattatttgtttcttcagtttttatcgtttatattccttttctaaaattcttggtaaacattttggtgctttcattgatagttgatgaaagtagtgagatcacttgcagattacgcccaagtaatcatgtccctcacacaaacaaagtctggtcttaattttcactaatcttggtgctaaagttggagactctaatgacccccaaaaggtgattagtcgtgagaaaggctgttgggacgaagattggaatcaagatgatcctataattgaagattcaaaatctagaaaaagtagctcttaagacgctgaagttaacgctgaggacataccagaggatatgcaggaagatgacctttaggacaaggctgctaatgataacattggagagaagagccaacctgatgagacagatctcgtggtcatcatggcaagacaacttcaactagccaaaagtaggttaacttggcaagatcaattcaacaatttattactcggcaagatgactaaaatggcagctgtaatgactgccctgactaagatagctcctgacgtacaacctcttccaacagctgatgcctctgacaaagtagatccaaatgatcatggaacttcaggcatttgcaaagacaaaggcaaatgaatcgttgttgaagaaccaaagaagactccttccaccaagaagcataaaaagtctaaagctgctgaccaaccttaacaaaagagaaaaggaaaccacacctcatgttgggttttatgc

SEQ ID NO: 28596 - DNA, 1297 bp, Cannabis sativa
tcaaacaaaaaatttgtaatctttaaaaataaaatacattcaaaattttaaaaagaccaaaatcttaaataaaactagcaatacgtggctcggcacgtacattcacctaagagacgcagattaggtgaattcattggtactactattgatgattataataatggtgatgcaaactaggtctagaaagaagaggaagacatcacggtttattcaaataatgacggatgacttggtaaatgaaatactgattcgtctcccagattcgaaaagcatagccaggtgtgggttggtttgtagcgttggtgggatttgattcactgtcaacatttcaagcgcatcgtaactcatcatcatatccaccaacgactactcccacattcgcttctgataaaattctataaggatgattctctcatagaaacaacaaaaaaaacgttaggcattctctacaaaaatggaccacaccatgaaattgagtcaacttttgatgatctcttactaatcaaaacagaaagagatggtttctatatatcgctaaaacatttccagagttaaatcggatagaaatgtttctatgtcctataacctctacgatttttactgccagaaggttattagatgaaccccccggtagctgttaatggaagattgtagtggacattgtttggaatgcccagaggcgttagaggagttgttgcttttgatcctttaaagatagaattttgttttatgaaattgccttatgtggttggaagcaataaatacgaggttgagcaattcttgcaattgggtttttcaactgctcgcattggagtggttaatgggcggctgtgtttggctagatcatatccacttaccaacttctccatctacaccattttgaaagtttgggaactagtgaatgatgatattaataatgaggtagagaattgggtattggtgtataatgttagagtgaaagggaatgttagtatggacaattataggattattggtctctgtcctaatccagaacgtgatgagttcctttttctaggcactagcactacttcttaccaattcgctctttaccattacaagattggaagacttggatttcaacaacatcaccccaagatatttccatttgattttgatttaacgttcctttggaacttaccctatgtttttgctccaatttatcctcccatccctacaaaaattcctatgcttccatctatttaattagctttagtttgtgcatgtctcgtcttgaacatttgtattcatttagcacatataagaataactatattag

SEQ ID NO: 28597 - DNA, 3958 bp, Cannabis sativa
ttctttaattttttattgtatcactttcaaattggaacttgatttttttataacaaattagaggttatagtattcttaaatagaagttctactgtattaaacaaatcagatccgaaacattagaacaggccacggcccatttccttcccttctttctcactaaagaagaataaagtcatttcctcgtgctgagaaaaaataagctaagaataaactctctcattgatgagatacgtaacgcaactagctttacaaagaacaaaaaaataatagaaatgaaacagattgaaaaaaaaagttttgggaaacgacaacctaacaggaaccttctacttctacagcgatcgtgttttacccaatcaaaaaaatggcacaaatactttacagatagtcagataccaacacaaacaagagaagttagcattgagcagagatgtatggatagagaatagcacacacaaattcttctttgtactcggtttaatcactgattaattcctaaagcaagttaaattatcaattaccaaactattaatttcactcaagttgaagccatttttgtgggggaaaaaaccttaattctattagaaaaactatgattacatctgataaacattgattaagaaaagaaacagaccaattcacaaaaattactgttcttattcttatattgaatttaagctagccctattagtgaacatgttaaaaaattctaaataagtgatcaagcacaacattcaaaaacaataataggaaatgaggctaaacaatgcagtaaaagcaaaatattgtgagcaccaaaataaccataatgtctgaacatctatagaatactacgtaaaatagtccacaaaacgttgaaatataaaaacattgcaaatccgaatcaaaataaaaataattgtaaaaaagagaaaagctgaaatttgaatcgaaccagtgccattgcaaacaatgcaaaatacgatagcaccagtacgttcaaaactgaaaatagcgaaattagtcgacctcttcaatcttaggaccagcaccgccgctggatggtggagcatcttcctccatgccagctcccatgtcacctccagctccctggtacatcttggcgatgattgggttgcagatgctttcaagctccttcatcttgtcatcaaactcatcagactctgcaagttggttgccatcaagccactgaatagctccatcgatggcatcctcaattttcttcttgtctgcttcagtgagcttggatgcaatcttctcgtccttgattgtgttcctcatgttgtaagcgtagttctccaaagcattcttggagtcaaccttcttcttgtgctcttcatcctccgccttgtacttctcagcctcctgaaccatcttctcaatttcatccttagacaaccttcccttgtcattggtgatagtgatcttgttcttctggccagtggtcttgtcttcggcagagacattcaggataccgttagcatcaatgtcaaagcaaacagtaatctgaggaacacctctgggggctggtggaatgccagaaagttcgaattttcctaacaagttgttgtcacgggtcctagctcgctcaccctcataaacctggatcaacacaccgggctggttgtcggagtaagtggagaacacttgctccttcttggtgggaatggttgtgtttctggggatcaaaactgtcataacacctccagcagtctccaaaccgagagacaaaggagtaacatccaaaagcaaaaggtcctgaaccttctcatttccttcaccgcttaagatagcagcctggacagcagcaccataagcaacagcctcgtctgggttaatactcttgcagagctcctttccattgaagaaatcttgcaacaactgttgcaccttgggaattctagtagaaccaccgacaagcactacatcatgaacggtgctcttgtccatcttagcgtccctcaaacacttctcaactggctccatacacttcctgaagagatccatgttaagctcctcaaatctggcacgggtaatggtggagtagaaatcaataccctcgtatagagagtcgatctcgatggtggtctgggcagtggaagagagggtcctcttcgctctctcacaagatgttctcaacctcctaagggctcttgggttgccgctgatgtccttcttgttcttcctcttgaactcctgaacgaaatggttgaccattctgttgtcgaaatcttctccaccgagatgggtgtcaccagcggtggctttcacctcaaagataccctcttcaatggtaaggagggacacatcaaaagtaccacctcccaaatcaaagatcaaaacattcttctcaccaacgctggtggccttcttgtcaagaccataagcgatggcggcagcagtgggctcgttgataatacgcatcacgttcaaaccagcaataactccggcatccttggtagcctgacgctgagaatcgttgaagtatgcagggacagtgacaacggcgttcttgatggttgaaccaaggtaagcctcagcaatctcacgcatcttgataagaaccatagatgagatctcctcagcagcgaactgcttgtcttcacccttgtagttcacaccaatcaaaggtttctctgcaggaccacagataaccttgaaaggccacatcttaatatcactctgcacagacgcgtcactgaacctcctaccgatcaacctctttgcatctacacgaatatattaaaataaatgaattaaaatcctgaaacatatcggatctggatctaataagcttgatctaacagataacaacataaaagccggattcaaataaaaaataatcaaaaaaaaacaaaaaatataaaacaagttacataccaaagacggtgttgatagggttcatggcgacctggttcttagcagcatctccgatcaaacgttcggtgtcagtgaatgcaacatatgagggcgttgttctgttaccctgatcattggcgatgatctcaacacgatcgtgctgccaaactccgacgcatgagtaagttgtacccaaatcgattcctatagcaggtccttcacctttgcctgccatctctctgagataagaaatctagagagcgtataaggaaaaagggtagaaactgaaatttgaagagaaagcaaaagagagaggcggcctgcaatgttagggtttcaagtgtgagtatgagcgggatttttagctagtttatacaagttttggtcgactctctagaatgttctatttgaattaaattaaactccaccgcagatttggagttggaatggacggtcaagatttcacatctgctggggtttttgactagttgagcctctttcttacgtatctcaccacttgggccgtgggcccaaaccctaatgctctttacttttctttccctattgagatccgccgactacaattttcaaaagtgaatgggtaagggtatatttgttaggagttatttgttttctaaatactttttttactttaattatatacgtatttaaaggttacaggttacttaaaattaattgaatatttaacaacaccttttataacaattaataattataaataatttttttatatatatttctggtataattattttaacaattaagttatttaattataatatttacaataaaactttatctttttcacaaaaaatagacttctttctacacaaattagaattcttttcttctataataaatttttaaacaattaattatttttaaatgatattaaattatttttttttattagaagaactaagtatgagtttttctattcgaatttgaagttgcttcatttttgggaggcttgactttgtttttttgactctgatttagttttttaagtaaatgacttataataaaaaaaaatggaagagtttagcctttttttttttttgaaaaatacattgaa

SEQ ID NO: 28598 - DNA, 2174 bp, Cannabis sativa
tttaaattatttattggatttttattaattttagtttaattttttaagataggtgtttataaataataaaaaaaaagtttaattttttttaggaataatctagattttttaagtaaaattaatatttttattaggttttttataatttttgccaaattaatagaatattataatttttaaaattattttttttaataaaagggagaaaaattttatattggttaaagtttaggggcaaaaatgctaacttttaacgataaaaattttataataatgtaactattatattttagggagaatttttaaaaatccgtatattttaggggataagatcatgtagtgtcaaaagttgaggggacaaaaatgttaattattctatttaaaatatatgtttattaggattttaaatattatttttttaaaaaaaaaaaatcaatcattttttatatatgatactatagagtcaataattagaacatttgcaattttttttaaagtttttttaaataatttacgctgcccaaaacattaaaccaaatttttaaaagctggaatcaataatcatcaaacattagatacataataaggttattaaacactctaattttgttatcatattaaacatgagttacaataaaaattttgaacaaaaataaaaacatactaaccatcttttatcaattaatttcactcattaaactgatgacatcattgaatttccaatcaaccaagtaaccaggccttgacacttcagtgttcacctgatcagtactgtttcctgaaagcaatgccacaacttcagacatcgatgggcgagctgtaggcgatgtgcgagtgcacaaaaaagccacttgtatgattcttctcgcttcttcattaatgaattctgatagttttgaatcaatcagttccatttcacggtcctcttcatatagattccaagcctagtgagaacataaacaaaataatattaacgttctatttgttagggaacaaggtagcatggtaaaaaaaaattgtctttcaactattgtaagctaagtctttggtgaaaaaagcaatctagttttagtacccattcaagaagatatgacttttcttcacctaagctcgggtcagaattcggtctgccagtaagaatttctaatgccacaactccaaaagcatagacatctgttttctcggtaaggtgaccaagcatggcatattcaggtgcaagataaccactacaatatcaatgaagcaatagtgaatattttgttattaataatcaaaatgagaagtgtgaaacaaatttaagtatgatcaatcacagataatcttacatagttcctgcaactcttgaacttatatgagtcaatttatcatcatatagtttggccaaaccaaaatctgaaattttaggaatgagatcagagtcaagaagaatgttgctacatttgacatctctgtgcacaattcgaattcgtgactcctcgtgaaggtaagctagaccttttgctattcccaagcaaatgttaaaccgtgttgaccaatttaaattcaagctttgggtacctgagaatgcaaccaaccacatttaactatgtttaaaataacctttggttcttatactattatttgtgtaaaagcagcaatgaaattttgttataccaaataacgcttgatcaagactatggttctccatatactcataaacaataagttttgtgactccttcaatacaacatccatataatttaaccaagttacgatgttgcactgcagatattgtggcgatttcagccacaaattggctttttccttgatgagaagtcacagacaattgcttcactgcaataactcttccatcttcaagagttccctaacagttgtgacaaaagtaaaatggacaatcatttagtctaaattttgctgggaatcagttgattaatgcaaaaacataccttgtagacaggtccaaatcctccctctcccaacttattagaagaattgaaatcatttgttgccatccttagttcagcatagccaaaagttaatggtttgacatccatccccaagaattctgcaaatcattatgttaacttgagtgtgcctactaatactcttccctatatctaggacactaactgtcataactgttttgacaattatgttagttagtgtcatacctg

SEQ ID NO: 28599 - DNA, 1660 bp, Cannabis sativa
  modified_base (1570)..(1572): a, c, t, g, unknown or other
tttatttcattattttagaattcatattaggatgttaatcaaacatacttggtagtaaatctagatcgtggtaaaataatttccaatagtttgaggttctaatagttcggggttcatggcttgtgattgaagaagctatggtttttgaattttttcgctggaaatcattacccgtttttgggtttttcttttcaatcaatttttagttttttatatcaatttgtggatttgtagtcatatattgatctgtatatgattttttatttttattttctttagtttagattagtattgtttttctttaaaaccactcattttcttttttgcaggttgacaatgatggtagttgtttgaggttctaatggtttagggttcatggcttgtgattgaagaagctatggttttgggatttttttggctggaagtcatgccgtttttgggtttttttttcaatcaattttttgtttttttatatcaatttctaggttaatttgtagtcatatattgatttgtatataatttttttttattttttttagttcagagtagtatgtttttctttaaaaccactcatttgtattactattattaattataattataattattttgtgtattttttttgtaattaatctaaatgtatttatattacttaaataaaattatatttatataatttgtaataaaaattgataattatacccctataaattcttaatccagatctgtatcaaatcaaattaaatattatttttttagaaaaatatttaatatagtggcactttatgtgtgtcagtatatcctcaaaaatattaataaaaaagaaaaaaaaaaggatatagtgacacttcatgtatgtgtctattacctttttagtctgacaaaacctgactctatacgcctatagtgacacgtagaaaatgaatgcaaaaggttttagtgacacgtctgaagtgtcactaaaaattgttcttccagtcaccctcattagtgacgcgcgttaaagtgtcactatacacttttagagttacttaatgcgtgtcactaaaatcccaccttctagtagtaattaggattcgtggccattagatcagttgatttagtggattgcaaccttcttgtatacatgaccatttttttgacaacttgtagagaatcaaaattacaaaatcatgttcttttgctctgttgacgctgaaaagtggccagcttgctaaattggcgagatgaataataggtttaagtaaataatttagagagacacacaaaatttatagtagttcactctccatgtcacgatggtaatggagctacgtctacttcgagtttttatttctcacgagaattacaagaaaattggctaagtgtgaaagctctaatttctagagagacaaactaaagagagatgctctgaccttatgggtacttttctgaatgtgaaaaataagctagtggaactcttctttactggggaagaaagtcttataaaaatgacaataaaataatccaaaaaatatggaaaaaatacatttgggctattttcggccgttgttgcccctgattttgcccnnnatacgtggaccaaccggacaaggacacgtggatcgaacagcgtaacgtttaaattatttgctaagtctttatgtaaataaggcagcat

SEQ ID NO: 28600 - DNA, 3884 bp, Cannabis sativa
gaccctaatagttagcatgtgtcagaggttagcctcaagggacccaaagagtcctgaaagcttgggggtaaatattatcgatatttttaagcaggagacacgtggtacaattaaaggcaaatatttgttaacctctcggattaacaatgacgaccattacaatcctcgcagagatgtgtcattaattttggaagggcttaatgaaagcttgatgtagcgagctatctctggcctagttagcatctttgacacacaaaaggatcatactgtccccagactccaagaagtcgtggaacaatggtttgactacttgacatctggataacgactctcttatctgatcacaaattttgactcctacacgaatgtggatgaccacctcaaatttacatggaaatcaacctacagatggtttcacctttttctgacacaaaattagatcttgtcccttgtgtcaggccatggtagtgtgcgtacatacctctggacacatcttttttcctgatgggtcatctaaagggtaatttataaatgagaacatttgtgcgacacgtgtccctgatctagacagtactactcaccatccctacacactgcacgatcaaaaagcttcttcaaggccaggcggttagatttgaagttgtattttcctgcccttggagtggactgtggttaaaaaccctatgtgggtaaagagaatgcccttaaccacacgtaagcatataaatacccccattttttatgtacaaggggtgaacaaaatttttactagctgaatctctgcaaaaattcttacagagcttttttcttcttcaagagaaacaaaaggagtcagagctaggggttatactataaagacatactatattatcaaaatactttcctaaggggccaatacaactgacttgtggtctaggaattattaatacccgaaccacgtaaaaaacacttatctactatttactgttttgtttatttctaatgctctgtttatttagctttcaaaaatttcaataaatagtgggagttcaaacgtccttaggggctagattaagtccccagtgaattcatatatgggcatcctgcaaggcttcgaatccttcaagcctaaccccatttgtccaagcgtgttttgatagaggatgtcaatagaacttctgttctccactagcacttggtgaacacgggcattagccaattatatcaccaacacaggaggatcattttgaggaaagtggacttctcgtgcatcttcctcagtgaatgtctcaaagttgctttcccgtttaaaattctttgacggcctttgttctaagcacatgaccattggaggttgtctcacctcccgtgcatacttatcccttcccttaccgtacttctctcaatacctctggagcttcatttgagtttgctgcctccattctttgggacatcgatcctccctacaatatcctccttagtatgcccattgtattaggtcttcgatttccatcttaagatgggagaattcttctatttttttaccaatatctctatggaacttgcaaaacttactaggatctctcttcaacatgtccttcctcataggaggcagtttttttgaaaggtactcgattttcattcgtcaagaagatgtgctccctcgaacatgtgagtctagtgtagtaagtgaatactctgcgctggggttcttcctccctcataatcttcttatttcaatcatttcttcccccgtagaattctcttatcttttgaggctcctcatgcatctgagggttcgccaatctacctagatcactcttcccttttgtgagattctcatgcccgtattcaacttgaatgtacttcttggcttgttcatagaagtccttcaagtcttctagctctctcttgagcatgttattccacaacttgctttttggacagactcccgcagttataaccatcttatgctcgtccttagtaatcctccaaacttttgatgcttcagcgttgaaacactggatatagcttttgaggctttcaacttttccttgcttagtatttgccaaactagtttagggaatagtgtagtcccaagaggcatggtgttgagccaagaactcgtgagtgaactatttccaagagattatagacccaggcatgaactgcttgaaccatttgtatgccgcacccctgagcgttactgcaaagcattgacaccttactttgttagtaaccctcttaatctttattatttcgttaaaggcatctaggttgtaccttggggttatcacctcatatggtaacatatttggctctttgaagtttgtaggcaaaggctcagcttgaatttcttgggagaatggagatttctcatcaaaatcgtcctcgtcctagttacactctttttagaggtagctaatgctatccttcgtcaaaagtcttccattctccttgtctagctcttttcttcttttagttaacttctctcaaaagtctattatggcaagctttttcctctttttgttttgaataaaatctactaagggtgctcacttctccgtcatagtttttaggcaaaacttttcttttaggtcgccctggactgctttggactcgctccttttgggtataaagtgggttctagatctctgcgagataaagttctacgtagtgaagacttaggggtgttgcttgtggaatacttggatactccttcatctcccagcctactcgcgcctttctttcttacttccaactcccttttcctgattagaggtgcttcggagcgacctttaaggagtttgtcaagtaccctttgtatctttacaacagttacttccaatcacaagtttcttatccttagctcgttcatctcttcattgtgaactcgagtttgagagcttgaactcaacaagtaaactcccttctcctttctttgatgatggttcaacattctcagatctctcagtcttggcagttgaggtggcgttattagtgatgagacgatgggacattgtgacccacttcctccatcaggtgtgatggaggtggtcgctccatctcattgtttgtttgttgggttatcttcggggcagttattttcttctcctacaggggagttgaaaccattcgcatctcctttattttaaggtatctggtcatttgtatctcttcccccggcaacgggtctggccttgaagcaattagttgaaggtcttcaaggcaaacttttactttttggtaatgatgggagtgtctcgacgtatcttctacgatagtgtgtaaggaaacaacgtgagtttagcttgtccttcccacagacgaggccaaattgttgacggtaagaactcgtcaacaaattgttaagacaagattaaatatgaagaactttagaataaaagtgattaaagaaaacttcttccaatctttcaagaaaattattattctatggatattccaaaaaatatccctcttaaaaatgttccaatggggtatttatagtatgtttctataattttgaattacatgtggtccccaagatggggggacaacatctcttttgtaccatttagatcagtgtgtcaggtggtctcatgtccctcgtacttttaataggacaaacattgtctctaccatggtacattgagtgaggcaagttttatccccatttcttgtaactgttgtacgatcgctatctcatatgtggcgtgcttgctccaacatttttattcttagttattccttcttatcctcacatgcccaaaagttatgaattcgctttacattcttttgcgcacctaagaccaagcatcttgaggatggtattatatgtatttgtttgtaggggactaaagtgggaaaaagggagaagagtggggagaggtgaggagtgaggaggg

SEQ ID NO: 28601 - DNA, 2340 bp, Cannabis sativa
tcattcaaaatttacgttcgatcaatatttttgaatgatgcaaatggatgacaaaaattttagattttgtagtaggaaaagacttattatttcattacaaattcttttcttgaggttatttattgatagcactttacatagggtcttcattacatctcaaactcaaatagtggagttgaaacttaagcaacttgttagttcaaaatattgagtagtttttagcttaagttgaatactcggttgtaaataaatatttaagtaatttttgacagtaataattctagtacttgttaaatattaaattattatccacatatcatttttttattggtatatttaaattaatcaaaaattactacatagtaatttatttaacatttaatagtcaagtaattacaaaattaaaattaaaattaaatatttataccacaaataattctacaactacaaggacaaactaaagtaataaggataacagaccacaagccgataatagtaaaaaataatagaaataggggagttagtgagcatgtatgcccttagaaagttttgtggccgttttttcttattttgaatttccctatttttcaactgtttttaactgcttattcaacagtttttttccagatttcctttgagtttctacggttattgttttttcctacaccctttttcatcaccttcttcatctttttggtttttctatggttttcaatctcctcttttatggcatttcgacctcctcctcccagtaataacatctatctaactgatattgacagagaagtgaatgatttaccagcctcagttcaattacgaagttcaaatcatattgatcatactctttttgcttgagttttgtcttccaaggagattaatccgaagacgtttcgcatcaagatgaatgtccatgtgaagggggtagataccctgtaactatcactgatcaccattctggtctctttatggtcacatttggatgcgcaggagacaagaaaattgctcttattatggaaccttggcactttcaaaaccatcatattgtcctacgcgcaccttgtgctctttaagaagtcactgtggaatctatgcatcattcactcttttgtattcaattacatcgcctcccgtttctaagcaaatctaaagccatggctgtgtgggctggcaacattgttggaacttatctagaggttgatgaagactctcttcatgagggatggggaccctttcttcgattccaggcattgttagatgttactaaacctcttttacgaggcaaaatggtaagaattcaagattctagagaggaattttgggttgaattttgctacgaacgtctccctgaattttgcttcgaatgtggtatcattggccatccatttgaacattgtcctaattttcttgatcaaatttataatggtcggaaccttcactgtcatacggtccagaaatgatgggagcacctttgccttcttcgggttatgatcgatatagatcaaatttcttcaaaggcaatgtatggcctctcatgactagtatagcaaaaaaatcttttgctgcagccttacctcgcattgtggataggccaaatccccattcataccttctcactgtgactgaagcttcatctccatcttctatgaatcagccccatcaaccaacgcacccaacatatggtaattcatcacaaaacatttccaatgatgcctctgttatcccttttccatcttatctaccagtctcacttccttcctccattacagatccttctcttccctttgccacttaccctccctacactaatttacattactctcaccatacttccaacaataccatctcctctaaaaataaagctatcatatcaaagtcaacatctaccacaattcatttctctgatattaccaatagattatctcataatagtagcaatatacctactaacattgcatcttcatctattgatcgagactttctcggacataacaacacttctaaatgacaaattgaatctgaatctctttgcaaattccttaaacgccgttcttaaaataatggtcagtctgtcacaccagtctctgctgacccctcttctacttcggttgtttctggttttactacggattcagccttacaacagtctggttctttcgcggtggatgctatgcaccactgcgactcgcgatgaatctcataagttggaatgcgcagtgattagggaaccccactacattcagatttttacgcttgcttatctctgagtaggctccctgtgtgctttttcttatggaaacaaaattacaagctggtagtattaataagtttcgtaatagttta

SEQ ID NO: 28602 - DNA, 3350 bp, Cannabis sativa
  modified_base (514)..(528): a, c, t, g, unknown or other
tgggacccgatacttaattagaccaataacgatattgacacataagaaggtgttaggcaccactgccctttagcatttctctttattttttgttacaatttgcaacataaaatattatattgtacattggagcataataataaatattgtagaaaatatatcatttgtttatttttgtaccaaatttagtacaataatatttacatgttgcattcatgcattggaaataattttatgcactaccactgtgaggtggcactagagatgaatacgagatgggtaataagtggggatgctcttcctgtccctatcccctttaattatttgaggttttctcatttttatacttcaaaatagttctttttttattttttttatttttacgaaattctacatggaaatccttattgtaactagcgctgcaatctaaattgcaacaaaaaatcgtatagaaacccatattgcaactattttatagaaacccaaaccgtaaatttaggtgtcgtttggtaannnnnnnnnnnnnnnttttctgtttttaaaattagaaaaatgaaaatatttttcaaaaacatgttttatataattattactaatgcagtggttcaactttctttcacaaaaatacctatttttttttcatataattttaataattattggaagggtaatttagtaaattcacatatatttatcttctctttaatgttctctccacttttcggtgaataaatattggtctcaacttttcggtgaataaattttggtggaccccattcctatttttcctctccattttttctctttcataccaaacagtctttttaattttttttttatttatttttgaataaaaacgtttataaataaataaaaaaagttagacctcgtggtcattacaaaaaatagtagtcggaatagtagatatttctaccgtaccgttaatattgttagcgaatgcccaattaaccacattatgggccacaaaattacaatttcataccaaacagtcaaacatactcattttttctctaatttgaaaattgtacaattgttttgactcattgaaatataaccctttcttattcaccaaaagtatgtatatttaatattctaatgtatttctattcatccctacctatcaatatatatatataatgagacttttctctctattcattaaactaagaagcatgtgcaaacatagaaatcttttaagtagttgaggagtatatagggccacaaattaattaatatatatataacaacttataataaattaattgtataaatagagcattgtgttatgtatatatacaacaacaacatagagaggtattcacaacacaattatatattctcttaatttctcaatggaaatccaaaataataatatgagatttttagagaataagacaattttagtgactggagcagctggatttcttgcaaaacgtaagtacaacaaataattacattatatgtttttttttttttaaataaactattattgcatgtgttatttatttttgtttttgagaaaaattctttctttgcaacttaaatttcttaaatttatatatatttatagttttggtggagaaaatactaagagtttcgccaaatgtgaagaagatttatcttcttttaaggacttctgatactaactctgcaagacatcgtatgcataacgaggtatattatttagttatttatcttataatttatgttttgcttgtttggtattaaattaaggaaaaacattgaaaattttaattaattttttgtgtcttattaaagtaatttgattaaactaactattttaaatactaaaatttgtaaaataatctcaattaatttactctatgcgaccatatagatgcacaatgtaaatttatagtcgttttacgattataatagtcatttatggtcgcacaatataatttataatcatttcggcaaccataaaaatttattaaataaagttattttaacttataattttttttataaaagctatttttacaaaatattcatcttattatgaatattattacattacacttaaattatattaaaaaaaaactagtaaatttaattatatgtatttagctattaatgtaaatttattttataatttactaaatatatttttttcacagatttactacaattgttttatttttttcacagcacatttatactaataataaactaacacatagtattgtagccaaattaaatgctatattataatacaagctaatacaagattcgggggtctggggtctgagtctgagtctaggtcaggggttcgggtctgagtgtgggtctatcaaccccgatctctaaatccagacactttctaaatattataatacaagctaatacgaattattcgttatgtatgaaataatacgagctacattatattaaaatttataatcataatataattaatacaatataaaattttatctaaacttaatattatttattatttaatacaatatacaactcgtatacgatttgctaaaagaacccattcgtaatgcaagtaaactttttgttagataataagttgatgataattaaacttgtattttatttttatttttattttttctataggttatagaaaaagaagtgtttagggttttaagggaagaaagagggaaagattttgatgaatttatagagcaaaaattagaagcaattggtggagacatttcatttgaagacctcagaattgaagatattcatttaaggcatcaaatttgggacaatttagacattattatcaattctgcagcaacaaccgatttttatgaaaggtattaatattattttactctttatatacattaatatattataattaattgtgtttattatattgtgttaattaatataatatatatatgacagatatgactattcattgtcaattaatacaatgggagtggttcacatcttgaactttgccaagaaatgtcgtaaaaaaatcactcttcttcatatctctaccggtaattattattattaatttttctattattaatgtatgctacctctatatatgtatcttttacattaaataaaaaaaaaatatgcaagtatctaaattaattatagagggagctaattaattattattaggtattagtgatgtttttgtaattagtactagatgattagctgcgaatgcatggttatattatatttcttaatatatataaaatttaaaacaaatgtgaaaagatattattggtatctagtactatcttaggtgtagtattgttattgatgtatttaaatatcagatttcatataataacttaatataatta

SEQ ID NO: 28603 - DNA, 2002 bp, Cannabis sativa
  modified_base (105)..(113): a, c, t, g, unknown or other
gttagagatctgactagaaggagacattattccgctgccatcaatgtaaggttttcttatcttgatatgtgtttatctatggttttagaaagttcatatttaggnnnnnnnnnaacatacttgtgagtagatctcagatcctcgtaaaataaattccaacaatactctgaagaattgaaaggatatatctgaaaaaagggtccactataatattgtttagaggaaattctgggttactatgactcctaacaatctcatctattctatctatgaattctctcattggattcttagcgtgatttaaatttaaaaattaactatcaaatccccattgatccatcaaggaaatacgatgaaggctaggggtatggaggacgaagaaatgcctgtttcctttcctaaaagtgctagcccctagagttcctttgtctagataggttacatcatacctttcctgaatctccttaggcttagtcaacgtgttcatatgccggagcttccattttgcttccaagagtctgtcgtccttagcccctgtgataagtttggctaaataacgagccaaatcatccttaaactccttgggagttttactatgtcccatgttgttaacattatcaatgctttagaaggccgcaataagtccatgctcctggagtagtggtgtagcgaaaaattctttgactttcagttggtcctcgatgaaaaccttgtactgggccttctttatgatcatttcctcggtctcgacactcaagggaacataatttgtcaaaagaaacaaaaaatagagaagttcacttagcatttgaaccaaaacagaagacgagggagaaaaatgaatccagaaaaagaggagaaaaaatgtttacctatgagcaggaaactgaggtggagattaggcagcctccttactggacagccagtagagaaaaacaaaatatcccctaagattgtgggtgcacttgctaaagctcgtgggacagtaagcgtcagggtatttctcaagcttataaaatcctagtttgctatagtttgtcctaatcaaatgacactttagtgtgtagaaaaacaagacctcctctagggagggcactttgaacgtgttcgtcttgcagaaaatataccatctagccaagagcttgtaggatggaggtattagcagcaacagagctattttgacacaggcagtaaaaactgcaaaataagttctaactaggaggtgaacaccattttaaatatgggactaactccaggcattgaactcctccatgctcacggaggaagattctctgaattttccatcctatgcctcatcaaccccaggatgttgagtagtccagccccaatggcttataacttaagcatcccgtacgagaggatgatgttttctttttgatccatctcccaattggagtcatttacctctaaacaacaggctaagccctagtcctcctttttcttttaaacatttttggggtgccagatagggtttgttctgggatgggggccaactacgttccctctatagaaatctcctcttgagttctctcagtgatgttcctccggcaagaaatttggtggagttttcttcaatctcctctgcatcaagttggaacacctcgttcaaatccatcactaataaatgaaagaaacacaccaagtgattaaataaccactatccaaaagacgaactgggtattggggaagttctcacctaaaatttcttggacaggtccctgccggacttgtcgtttctagtaatgaaattgtcacaagaggctgaaaacgaccggtcagaaacctatgcgaaataaccaaaaatgatgtcgacacaaacaatcctaaaaagtaagggctattgtagggtgttgctgactccctataggcataagataatgaacttctcagaagtacattcgaaagtcctaaatctttgttcaacactaaccctaaattcttaccagcatataaagcttacaagctactgttggatacaacg

SEQ ID NO: 28604 - DNA, 1663 bp, Cannabis sativa
accccggcatctggtggtttgggacagagccaacggttctgtgggaaccaaggccgaggtagacgctacggttattcttaccttgattgcccacattgtaagaaacatcatctaggagagtgcaactagaagacatgctttcagtgtggcatgattgggcatttcaagaaggatttgccacaggcgaagaaagaagagcaaaaggaataggcaaaacccgtacctgcttaggtgttttctatcactcaagctaatgctgtagcctttccttctatggtgacagggtagcttcttatcaacaactcctattttactgtgttatttgactctggggatacacactcatatgtggaaacatgagtaattaatcaattgggtaggccttgtgattttattgaaagagggtttggaacccaactgcctagcggggagttggttatctccaaaaggtgaattaggtctatgccagttagggtcgaagatagggagttgagtgctgacctagtagagtttgaattagcagattttgatatcatacttgggatggatttcctatccaagtattcggccagcattgattgtaagcgaaaaattgtaactttttagctagagggcgaagatccatttatctatgtttgatctgttcaggggtctcaatcccgattacttcattcttaagggatagagatttactacacagtggatgtgtaggattgttagtggttgtgattgactccaacagacctgaaacatttaggcctaaagtagtcagggttgttaaagaatttcttgacatatttcccaaggagttgtcgggattaccgccacatcgagaaatagattttgtgattgatctggcacctggagtagaacctctttcaaaagtaccatatacaatggctccatcagaactcaaggagctaaaaatacaacttcgaaggattcttgatctaggttttatccgacccagtgtatcgccctggggagctctagttctatttgtgaaaaagaaggatggttcccttagaatgtgtattgattattgggaattaaacaagctgacgattaagaataagtctttgttgcccagaattgatgatttttttgatcaactttagggaaagactgtgttttaaaaaaattaacctacgatcgggttatcatcaacttagaattttggaagaggatataccaaagactgcgtttcgaactagatatgggcactatgagtttttggtaatgtcattcggattgaaaaatgctccaacgacctttatggatctcatgaacagagtattcaatgatttcctcgataactgttttatagtgtttatcgatgacatccttgtgtactctcaatcaaaagtggagcatgagcgaaatctccgaatggtattacggcgactcaaggatcataagttgtatgcaaaattcaaaaagtgtgaattatggttgtcgtaggtatcttttctagggcatatttttggaaaagattaaatcatggtttacttgggaaagattgaaatcagtaaaaaattggccgaggccaaaatctgtgacgtaagtgtaaagttttctcggtttagcaaggtattatcgatgtttcatcgaaagattctctaagatctctatgccactaaccgagctaactaagaagaatcaa

SEQ ID NO: 28605 - DNA, 1294 bp, Cannabis sativa
gctatatatggaatcaacaactctatggcccataatgaaattttttagccatacaccatttgatatagcctctaaacaagaaacaaatcaccctccatagtagaagtagcaatcaaggtttgcttattactcctttatgacacaactccaccaacagatgtatacacataaccagatgttgatttacgtgaattggtacaaccagcataattagaatctaagtagccaactacttctagactttcgattcatttggacatatatttgtaatccttagtaaaaggtacctcataactttctttgcacctttctagtggtctatccttgggttaccctaaaatcttcttaacactctgatagaataagcaacgtctggtcttgtttacgcttgaacatacattagggttccaacagtaaaagcatagggaatgttcttcatttcttccttttcaaatcaatctttggacactggttcaaatttgatttatcacctttaacaaatggagcaacacttggtgaacaatttttcatccataatctttctaaaactttattgatataggcttcataagataaacctaagatacctcggtatctatctcaatgaatcttaatactaatgacataggatgcatcacccatgtctttcattcaaatttctttgaaagaaattatttcacttaatgtagcaatcccttatcattagatgcaagaatattgtccacatataacataaaaaaataaatcttatttccactaaccttcagatatatacagtaatacatgacctccttttcaaatccaaaggaatagatgtcatcatgaaattttaattactattagcatgatgcttgttttaatccatagataaacttctcaagcttgtataacaaatgctcaccaccactagaggagaatccttatgttaacccggaaacttttcctagtgacgtggacatcaatttttaacacgtgataaggaggatgacgtcactgagttgagtagacctaagtcatagctatcgacctgggaggggaccctagccctgcacctaggttgactttgggagcttcgggatggaagcttgaacttcaataacttagattaaactcactatcttttagtattctgtaccataaagacatggagtgacctaatccaagccttgggagcaaaaattgcatgaacttgcaacccgcaagacaacttgggcatttagggtttcacctagcgcccaagttgatattcccaactagggttttaatttctgggatcgttttagtgcaagtgagt

SEQ ID NO: 28606 - DNA, 1844 bp, Cannabis sativa
cctccccgatccgtacccatcttccttcctcctcaccaccttcgttcctccacccaagattggcatcgtgagccccttgcaccctggaatttcagccatcccccttcgtcgcccttccttccttcgttccaacatcaccggccactggcaatttcgttcctgtgcatcattttgcgatttcaaaccagcctagattcaaccctccgccttcgttctataatttcaaacctaagtaaatttcattttcttatttctgtattcttaaatttaatcatcctttttaattcctgggaatttttattatttgtgcttccaccagtcactaatttcctctttccccttcacttgtttgatcatttgttctaatcgagttgagtagaaaggcctatgtaatagttctaaccagaatgttttggagaatcctgattgataaaactcaaaagtacgttggatcttgaatcatggacggtctaggcatttttatttatttgtttataactaattgattattaacgttttggattgtgagaaaatgatcagctaatactgcttcttttgattattattattatattttttttatatttgggtgaagtcactagaggcagcggttcatcgatctcttcctaaaatgttttgtgaacaagaaaacacagaacatgaatcgatcaataaacctctgcatccaacgttaggtcttttttttaaaaaaaataacaatttgactaatactgactcaaaaatccaacaaaattcaaatgaatctatgtttaataattgggtttatgagcttttttaaagattttagttataaattgttgagcaaaagaggttcctgcccaccaggtctctcatcagtttgcttcttaattatactaggacacaacccaaagcacatgcagaacctgcgcaagataatcatatagaaatactctgctttcgtgtgagtttgaactagcctcttacttttgatggatccactgagattttacagaagtagaatttgttttggtgtatgtttgaactggcctttctagtctagaattagatagaccactttggtgtgcttcttgattgatataataatgtgtaatttacagtccactttgacatattattctgcaaagttattgatatgtgtttaggcatgctttaatcgaactcattttctctgcattttaatttgtacatatatatatattatcctcacaagattctccctcacacgagtttaaaaagaaaagaaagtggtggaaaaattggcaataaaaatgagtagaattggttgagggatcttcctcgaatggaatacttactatcatttgctatttttctcatgtttgtcaatagttgtcatcgttctctgttgtttgctatttgccatgccttttcgctgttgtgaagtgggggtgcaaggaggccaacttcttttcggactgccttcaattggttaatgccattaaaaagtctgtgattccggtttggcagctctcttcttcctttttgcatctgtttaattgtcttctcttgtggttaatagtagtactttttggctaccccattctgctaactcggtggctcacaatttggcggcttgggctgcgtcccataatgttgctcgtcctctgttggaaagggaagtaccaccctttgttgctactataaactgattctctttgcttggttttaattaagttttctattattttaaaaattaaagaacacattaacattaagtagttttgctcttctgtcttcttcttcttgaattattctgttatgctattgaacagacgattataatatcatgtttcagtactcattttggaaaatgaaaatgaata

SEQ ID NO: 28607 - DNA, 1413 bp, Cannabis sativa
gtaagtaaaactacaattttcattattttaaacggacacaaagttcgtatggacaaaaattataattttactaacattaacattaagtactataaactcagaacttgtaattaattactttttaatgaaagagtgatggttttctaaacattaaagttgtgtaaatagaaagattagccaaatataaaataatgtacatgtaatatgattatatagaaactcaactttattcttgaatgaaaatgaaattgttttgtaaaaaatcccaactgggaaatgagtctcccaaatcagctatagctaactatgttgccttttggagactctaataatgtaaatataaatatatatatatatacacacacatgatatagttgttattagagaaaaatggcagctattatcttagataatagacttgagaagaaattgaaaatgattaactaaacaagagtttttagagggcaactaatcagcagccactactggttgttacatactgattgagtgcagaaaaccatgatcttctgccttccgaatgagaactcgatcgcctaaagcttgatcttgaacaccgagttgccaactggctttgcaaattcctatctaaatcaccaggaataagcgaaggactgacatcaggggcgcccatacaaaagctcgaattgagtttcattgatgggaacctttgacaactcaaggatctgaaagaggatccgagaggggagattcgcgcacaacgaaactcgggcttgcaaaatggtgttgttagggatgaggaggagtcagctgctagtgctgcctcacttgtgcatgtgcaaaatgttagggacaaacttgttctcgcgatttcccttactcttgttggttttgtgcctggtagcatagcaaatgagactatgccattacgacatagaggacatgcgattgagcccggtggtccattagacactgttgtcacgcaatttgtggagcaaaggtacaaggcacaccgagtgcagaactcgtgatcgcagcctgtatggtgtgagttttgtcaattttgtgtccaaaaaggaaaacaaaatacttattttgaaatctttagctttgaatatgtaagatacttatgaggatctttttgatgattaacaagtttgtttcataccaaacaagaaaacagagcaaggtaaattaaatcatccattatttctaatcactaccaagattcaactaatcaaggggttggaaaatttatggttggcccttagagcaaatcgtaaatcttattcaaaagcgattgaaaataattttcgaaaacaagcttaccttctgcagcaacagtgcactgtctttctaggcaaacaacacatggatcttggcatgtcaatgtatcaccattcctccatccactttctctgcaaatggcaaaaa

SEQ ID NO: 28608 - DNA, 1900 bp, Cannabis sativa
tcaaagcttagagaatctaagtgatacttacatccaatctaatgtggataaagatatccttcttaagccaaagtgttctatccttggaggctcttcaacacttttctctttgacttataatgatgatatctccagaaaaaccctatactattgtgggtgccgttctagtaataatgtttattggactgatgccccaaatgtactttgccctaattgtagtaatactatttcgaggattttaaaaaattatgtggcacacacaacagcttcaggaaccaatgtaggatcatcttctggggctgaggaggaaggtgggtttgtgaaaggagtggttacttatatgattatggacgatcttcaagtgaagcccatgtcaacaatctccagcattgcaatgcttaacactttcagtgttaaggaagttggttctcttcaagagaagacggtttcggttggtattaatgaggtttgttttgtgatttagagttaattataattacattattttaattatgtatgtttaattttgttttttttgttttttttttttaatggatagggattgaatattttgaaggcttctctacacaccaaaacagttcttactcatgtcttcttggggaataaatagtagatcaaaggaaacaagcaagttgatctcttttgagttttattagttttaaaatgttttaatttatttcctttagtattaattaatgagatatttaaatatatctaattagatgttatgttaaagactttgatgatctcatttctatctaattataattctcatggcatgcatgcatattattatttactagatttacttgtctcaaatattataattcctcgctgcccaaatatagtaaatcaatgcacctacctaagcaattggaaagaaaagttttgtattatacttactttcttttgccctttcaatcaactaagccaatttttaatatttgttaggatcttcttattgactgtacaatcaaaaaagaggtgattgatttctaccgttcatggttggtaaaacatgcctttacaatgagctatcctgatttgaggaagccgattgtgatttgatgcttcgttaatcatgtgtgactctggtcaccccgtcaaaaaaaaaaaaaaaaaaaagagaggtgattgacctattctgcctaccccaaacctccaaagctagtcatatatattttctaccttataatataattcaatcatcaatataaaaataaaattatagaaacaaacaattcaactgaaaataaataactaaattataaaatatatttatcaattaaaagattccaaaaatagaattgacatatataatttctatttggtaaatgaaaattgattgagttctaattaaactatgaagagaatttaagcaaattaattacaaaattaactatttaattaactatttaaaatggttgagcttcaacttatttcaacataattttattttcaacagttttcagtttaatattatttgcactttataaagatagtaagtacgtacattatcagaaaaaacaaatttaattgggctttatttccacgtcattaaaaaaagaaagactttcaaaaaaacaaaagaaagaaattagaaaaatagataacatacaaatttccttttagacgtcatattttaatttaaaagtaatatggaattcgtatttatatagtgataacgttacaaaagtaatgtaaatttaaattaattatgcatgaatattattatcattttttcttctttaaaatatcaaacaagtaacaacttaaatgaaactacaagaatattttatctcaaatagactacagataatgttcattgcaaaaacaatcattcatatatataagctgaaataaaaaatatatatatata

SEQ ID NO: 28609 - DNA, 6523 bp, Cannabis sativa
tcgatttttccaacgaggtggaactttacaaaactattacatggtacgttttgtcaatacatatgatttagttttgaaatttattgaaaaagcaaaagaaagaaagatggtgatgtatcaaatttttctttttgttgctgtgtttagtatcatggagggacaaattttggccgtactactggtggcccgtttatttcgacaagttatgattacgatgccccattagacgagtatggtatgccatttttcttttgttggttttgaagctatttctatttgtacctctggtgtagttgttatgagagtgtcagaaacacttgccttgatattttaccatacttttgaaacaagatacatcataccatttttcttgagggggtctaaaattgctgcttttgtaatatatctagttctgacattaattgtgagtgaatttaaagatttccatgaatgttgcagggcttgttaaccaacctaagtggggacatctaaaagatctgcataaagtcattaaacaagttgaaggagcactggtggccactgacccagcaattagttctcttggctcaaacttggaggtaaccctttctaattctcttgcttactgtcagtccccacacccgaaaactcgattgttacttcctcttgtggatggtcatggaaaagctatctctaattcttttatgcatgaaatgtagaagcctcttacttataaagtgtcattaaacttgttcctttagaccttacttttccaatcaatttaacaagcttttcaccaacatgtagtgtcattaaacttcctcagaaaaattgacatgtttctcttcattcttcaggcagctgtgtatagaactggttcagaatgtgttgcttttcttgctaatgtaggcaccaactctgctgccactgtgacttttaatggcaattcatacaatttgccagcatggtctgtcagcattctaccagactgcaagaatgttgtctataacactgcaaaggttagaacactttctaactttttattgttaaatccatcagttgtctttggtgatgtaccttttgaaagtttatgtcttttgttcaaataatcaatcattttctactttgtccttgatcatttgatgatattctaagtgttcaaaatttggttttgacagattaattccatggcgatgattccaagcttcacacgtcaatctttgatagccgatgttgatgagtcgttatccttaggctcggcatggagctggataaaggagcctgttggtattacaaaggatgatgcattcaccaaacctggattattggagcaaataaatactaccgccgaccaaagtgactatttatggtactctttaaggtatagaagtttatggcttacatgtcctgaaattcaattttaattgatttcccctacagcctctaatcttgagttccatgagaatttatccttttattggttaattttgcagtgttgatgtcaaaggtgatgagccatacctcgatgaatcgaagactgatcttcatgtggaatcgcttggccatgcccttcatgcttttatcaatggaaaacttgcaggtatgaaaaatatatattttattccaatcatttgaaaacatggaatcttgaattctttatctagtaacctttgtgcttaagagatggatcagtgaccaatctcctagaggacacatattcttgaactatgccagccacttcggtaacataaggaaaataaagattgaacatttgggtgccttaaaattatgtcttgcaatcaggttctgacaagaatcattgagatttcatctcatcaccaattggttttgagatggagtctcgtaattcttgtcgtagtattagagtcatatacctaacgagcatttcgatccacacctatttagataatggcccccaaaaaaaatgaaaagttgcacgagatctgcatagtacaaaagatacttagagatccaaaacaaataagtgataagataaatggtaacttgtgataaggtgattcaagattggtgagctaaatatcaccaccatttggactggggaaattatcgagtcatttataagaacatgggttatttcagtcatcactaattgattttgagatgggacccgtgattgatataagttagtgtcattaatatgtaaattggttatgcatttctttttcttgaattcttaaaatcatactctgaatttaaactattgaaaactattaggaagtggcaaaggcaacagtggaaattccaaagtttcattggagatcccagtcacatttggttctggaaaaaacacaattgatcttcttagtttgacagttgggcttcaggtttggcttcttttactaagattaatcctctaaagcttgtctcctctatagttctttgcactatgatattgtttgattatttctaagaaaatatcatatgctttacatcagaactatggagccttttttgacacaaggggcgcgggaatcaccggccctgtaaagctcagaagcgctaagagtggtacgtcggtagacctctcttctttgcgatggacataccaggtcagtcttctttgtttctttggaacttatcaaagtgaaaaacaagtcttcattcattacaacaaggaaaaaaataccttcaaaagaactaacattatgattgtgtaggttggactaaaaggtgaagagctaaatcttcctagtaaagattcttcgctgtggtcgcagtctaccttgccgaaaaagcaacctttgacatggtacaaggtaatgtgaaggcaatgtagattactagagttttcgagtttcgttatatactaatgtgaaggcaatggattttgattcagacaagctttgatgccccttctggaagtagtcctgttgcgatagacttcacgggaatgggaaaaggcgaggcatgggtgaatggacaaagcattgggcggtattggccgagttattttgctccaaatagcggttgcaaagagaattgtgattacagaggaccttacagttcaagcaaatgctacaagaactgtgggaaaccatctcaacaattgtaagcaagctatcatatcatttacccgaaaaaggtaaaatttaatgaaactattcaatcctgacaaccatttcgttacacagatatcatgttcctcgatcatggttaaaaccaagtggaaacattcttgtattattcgaagaaatcgggggtgatccaatgcagatatcttttgccacgagagaggtcgagagtttgtgctcacacatttcagaatctcacccaccaccagtagatatgtggaactcagactcaaaatcgaaaagccactcaagcgtgcctgtattgttgctcgagtgtccatcgcctaatcaggtcatttcctcagtcaagtttgcaagttttggaacaccacacgggtcttgtgggagatttaaccacggcaaatgcagcagcactaaagccttgtccgttgttgagaaggtgtgttaccttttctattcacattttcttttcttaatgttgttaaactcgggttttactaacatttgtgacattttcacaggcttgtgttggatcaaaaagttgtaagattggcgtttcgataaacacattcggtgacccctgtgtaggagtaaccaaaagcttagcagtagaagcttcatgtacttaagcaattcatgtaagcaacagttgttgcctcaaagctctctcaagcatttgtgccagtgaatttagactaaagttttctccatacatgaaaataaaaatgtaatcttgcaaaaataataataataaaaatttacttcaaaactatatcaagagtctaacttcaaaaagcaaacaaccccaaatgaaaataaagaaaaataagcttcaacaatcttgtgcaagctcacaatttcaaaattaatgtaaacaaaaaaaattatccattctgttgaatcattggttttgaatcaatcttgctcttttggcttcatcgcgtcgaacatccaccgtaggtattcgttgttgcagaggacactcgaagagcgggaatgtgtgttggccaaaacggatgcaaaagagggtggttgtataccggcgttgaggaaggaaattcagcaaccttatgaaatttatcttccacaatatcatattcgtataaacgataagatttgtataacaagaataccacattagggttgttaggatgaaaatcaagcatgtacttcagtcgatttctccatgtagttctaatgttaatgtcatgtaccaaactccagtcattagtagcatcatctaattcccagattttcaaagaaatatcgttcgaattagctactaaattgttttgtgagagccttaatcgacctttagctaatccaagacgaaccatactgtcatagcaaaaatgcttccctttgttgaaacttaaaggaaacttaacaatatcatgagctaacattgtatgatcataattgaagagattgaatgaaataattttagaaatataatccttattataatgattgagtagaaaatataagttaccattgtaagaaacaggagaattaaagttgaaatcaatccaagggattgaaaacaagtatggttgatcagtgctccatttttcattatcagaacaaaatgttataacacaacaatgtgtagtacgagtagtattattgtaatcatgtggccatattaccataactttgtacctgatcttgttgatgatctgatgatgatgatggcgaccatgatcgattattaatccacctcttcctaaaaataaatttggaagttcagcttgtattggaggaagctcaatccactgctttgtaaagggattacatatcaacaaatacttgagtgttctatcacgtgaaattagtaccaaatcatcgcatgttgctaatatacgaagatacgtataaggtaagaagtcgagataatgatgattagtagtattattgtgatggagaatttgtgattcattggaaaaatattcatagtatggttctgctaattttgacacgttatcgtatttaagtatgaaagtgaaaggagtattgtctatagattgataatcataaaataattttttgtgacgataatatgttgaatttaaaatggaaaaccaaatcttacatacggatttacatcgaattattgacttaatatcattaagtttgatgaaaatttcaactagcaaatcttgatgggtaagaacttgttgttggagggccatcttcaacttcaatctcttattcaacaattaattaatggaggaactttgagattatttttccattaatttcttctacgaattattgttttttatttaaactgaaaccatataggtagatattatctatttctaatttaatttaaaattaactattaatgtaaacgataaaaatctaataaaaaatctgatatatagagtgtatgttttttattttaaatttaaatttgaatcttgtggatgatttttgttttttttgttcatttatatacgtatatatttatttaaagctataataatattttattttactaaactgatcataagccaaacgagaaaatggtgggccgttctctgaaaacaaaaatcagatttttcgttataacacgccatgtacacaaatcctaattctggggaggctaaagaaaaccgtttaagagagaaaagagagactctagtttgattggcgtctagtaatacttgaagtcgatcccataacaaattgaattgaatataattttgatgaaaataaaagtaaagaaatacaatcaaataaaattcgacaataaaggtgtttaatcaagaatgagaaattagaaaatactttcgtttcacatcaaaacttaatttatctaattttagcattttcaatttttatttttcagattttgaattaggatcataaagcatgcaaaaggtgatcaatcttaaacatataattaacacaaatatagataaattcacaatcacaaaaggagaaataataaatatcattaaccaaaaataatgtcaatcaacattcatcatctccccaaatagaagtttagttcataatctctagtcaaatccataattaaaattgaaacaaaaaataacatagaaaaattaagagagaagaaaagaactggttgaagcaatcgatcatcgccacaagccgctcttaaagtcttctcctttgtttctagggctccaattcagaataatgatcaaaaatcatgaactcctctttaaatgaaccaagttttctctttaaaattcataaaattacgaaacttcctttaaatattcggggacctgaaacaaaagaatcaagcataaaatagctttaaaacttgatagaaaagtcaaaaactacctaaaaatgtcacccgaaactaagactaaaattaccctaacaaggagagagaaaaaataataaaagaaagtgacatatagaagtaaaattataatatttggaatgcattttctttttcttatcaatgaatatctattctatataaa

SEQ ID NO: 28610 - DNA, 4698 bp, Cannabis sativa
  modified_base (461)..(463): a, c, t, g, unknown or other
ggcaaaccattcaatccggccaacacaacttatcttttgtagtaagggttatgttaagagtaggtcatggctcactgggttgaaaaatgataggccatataattatgggttggacacattttaactctatataacctaaactaacccatttcttaaaagatgttccaaatttaagacaactttcatacctgaaatatattttatattcacaaaatatatacaaatatatattttacgttttcataaataaaaaaattatattgtgataaccttagaacgtgaattaatcaaaacacatcactaacatgtagtctatagttaccctactacttctactaacaagcttaatgtgagaattaatgactattattaactttgctactcacacaatgataccactactatcttaattttttttaaagcactatattacacacatatatgtatcatttttttgtgtnnncactaggttaaataattttatcctgtttgtaacataaatattaaagtttaaaatatccatctaatccaacccaacccacccctatgttattgtactaagtagggttgggttgtacaataaaaaaattgaatggtttatagcttatctaaattgcaatcattacctctaacccagcgaatgtgcacccctaacatcacctctattttaatctttctttatatatttatattgattaattaaatttcacaggttaattaattttttatttattaagaaattaaaaaatcaacaaaaataattattatatttaatataaattaaaatagtttgatgtctgaaattaaaattagtttgacactacaccactctcttgattcaacgaggagaggaatagggtacataactacgttctggctcctgtgaagtagctaacgcaaacccatctcactctgttcacaatgaaaccccacagagtgctcagctctcgaatcttcaaacattacgcactcaaacccatcatcatcactgtccagtctcagagttatgcacttttctcttcagttcctcaaacccaatccgcttctccaaacaacccttcaattcctcacacactaaccccccaatttctactgaacttaatccactcttctcagtggcatttaatcaaacacctttcaccgaaactctcttcctctttaacctctgataccctcgtcagtctccatgaaaccccagaacttgttcttcagtttgtcaatcatgttgagctcaataccctcgatattaaaaatctttgccttaccatcgccattctcgcccgaattccttccccgaaattcgctttacatattataaagcaagttgttgatggcggcattgcgactaccaaggagattttcgacgaggttggaggtgcgcgagaacagttgagtatacaaagtaccaatgtttttgatttgttgataagggcttgttgtgaaatgaagagggctaaagaggcttttgaatgcttttactttatgaaagaaacgggttttattccaaagactgagacttgtaatggtatcttaagtttgttattgaaaatgaatatgctagagatgacatgggttatatatgcagagatgtttagtttgaagatcaagtctagtgtttatacgtttaacataatgattaatgtgttatgtaaagaagggaagttgaagaaagcaaaggagctcattgggtttatggagaatttggagattaatcccaatgttgttacatacaatactttgattcatgggttttgttcaagagggagagttgaaggaggtcgtttgatcttgaatgcaatgaaagctaaaggtataaggccggattcatatacctatggttcacttatcagtggcttgtgcaaggaaagaagacttgaagaagcatctgggcttttcgataaaatgatggaaatcggtttggtacctaatgctgtgacttataataccttgattgatggttactgcaataaaggtgatttggagaaggctttcagttatagggatgaaatggtgaagaagggtataaaaccaactgtgtctacttacaatttgttgattcatgctttgtttatagaaggtaagattacagaagctgatgacctggttaaagaaatgggggaaaatgggctagttcctgatgccattacatataatatcttaattaacggaaattgcaaatgtgggaattcgaataaggcctttagtcttctagatgagatgttgagtaaagggattgagcctacaaggataacatacacatcacttatttatgttttgagcaaacggaaaaaaatgaaggaggcagatgacttgttaaaaaagatgctgactaaaggtgttttgcctgatcttgtgctgttcaatgccttgattgatggtcactgtgctaatggcaatatggaccgtgcatttatgctcttgaaggaaatggataaaatgcagattcctcctgatgaagtgacttacaatactctcatgcaagggcgttgcagacagggaaaagttgaagaagctcgtcaacttgtgaatgagatgaaaggaagagggattaagcctgatttcattagttataatacccttattagtggttatagtaagagaggtgatatgaaagatgctttcaaagttcgggatgaaatgttgagtaaaggtttcaatcctacacttctcacttataattcccttatacaaggcctttgcaaaaaccaggaaggtgttctagctgaagaacttcttaaggaaatgacaaacaaggggatcaaacccgatgacaacacctattactccctaattgaggctataggaaaagatggcaacttcgaaaatggtagtgcatcatgatgacttgaccttattccctcaaatgttcagacaagtatgaggtccgagtcctcctaggaacctacttagcgctatagtttcctggtccccaaatatatgataggcggatcctaattcaaaaaaaaaaaaaaagtgctttggaggcaatgctctaactgtaatttatattttacttttaaagatgaccctttgacacatgggttggtgtggaacaagctttgagatcttctataacgcttccctcccttgtctattactgtcttgtctattctttgttagtgctgtgttttacgaaaagtttgtttgttggactgtaaagtttcttgacatagagtaatgtcagagatggatttaccaagttggtaataaattcaatgaaaaattactgctaagtgatgcattacatacatgtcatagatttaccgtaccatacggtttgcagtatttatggtccttttcttctatattttactgtgacaacaaattgttgatccataaagaaagagaaagcagcattcaaaatctgtccaggaccttctgtaggttgagataaattcacgacagttcaaagctgtaattaacctgagtttcataacgtattttaatttctagattttacttgggtgattaccatgcgatttccatttcatttgcaggatttctgtgaaaatatcggaagaagggttacattattctaacaggcggtaagtttacgttttttcttgtggaattgggtcaaacaccacaaccgcactttgtacatctgctttatagctaggtaatatgcctagaatctttaaatttattatgattatgtaaatactttagttagttggatagaaggtctgttgagttaaacttttttttttttaacaaatgggttaatcttagatgccacacttataaattggaaacacttcatgttccactacatataatagaataggatattcctgtggccctgtaaggatggaagagccaggcctttctttcttaaaacatgaaggttggcctctatctgatgtcatagaaaagaaagccaggcatcgtagatgtgagatgtataggatggattttcgctttggcctttcgaagacagttgaatcacccacataattaagaacataatttcataataaagaatctaataattcaacacaattgacgcaaataatgtgcatcttctactcaagtgttaagtaaattgtcacgtgacaatctttgattggtcaaattattaattttttttgaatataccaataagaaaatgacacgttgataatgacttaggtatttaacctagttattattaccactaaaaattaaattaagtatttatttacaactgggagttaaacttaaatatttatacggcaaattactggagttacacttaatgttggcctagtctcgtaatattgttaagggaccaattttcatctaatgtatacatggaaagtcaaatttccctctacaaattctatacttgttgatactatctaataatcctagtctcatgtaaactttccggtaatttcaactttgattaagaatcttatatttaacaagtacatatactcaacaaaaatataataacttcccaagaagtggtctagtggtaagaggagtgttggaaagtgctggtagacatttgttctaaggtttgaataccgttagacttagaaattttagagccagcaggagtcacagtcgtgccaggtccaaaatttcagaaacaaaacataaccatgtcacttatgatccctacaactcagttcgaagtttagatcctaatttgaattagattttttcttttgtttttataataagtaaagttaaactattttttttttttat

SEQ ID NO: 28611 - DNA, 1717 bp, Cannabis sativa
  modified_base (47)..(60): a, c, t, g, unknown or other
ttttttggaaaaccgtaaaaatataaaaaaacattctttgaacgtannnnnnnnnnnnnnttacaaaaaatggtgccttatgtaattattccaagtaataattattctcttttctttgtttttttcggccatgttttttttttcggaactttataatatatgattatattattttgggtaagtctactctaactcctaaaaggtacatcctttatctattttggcatataacaaaattttttagcttaattttttcatacgaatgtatgttatagttatttagttatatctgtaaatttttaaatttttttgaataatttataatacaaaaaataaaatttacatattttattatacggctattttttcttttacatatggtaagtaacaatatgaaccttattttcagcattgcaaactatttagaattttttaaaaaatttacaagtaatcctaaatagttaaagatcattatgaaaaataaaaaaatctaccagaacaaccctttaaataataagttttctatacttttggtgcctatataattatatacgtataggggaatttgtcttttataacataaattaacaccaaaattaaaataaaacttgacactttacaccatctcaaatatatacatattcttctgttatctattttctctcttcatcaaacccaaaaataataccatttgagcaattttcaaaattatttttaaaatgatgaacaaatttctatgaagcaagagccttaccacaagtatgttgtagaaataggtagagaaagtcaaaattttcaaggttttaagttttttgtcgctgaaaagaaatgggtatgtgaatttatattaaacttgttatttatgaacttttgctcaatgtgtccacaatacacatagattttgtttatctatagaagaaacaagttaagaatccggacacaaatgatgcctttttataagctttatttgctatatgttcttttgtaatgtttatctactataagtatgcaatgcaatgaaatcaaaatatcccaaaaaatgggaaattttagagctgacagttacaaattgaagtagacccacctggccagaaggttatagagcaataatatgtgcagatgaaatgaaaatgcatttgacaaatgaatgacttctgccttggtttggggatgaaacatgtgtactgtaacacattctgtgtaagaaccactcaccaacaaaataaccctttcttcttggctaagttaagttgcatggagaatgaatgaatcaattggaaatcaattctcacatttggttctccattccaaccttcattccttttccaaagttgttcagcaaggtctcgatctgtttaatctctttcggaattgaccccgttagtacctggattcaacaagtttgttgtgaattaccaaatgaaataaatttccccatagttaaaattagtggaaattcagaattgtctcagttatcgaaagaaaaaaactataaaagactatttaaatatttttcttttagaacaagcatgtgtctacctcatatcctgattctgtgatgagaacctcatcctcaattcttatcccaatgccttgatgcctgcatttcataacaaacccttaatgcattaacttccatcgtcccttggaacattcaaagccaagtgtagagtatatataaggtcctcataaagattgatctaccacatagcaccta

SEQ ID NO: 28612 - DNA, 1841 bp, Cannabis sativa
ttttttttttttgaaaaggaatctccataggcaagtcagccattatagcatgactagcacggagggttgaaccccaatccaaatagcactaactttgtgaaccaaagtataattggctaaaacatgagttatgccattggcctcggaaatacaaatgagatacaagcaacattttcaattaacctagcaagcaatcaatatctcggcagccatcttcctttagattaattgaacaacttcatgacaatcatattcgatgctaaatcgttgtatgttgcggcttattcctgtctgcaatcccataagaatagccatgagttccaattgcagtggttgaaactcgtgttgtagagctgtagatgatgcaaattgtacctctcccttatctcctctaatcacacagcccatacccgaacatccatctcctaatataaccccagcgtcgacatttattttcaccgtcccaacctcatgtgctttccatttagcttgttcccgttgagccactgatttcttcctattgctctcaccttgaaaatcagcaaaataattgttgcaccagtccactaattccactggtttccgaggaacacctctatgaacagccgcattcatgctgttccatatgcttcaagtaacaactagaaaaaattcgaattgttctttattccagagcttagccaaatgcattgaaaaagcaagctcatattcatgtccaatgcgcttaacttcctgtttgagtccacaaagtttccaaactgtatggctcgctttacattctcataaagcatggaatatagattcatgtgtcttttttgaacaccgagtatagatagcactacacatgacatgtcgtttggctagagtagagatagttgacagccatccataaactaatttccacacaaagtatttaatttttggtggtattttgagtctccatagcttcctccaccactccacaagacaatgatcatcagattggtttcgttctcttctcaattcactttccattcgatagccactcttaactatatattccccatgttttgtgtaatgccacataattttgtcttctgtcccccaacccaagtttggaattgtgagaatcatttctgcatcatccttattaaacacagttcgaacgaattcctcattccattgtccattccccagtttaagataatcaacaagaagttgagaaggaagtggtggttgatcataaatcttaaaagtcacaggccgaggaagccaaggatcttccaataccctcacttgatccccatctccaattctccatttatacccttttaagatgagtttcttcccccacactaagctacgccacacaaaggacgcataatttccacacttagcctccataacggacttattcgaaaattaagaagccttcaacacacgactacacaaggcagtaggattgcgtatgcaacgccaaatttgttttgcgagcaacgcttgattaaacattcccaaatctcgaaaccccaatcccctttatcttttggtttgcataagtggtcccatttagacaaataaattttcttttcttactccgatgatcccccccaaaatcttgctgccattctatgaaaactagaaatggtccccttcgttagccgaaaacagctcatggtatatgtcaagattgtttgaacaatagccttgataagtacttcctttcctgccattgtgaacattgaagctttccaacctttcagcttggcccacactttattctttatcatctcattcatctcctttttgtttctccctacaaaggtgggagacccaactattttccatgactgtcaacctct

SEQ ID NO: 28613 - DNA, 1425 bp, Cannabis sativa
agtaaatttttgttgtgactaaaactcatatttagtcacaacaaattatattgtgactaaaaaattttcactaaaaataattttttaatattcattctcaagttaattacacaccaatgttatttcgatcatcgtgatgtttgcaaaactcttttgtgacatccatttgtagtaatttcttctttaaatgtagcttgttacaacaaggatttcttcatgtaaatggaagctaacaattgttccacaattcatgagtgtcttctccttcaaataaaatcttctctcaacatttcatctccctaactaataagcaagattgcagtgagagttgttgcctcaacctcatatttgcatagtttgttcatgtcatctctgagttcccaatagttttatttattgcttacatgcaatcatattgattctccataggtacgtaaaattattagccattatgaacttgtcaattttgatgattttttttattccaaaaactttgatagggatttttatatcaatatgttacgacaacacgtaataaataagagaatatgagagaaaatgcactattgtggaagccaaactcacaagttaaaggatgtgaagatccccactttagtggtagacccacgatataattttagtgcgggttaattaaattttcttaaatgaagttattatatagattggaacaaattttagcatctaaataataatatgagattctacaattcttttttttatttaattttttatgttgaaacttgtatatattaattatagatcaaatgtaatttaaaataatttattatataataagtttttttcctatagaaaattatttgtagtttgaatactctatctcaatactttgtaattttttttttctcaaaataatatatttatatataaataaaaacagaagatagagttgagtgaattatattcaaaaccatacctaccaagtaaagaatgaacacttacaccaattatgatatctaaaaattatatattatttctacctctaattttatataatttgttttaaaaattgaggaagggcttaagtcctccctgggctttatgtaggtccaccttatgacctcctttaatccttttataaaactaccctctaacatgtgcttggcatattgaccctgtttgattaagcttttacttttgtttatatctagaagtataagataagtataagttttattttatttttttaccgttttgataattattatataaatatcttttttttaataaatattaatttttaaaatatttggatatcattaaaaaaaatcttttctgagtaaattaagaattatatagattattttaattttaaaagtagtttctcaaaagtctttttggaagaagctaaaagtcatagcttcttcaaaaatgacttttaaatta

SEQ ID NO: 28614 - DNA, 3613 bp, Cannabis sativa
  modified_base (2472)..(2474): a, c, t, g, unknown or other
ttgattttctaagtatagaaaatcaaatttcccttagttttattgaagttggatcactccattatataggaaacaagtgatccttcaatttacataactggtcagacaagatcattatattatttattacagttaattaggataaaatacgtttataaaataaatgacaacaacttcgaccgttcttattaaatattgaagcaagtgtaattattgaagttgcacattggtcgatcatattctgagtaacacatgaactcacaagttcgttggagttactcacatattgggtcttcagaccattcaggaacgcataaaccactcgggcttttatagatgtgcaaacctagtattttacggaatagaaagcctgcgactataccaatcgcgtattgggtatttatgtaatgactgttggttttgtggtattaaatcaggtacgcggagaaagtatttatttagattatcattgtaccacactcaaagatctccatatgtacatatattaaatctgaaattaaaagatgaaaggaaatatttacgtcttgaagcgaatcagggtattctcgaatcttttcgtaagttgtatcctagaaatagagacgtcaaactcacaccttgatcttccaccacacacaaaaattagtgtgggcaaataggatatagctatataatgtgttcttgagtttatctcaacatatgagcattaacttttttttttttttttttctgattaaactttttaacttttttaaattatacatatatagagatttaagatcataccgtatattaatttaaactaataaaataataataaagggttaactaaaagagatatttattatttcaaatattaaaagaataatatttaaatatttggataaatatatgtaactaattctgttatagatatttattttgaatttaaatatttagtttaaactaaatatctaataatcgattgaggaaatctctcaaccacttaagagaatatctcaaccaccataaatatctgtaatcactttttaaattgaaatttatataaatatttatattttattaattaatccaaaaataaatctaatgggaccgatcttatcttttaagcgcctatcaatgtgtcctaacataaggactaatgccaccattatcttaaccagataatggtgatgtgtttgcctagacaacactttgtctttttcctaatttatttaaataataaaatttaaaaaatatttattacaaaataaataattactaatttgacaattcaaaatagatttttccaaatatcgttatatagctttatccatttcttgatagtgttgtaaggtggtgatccggggaccatggacttataatactaagctccaataaatgagattatttattaaatctcatcaactaaataatattagttattaattccatgattactccactataaatatggaattgaactcatagtaattatataattatatttactgagtttattgcaatgtttcatcgatataatcaagttcaataattagccctccttgtgtcggttcgtaattagttttggtcaaattactaatttatccttctatttacttctttatcctttagtagtcttcatccactagtcaaagtataatttaaattcaatctaaatttgtgcacagcttttcagttctagagttaacacttaaaaggagccaacattcaatatgttaggaaaatcaggattccataattgtaaatcaagttcccactcatccacattattaaattcctaaaacagaagttgtaagaatcatcttctcttagaaactttaacaactgaatcaaagaaactaataccatgaacataagttcatattattactcaagattcaagttgatctactattgatcatcctgatgatatgaattaggtctttatagtaaacaacatgtttgataaagacaacttaattacatattgttatacccaaaattcggctggtacttctgaggaggacaggtgtcaacttgggagaatacgaatcaacgaatataatggcaattatattaaaggatattaaaatggaataactcattaaatgcggagctgatagagtatatttataaatcgctgactgcaaagtcttaagcgagataaggatatacaaactattgggttgtgtgttgacgagaaaccattctacgtcagaagacacaatcataaggatgacatcagtaatacaaagcgaggcaccaatcttgccacgtataaagagatgaagacgagacatgttgaatgttagaacacttagcgtataatatatattataaaaactaagcataacagttgaacgaatccaaacatcggatagcgagacatccatctcgctataggaaggcatactcatggtaccttcactaattagcttaagaaatctttaaatgagatccacaactccatcgagtcagctctctcagatnnnagctgacattcaaatgatgttgactgctgaagttcaccttgtcaccaagaattgcgattgcaagatggagcgttatgccttcaatagcagaaacgacggtatttacattatcaacctcgaaaagacatgggaaaagctccagctcgctgtcagagttattgttgctatcctagcgaggtgacccagcgagataaactttacagcgtatctaaatccacgttagcatgacctggtaaaagtggatagatcatagctatgtgatttttaaataataaccacatttattttatgtgggacgtaatcaaatcccataattttaggggaatattattgtgggatattaatcttattgtaattaattacctccctatgtaactataaataggggcagaatacactgaaaaatggacggaaaatccttaggagaaagaacgctagtttgtataagagaaacctaataagatagactcgtggactatgcagaattttaattacaaaaccacgtaaaaagctttatgttgtttcttcttcttttactacgattatttctgtgcaactcaatcacgaaataggctttaatatcgttaacaaaaatctgccttaacagtttggtgctttcattgagagcttacgtgaaaaaagctcaaaaaaaaaccctcctgaccaaaagaaaaacctttttacatggctggtagtggagaaaatgttgatactcatcctgaagagaccactcaccgtcctggaaaagagccaatgggcccacagaggcttcctaactcacgatctacacggtccactcatttcagaaggacccaacctgaaggtggccaaaatacacggtccacacgttcaaggaggactcagcatgaaaatggtcagaacccagaagcaaggaatgaagaacacaatgttggaggtcctcaacctatggaatatgataatgattgtgcctatgttcccacaagatacgtgccaattgtggagttggaaaatcgccatctcaggcaccgcctggaggaggcaaactgacgaaatgctgagttggaacgggaagtagccgcggtcagggcggcacaacagaacaacacacaaaaccaatctgatcctggagtgaggagaccacgaggtagacctcgcgg

SEQ ID NO: 28615 - DNA, 1925 bp, Cannabis sativa
  modified_base (1866)..(1879): a, c, t, g, unknown or other
ggcataaaacccaacattttcttggctgataagtgatgtcgaactggccaagctcaatggcccacttgagtagtcagtctgatgctccaggtttctttaaaacctgtcgcaacagttgatcgttgtagacctttatagggtgtccctgaaagtatggtcttagctttctataggccaagagcaagctataagctagcttttcaatgagtgggtatagactttcggcgtcgattagtctcctacaaatgtagtatatagggtttttcacacttcttcttctcttgtgagaacaacactcacaacatgctctgtgattactaggtacacgcctagctcttcgttgtctaggggttttgaaaacacaaggggttgagcctactgtttctttcgctcttggaatgcagttttgcattcttctatctactcgaattttttgttgcctctgagaatgttgaagaagggtacacatttgtctatagacttggacataaatctgcttaatgcagcaatgcgttctgttaggctttgtacttccttgatagttgtggacgactttatgtctaaaagggcttggatcttttctgggtttgcttctattctcctagcattaactatatgaagctaaggaattttcttgagcctacccaaaaagaatatttgacggggttaatcttcaagttattgttgcagaaaatttttgaagcattcgtccagatcctccacatgcccccaacctttttggacttaaaaagcatgtcatccacatatacctccatgatggggctgataagatctttgaacattttgttgacaagcctatgatatgttacccctacaatcttcagctcaaagggcgtgactttgtagtagtataagcctaagtctatcgtgtagcctatatgctcctgatctggttgttgcatctttatctggttttagcctgaatttgtgtccacaaaacttaggatttcatggttagctgtggcatctactagctggtcaatttgagaagtgaaatgtagccttttggacatgctttgtttaggttggtgaagtcgatgcacactctccactttttattgggtttgggtaccagcactaggttggatacccaaagtggatagaatgactctgttatgaacttatgggctcgtagcctctcgacttaatccttgagtgcttgggcgcctcgttgaaggcatgggtcatgtaatgaccgctttagtaatttggattagtaaaggcaattagcactaatttttgatatttttataattatttctgaatttaattatttgtgggtcccgttgttcgaaatgggcattagagttataatttctcaattccgtagattttattaaactctagaggtattatttgacttatatgtgaattatgcaatttttgtaatttttgcttagggacaacggaaaatgcgatggatgactagtttgatcacatggataagtctagaaccttattttttagtgggaaatatattggaaaaaataaaataccggggttgtgcggggttatggtttttgaccattttacccctagagttgaaataggttaaagttaagcattaggggtattttagtaaattgatcaagtggtggttaggtcgctgcctaggagagtgaaacatggccattttaatttcagcaaggaattaattttcctaaacctttattcatttgaggaaaattaaataaaataccaaaaattgagaaaaacactctcttcccttccctctatcttcgaaccaacctagaacaaggggaattgttgctgattcttggtgttttcagcaagaaattcagagagaatcaagcaaaggtaagccctgttgggttttatgccctnnnnnnnnnnnnnntcaatataatcagatttacttgttaatatagatcagaaataacatt

SEQ ID NO: 28616 - DNA, 1685 bp, Cannabis sativa
ttttatggagattgtccctcaagtcttcatgttgtctatcttacatgatgaaggcactacaagttcaaggatttccctcagcattttggctatcagcctacctagaattggaggtttttggttattcctatcaccttattgcggaataagaatgttaggacttttgttgttgtcagggggttattccttgttcctatcactgataaatctataaaaatatatttatttattaactctttttatgcattaatttagttttgttctcaagtaatttttagtttattttagtaattttttattatttttaaataaatattaactttattatttctaaatgagtattcttaatttttaccttttttaattttgttctcattttataaataattaaactcaatattgtatatttgtgtaagaattaaatataaaatgtgaacttgtttcttgattgtgggatcaaatcaaatttatagacttattatcataacccaatacttgttcattattttaagtgagctaatacttcatcaatcaaaaaaaatatgttgtcaagagtattttaaattaattgtagaactataactataaggcactggaaaaagtttatgaacttgcttgaaattctaagttgacaaatctcattttgctacaatactcctaccagtatattatttttgcattttaagccattttaatcattttagcttgttccttcatctagttatgtttgttaatttttttcactttctcattactatattttgttttgttgaaacttatttaaaaataattagctttttgaattaatttttaattttcaatctttgttgagatgatactgtgtacacttacacacaaattttcataacaatcaccttgaagcataataggaatttcatggcacctactacgagtatcttgcctattatctctgtcaccctagggaaaaatagggtttttagggactcattgactaggcgaagacacatattgtgcccctaggtgttgatcatcctggtcataatatatgttgtcaacttcatcatcatcgtagtcattgatgtacatagtatgatagccgctattgatctcaaactcctctcttctttacctcaggtgtttgatgctggcttgttggccaaggataacaatgttgatctcttccatcgtaattacaattattgggatgatgggcaggttccatgtcactgttatttagttgaccaccactcaattgtcgtgtattttgttaacttgcctcgtcattagctaatggatcatgtgggatatccctagagtgtctacttaatgcagagcataaggcattgggaaaccaagaacattgataattttcttgataattattgggtagtacgtgctcattagtaggaagatcttgatgataggtgattagccaaggtccccaatctgctgaattactcttggtaactacctaagaaggcccaattcgtatctcactcggtggtctagtacctctgtgatcaatgctccttgggtgagccctatcataaactattttgatgccatggtttactcttgagccttgacctccaactcttacagtacctactccaaactagttgatgtataaatcttcttgtacaaagcgggcatatacaacggtcctcttgtcaacttactcttgatgagcttccaactcattt

SEQ ID NO: 28617 - DNA, 2469 bp, Cannabis sativa
caccatgcctcatcacctcaacctgcacctaggtggtggcacgatgtcaactcaccttccccaaggtcgaggtactcttcatcagggcatcatctcagccctagctgagatgcacatcattatggcatcatcttggacctagccgagatgcacatcctcataagtgcgtcatctcggcatcctcaaacatcctcatttcggttccaagagtgttaggataggctgttagaagttagttaggatggtggttaattctgttactacctaccataatgttattttccacatgttcaattctttctcctttatttttcacatgtatataaactgtgtaaagctcagattaatcaataagagatttctttctctcttctctctttttccctttccctctgtctttcctctgtttcttgctcatgcattcatggctaagaggttgaatacctctcacatggtatcagagccatttccgccattaacgacgaacatggcctctattgatcttggcaactcgaatcatcaaactgcgccccagggaaaccagttcacagctgcaagaaatcacaccgaacctcaagatgatgccaaccctgtctacttcaaccacactgtctcgatcaagcttaacgatcataacttccatttatggaagcagcgaatcttagctgccattcgtggcagttggttgcaaaaatttatccaagacgttccacctccacctcaatacctcagtgacaccgatcgtgctactcagagattcaatcttgagttcttggattgggaagtccaagatcaacttcttgtctcctagcttctctcttccatggctgagagcctcttaactcggatggttggctgcaattccacacgacaaatctggaaagctttggaacaacatttcacactgaaagtctcatccaagattctggagttcagaaccaagctccaaaaattaaagaaggccacgatgaatcttaatgactatcttcttaaggtaaagcaacacgtggatcttctagcttttgttggtgaagtcctctctgaccgtgaccatattgctgttatattcaaaggcctccccagcgattatgacactttcattatctctaccaacacgagtgttgaaggctacaccgtgggtgagatcgaagccttgcttcttgcttctgaatctcgaattgagaaggaggatcaagaagctgaaccaagcatcaatatggccatggttgatcaagatcctgcccttgaagccttctatgctcaagctaattgcgatttcagaccctctgcttatcctccaagtcagtactttcccaatggtttcaatttttctaactcttcttccttctcccattccagaggaaatgttagaaatcaagtttctcctcgaggatctaatgtcactacacaaggcactaatattggcagaggaaggggtggacgatttcctgcagctccaaaccgtgtccaatgccaactttgtcacaagcttggccatacagtcatcgactatttctactgctttgacaaaagcttcacaggagtttttcttgccactaatcaagctcagttacaagccaatgttgcccatataactcaaactcaagatgataactggtatcccgattctgttgcaacaaatcactgcacaccaaatggacaaaatatcatgacagctattgaatatgatggtcctgagcagctgtatgttggtaatggtgatggtcttcccatttctcaaattggtaacacttatctcattcccaactcatgcactaaacttttaattctcaataaattgctacatgttcctgattgtaaattattgtaaattttcccttttaattgcatttcattaatttttgtagagagataatttctaaatataagactggtttgttattaattttttatataatactatgtgaaattttgatttataatctaaatattgtacgtgtatatgcacataaattaatatcaaatataaagaatattagggtttagtcaattcaatgagaatttatagagagaagattagtctgtgaaacactatatatacctacaatctcatttcatatctaacatcatgaaatcagataaattttccatcttattattttattaattaattttaataatttaacatgaatttaagattaatatgtatttctagatttaatttctaaccgttcctaatattttataataattattaaattaaatatttaaaattccctacttatattgtactaatagcaccataaataccatatcattatagttagttccctttttttttccttttatgtactctttacctaaatgagataaaaaataaaattttaagaaggtcctgtcctttgacatgggtttgattttgtcctgttgtcctttgttgtcttgagttattgtctgtttctggtgcttgttttttgctgtgattctttactgctgcaatggcttctg

SEQ ID NO: 28618 - DNA, 4800 bp, Cannabis sativa
acccaaaaaattatttgatatttaaaattatacatatatttttagtagtttaataccatgtatttttaaataaaagggtccaattaatttttttctcttaaggcccacccaatctcaaggctggacttgtttgactcttcgattttttttttaagataagttttgttttttaattatttatttatttcaatcttataataaattgtaatttggttttattcatactaatatattttaatttttatcaataaattgtttgttaatagagatttattttttgtaggcttaataaaggacttttgattacaaagacttcacaaataagtttaattttcaataaatttttaggacaatgtttcttataaatattacgatttttgtgatcttttagtagttttaatattaattttttaaggtattttttttttttttgaaaagaagtgttatttattaagaagagctatcacctaatagaatagacaacaactcttaaggaatactattaataaggaacatacgttcagcgaaagacatagagtgtcgggcaatatgttattaatgtttttttttttatgcaacaatatgttattaatgttattgtatatgttttgtaggtgttttatggattttgatatgtagatatgtagaggtgctcagtgagtgtgttagtttactgttcttatatatataatgtttgatgtctacattgtgaatgcttatagtgattctaatcactattaaaaaaaaaacaaaaagaaaatattttattgcaataacatttctttgcaaagtaagtttttttctaagtgtccatggattgcttccataattttcttcataagtttaatatggcccctctttcttttattggaaataaattcacttggactaataagactatccgtgaacgacttgactgggttgtagcttctgattcttggggtgatgtctttcctgagcattctttgcatcatttgggtttttacgggtctgatcatagagtccttaagcttgttttaactcctcctaactctcgagccaattccactcctacccgtgctcgatttaggtttgagaatgtgtggttagaggattctgatttctataaaactgtggagactgcttggaaagagggacctaactctctttccacgggtggtggctttcatagtttcctggcccagcagaatcattgtgtttctgtccttcgagcttgggctaaaaatacaaatcattcgactcaatctcgtatctaatttttgatgcaagaaattaattacctgcaaaataaggacatgcttactagggaggactgctctaaacttacccagttacagtctaggttagattctttgctttataaggatgaaatctattggaagcaaagagccagagttcgttggcttaaggcgggtgatcgtaatacaaaattttttcataggcatgcatcatctcgtaggaagtctaataaaataaaatatcttaaagatgatgagggggttgtggtgaacacctcagagggcatcactgagcttgttatctcttacttttccactattttctcttctgagggatgcgatcttgaggccgctgcttcaatatttgactctttaggtccaggattggatgatcctgaaatctcttttcttgctcaagagttcactactgaggaagttcggaaagctgttttccaactctctggggataaagcggtaggtttagatggcctcaatgcttatttctaccagaaaaactggtctgtggtaggggcagatttcacaaaggctattcttgcttgccttaatcaaggttgtgatttctctgaaatcaactctaccctcattgttctcatccctaaaaagcagcatgccaatactcttaaagatttcagactcattagcctatgtaccactttctataaagttatttcaaaaattctggctaatcggcttaaaaaagttttggataaaatcatttctccatatcaaagtgcttttgtgtcgggtcgtgtcatccaagataatattcttattgcgaatgagttagtgcatgcagttaataataggactatgggtaagcggggatgggctgctttaaagttagacatggccaaagcttttgaccgggttgaatgggattttttgagacatctcatgtttcactttaatttccctgtcccttttgtctctctcatttttaagtgcttgactactgcttcaatttctttttctataaatggtcaagttcatgggtctcttaagccttcctggggtctgaggcagggtgaccctctttcaccctacctttttatcctctattctgaaggtctttcggctgtgttgcaagattttcaaaataaagatcttttaagtggcattgctatttctcgacatgcaccatcgattactcatttattgtttgctgatgatagttttttgttttgcacttctaatcggcaatcttgtgagaatttacatcatgctctttctctttactcaaaagcctctggtcagatggtgaattttgctaaatcttctatactcttctcccctaatacgagtcaagagatccgaaatctttttttccaaacttttcaacttgaggatagggagtttatcactaaatacttaggtcttcctcagtgtctgtcccgtgttaaatatcctgctttcacttttcttaaggataaggttgccaatattatccattcctggaatcacaaatggttctctcgggcgggaaaagaaaccttgattaaggctgtccttcaagctattccttcttatgccatggcttgttatcgaattcctactaaaatctgcaaagaaattgagtctctgatttctaaattttggtggggttcctcggtcgagtcacctaaagttcattggaagaattggtcaagtgtgtgtccgtctaaatttgttgggggtttgggttttcggtctttaactcatttcaatcaggccatgcttgctaaacaagcatggagaatctttcaataccctcactctttgttaagtaaagtccttaaaacaagatattttcctaattcttccattcttgaggcagttcctggtcataggccttctttttcttggagaagcattatgtggggatgtgctttgtttaaacagggccttatttggaaggtgggtaatggtttgaatattcgtactcttgaagatcattggcttcctggcagccggtttaaaacctattccacttctagccctccctcaccattcctttctttctttatttccccttctgggagttgggatagaggtaaattaaacaattttttttgataatgctttagtggaggatatattgcaggttcctatttcgggctataattgcaatgacactataatttgggggccagaagcaactgggattttcacagtcaaatcagcttaccacctagctattcagtctcgtgatatgcctacctcttcctcctttgtttcaagtaaatctttctggtccaaaatctggaatttagtagcgcctccaaaagttaaacatcttatttggcgtgctatctcccattctcttcctgttgcttcctctctttttttcagacatattatttctactccagtttgcccagtttgccagatgcaatcggagactgttgaacatgctatccttgggtgtcatcatgctaaaaaagcttggaaacactccaagttttttactttttacaataataataaagacaggtctttttgtttgtttgtggctgctgctttggatgtttatactaaatttgatctggctttgatgttctgttttatttggtccatctgaaatcagaggaacaatatttttcaccaaaaaacagggctctcttcgtaccaactttttgattatgcagctaactatttgcatgaatttttagatgccaatgctaaacagatggtttcgactccttctatcccgcggtcaactagacgagaattccagctccctgctggtcagtggatagtctatactgatgcagctttagattgcaaaaatttgaagcatagttttggagttgtggccttcgataatgcaggacatgccagagctggctttatggttccttgctctggtgttgtgtctccggaggttgcagaagctaaagccatacttgcagctctcgaatgggtacaagcaatccagcttcctgtgttgattattgcatcggattgtcaaagtgtggttactaaaatttctagctctttttgtaataattctgttctttgtgatgttgttaatgccattagaaattcattgttgttcaatcctaatctgtctgtaatttatgtcccgagagaatgtaacacaatagctcattttcttgctaaggctggattaggattagacagtgaatgtacttggaatggttctttaccttccaatctcacctgaacattgtatttgctgagttttaatgaatatcaggtttttctcaaaaagtttttttctaagtgcgagtcttccagagttttatttttattttttagtgcttcaaaaaatcttttttctttacaaaattatctttttttttttttgacaatttttcaaaattatctttaaactatcataattactataaataggatgtcttatacttctaccctatcacttaaattttattttatttattatagtttgaacttttacccgtaaaattttgatcttaaaactttctctaaaaatatatagagaaagtcatataaaattaactcaggtaaaaagttgatgtaaaagctcatgttattttagtttcttcttcttttttttttt

SEQ ID NO: 28619 - DNA, 2902 bp, Cannabis sativa
  modified_base (1387)..(1387): a, c, t, g, unknown or other
  modified_base (2703)..(2703): a, c, t, g, unknown or other
gctagtaggttattgataataagattgtaaaagcacacacgtggcgttcctgagagtcagggcgttacaggatctgtagtcctatcgtacgacgagacgtgagagcttttaaatccctggggaaaatcatctctcataatgtttggatggaaaggtttgagctcctcatctgagtcgtaatcaggcagtttcccatcttgatatttcttgaacttgttttccaactcgttgattcgcagttggattggatcctctagcttttggctggaattgagctgtttgcgtaaattgggcttccttcgattcaattgctcccaaagatttggccgtctttgatcatagtttcttgttgaccgtacctaagtaactcttagattggcttctccttgtatgactcacactctcttgatcattactacaccgaggtctatctcctccttgcgtagatcgactgttgtgatctcgagatctatagtagtatatgtcccgagctagaacttgccttgtcatgtacaggccttctcctttgggagaggttcgatacatgtcccctgttagggtttgtatatgcctcctccctatcagtgcaagaaggacattgacggtgtcttagtggcaacccagttgtcctagcttgagtcccaggatttctctcgttaccacgagagatttctcgttccctagtcctgggttgtcttctgttcttgtttctataagaagattctggtaaatcattattttcattcccctgggttgtgaatcctcggggtctctgaggcacttcttgacgaggtgcctaattatttggttgttcatcttcaggaacatccccagtttctccaggtttctcctcctaagtgttttgggggtcttctcgagccgtctcctgcctcttggttctcgagccccgaggtctacctccagcgttctcactctaggatcaggttgattttgtgtgttgttttcttgtgtcgccctggctgtagctgcctccctttccaactcagcatttcgttggtttgcctcagccagacgttgccagagttgatgactttccaactcaaccaacggtacatacctagtgggatcgtaggcaccctcactcatatgagtaaaaccaccagcatttgtgttgggttcctcattcctagaatctaggctttgatcatcatcacgttggcttcttcttgaacgtgttcatcgtgttaaacgagttgctcgtgaattgagtggcttccgagagcccattggctattttccaggacgatgattagcctcttcaagacgagtgttgtcgttttccccattatcagccatggagaaaacaattccttttttggttaggagggattttttttgagcttttatcacgtaggctctcaatganagcaccaaactgttaacgcagattttcgttaacgattatgagcttattttgtaataaatcaagcacaaatataaagaaaataataacgatgacaccaagatttttacgtggttttgcagttaactctgcatagtccacgagtctatcttattcaaatatttctgaatacatgattaaggtttttacaatcagtatgctcccttttctctctaagatttttttgtccccttttttgtagaatctgcccctatttatagtaatataagttggcagttaattacatttaagttcaaatcccataacaatattccccgaaattgtgggccttaattacgctccatgtaaatacgtgcggttaatactaaatcacacaattgtgatttaaaccatttgtgaggagatcaacgctggcgtggatttggacatgctaccaaatgtatctcgttgaggcatctcgccaagtacataagtgtatgacctagtttacttgcattcaagcaatggcatgagcaccagtgtactgagcaaacttaataactgccctttgatgataaggtcttgcagactggacaatcatgtccttcaagttatttcacttagttattgtaatgtatattatacgctaagtattttaataaccaattcacctcgtcgatgcttctttacatacagcgaggtagatgtctcactatgcgttgtctatgtctcccttgggattatgccttctgatgcaaaatgatttctcatcaatagataaatcaatagtttgcacatcctgatctcgcttaagactgtgtaatcagcgagttataaatatactctatcaattctgcatttaaatgagttattccattttgtatttaatgatataattaccattatatttattgattcatattctctgagattgacacgtgttactttttgaagtacagtcgaattttgggtataacaaaaacatagggtacctaacttgtatttagataaaacatagggtaccaaatgggtagacacccttagttatttaatatattaaaattatttacataaactagatttttgaaaaattagttggatatttgaattcaaatttgaatttgaattgagacatttcaagaatttgttagatttaaatatttttcaaatattttctaacagcctaatttgaattcaaattaagatatgtttttttaaatattttattttaaaatagaaatatcttaaccaactttctagatcttattacgttgtttgtttatttaatttaattatttaattcaaaaactttttttaacaaaccaattatttatttgatntaaattgttatgaataacttgttgatagattcaatgatctaaattaatcatagtccaatagtcaatagattaaggggtttttttttgtacgtcatatttcaccgtattgtattgtatagtattatattgaattgtattttatgtaaaactatatgtggtattaatttttatggacacctaaatatgtaatattttagta

SEQ ID NO: 28620 - DNA, 6336 bp, Cannabis sativa
ccacacaacaataaaggaaagaaaatttataaatggaaggataatcaggtataaaaatagacatgtacatataatacatatatatatatacatatagaatattgaatagatagactgacttgttaaaagcttcttgtgcatcttattgatctcgctgagaacctcttcctgctccttccttaaccgatcaagctccttcgagttgtccaatattccagcaatgtccggcgaagccatcgttatccttgtcccaaaattcgattcaagctacgattacagttcttctactttgattaatcattcctcgtcaaaatatctcactgtaattactcacaaattattattgttaataatagtaataatcacaaatttctatcttagaccgaaacaaataatgcaattagttttcaaagaccaaaaaacatgtatatgaggaggtgacctaaaaacgacgtcgtttttggtttgtaatcgattatgaatttatgatcgtagatcacatggaaaatatgccacgtggagaaacgacgatgatgaacagtttcgcacgtgccaatagtaagtaatcctttttttttttcctttttaaatttcaattttaatagaaattttaaattattttcaagctaattaattaactgtcacttacttaacagacactcgaacacgatacatgcatgtatttatttatttatttgttttatttttgagtgactaaaaaataattaaatttcaatttaaatagaacaaaattcaaaccaaaattttccgttaagaggttttttttttaaaaaagaaaattatgaacaaaaccgaaaactgaaccccaaattcattgtgagaaagaaaattaacccaaggttcgataagggtggaagatcagaattttaaatagaataaaataaacaaaaattagggttaggttaaaaagcaaacctgttgaatttctggaattgagttcatgtgtctggatttagaaacattcaatcaaggagatctggtggaacttcacgatttgatttatttatttatttttttggaaaggttggaacttcatgaccataaataattgattaaagagaaaataaccacaactaacgtggttgtaaattcacctgatttattattgggcctggcccaataacacatttatcttatttaatttaattattattattttttttttgtaatttaattcttgtttttatatgcccctttaaaagttttaattaggataataaataattaaatacatgaaaagaagaagaaaaaaagttgaattacagacactgactcaagtggttgtctgcatggtttcgaagaaaaaaaaagtggttattgcttttagtaagagacttttattttattgatgatctcgatcattttatgatgttataacaagcttgtaatttatatatctaagagtatacttaatttatgtttgttggatattttttcatattgtcttcggaatgtttagtttaaaaaattaaatcttaacaattaataaaatacatttaaaataataaataatattctaaaaatataaaacatgaataatgaataaaaaaaaattaaaataaaaaaactagatcttcattttaatgagataggagtatagtattttaaaagtcttattgtaatttaaatcattaaatttaaaaataaacttgttgttggtaaaagcattggtaatatctataaagagagaaagtaatcactctttcacatttttaaagaagtcctcacaacacttttgttatcattgaggaagatatggtgataggctaattcaattgttattgttgttcaaaaggtttggtttttatgaaatttttaaacatattataaaacatatataatttacaaactctctcaatattaataataataaattatttaggatttttttttttctattttgaactatttaccattatcaaatagtatccctaaattatttttatttactaaatataactattattattgattattggtgttcggcactttctatatgtagcactttattagcgatatttattaaaaaaatctttaattatatggtattctctacataattacactaataacaatattatatcacgaaaaatgctagacaataatttttagcaattttcattaattattcctcttgtactattcacaatatacaagaattttattaaattttagatgaacatgtataatttaaacaaaaaattagtttaaattttaagaaattcttttccaattaataattaataaaaaaaaattacttttaagaaaaacgactaataaaaaattaaaaaatatttaatttaatttaataaaaaaaatctgaaattaactgaactgttaaccttgttcaaataaaaatgaactcttaaccaattctcatttagtaataaactgccaaattaataaaaggtaaaatcttttgtaaaaataaaataaaatataaaagtgggtgggtgtgttcacacatggtcctcccatggagcttgagaatatgaatatgattggatgaaacacatcccaatttggttgttttctgtggaaacataaacacctgataatgctttccccaaactcaaaatcaccatcaccaccaacaacaacactcttctttcatttcatttcatttcaaattcttaatcatttccaacatattcaaatctaaacacagctaggtttcactttttttcttcttcttctgattaatattctcagattcaaactggtttttattttgacatcctcatcaactaacgtaagttttgctttccaatttcaaatttctttaaacccaacactgggtttaatttcattccttttatgttggattcaaaatagtaactttaattttgtttaatttgatatgtaactgcattgatctcttctccaattataatggtttagcgtagtagctttgattgcgaatttatttcctttctaaattttctttattctagatagcttttcgaatcttgtgaacccaaattcagaatgttctttcattgggttggtttgattttgctttaatgtgcctttatagcgattttcgtttgtgggtatttattgttatgagaacggtgaatctagttatgggttttaagctaaaaatctgatgattacattttcagggttggtttgtcaattgtgatgagagccatttgctcaatttccaagcactgaaaatatatagttttgatgagtgtattgagtgcttgagcagcttttacttgctgggccaatctgaactatacatttgtgattgtagagttggaataaactgaccaatatggtaaatccatcattacgagggtatggaccaatttctcttgtgagataaaactttatctttttgtttcagtttggaaattatttagtgttgaaatgagtttgtttaatggtggagtttcctttggttgcaggggggttataagaaaaccaaatgaaacaatgaggctagttgtgacaactttcattggaattgtatttggtttctttttaggagtatcatttccaacactttcattaactaaggtgtgtgatgaccattctttctttgtatggttctctttctcattcagatggttccactccagtcttattgtaaagaagtaattggaatttggatttttttttctatgtttaaatttgtcagatgaacctcccttccggcctctttccttcaattgatcttacatatattgaggacaagtactcgggcctgtcaactcgagcttttttcaaagctttctcatctttgaggggtaacagaggcgatttcaatcaagtttactctttcaacgatacaaaggtacgtggatggttcaattaaacatactactacttttggtggcaataggatagctaaaacggtgctcccatacagtttgagattcaagtctccctaagtatcttacaaaacaaatgttatagctttctatttctcaaatattgtaggactaggtgaggagctcagtttcaacaaataaaggagtgagcagaaattacttgctggttaattatagtgattatagatgttttttctttttaaagttcacattttcatcgtctttttatgtggggagagctaaaatgcacttttgttgtgtttatgtcgttattcttcttcggtttaagtgttgcaaagattttcttgttgcatgggctgagtacagtgagataataagtgtattgtactgtgcccatgaatgagattttacagtgatctgctcctagtgtattgtattctttaattgtaaatttgcaggagagtatccttcttctctaatgtgttaggatagctaataaacctctacttatactgcagatctgggttccaacaaatcctcgcggggctgaaagactaccgcctggcataattgcttccgaatcagatttctatcttcgccgattgtggggtctgcccagtgaggtgtgcatctgtcatcctctgattaagttttgctcccttataatgtcagcaactattatgcatgcaaaattgtaagaattgtgctttatgaaagtatttaaagaagctatgagtaaatattcatcaaatgtaaattgattcattgattgcttattgaaaactaaatagagaagacagaaaatttgagttctgaagaagattttattagtagtaaattctaccagattagaaattaatagatggccaagtatcattaagaatgaatgcagaacttactaataaagctttttaaagcatttattgaatctgattgcttctggttttcatttgccaatagacttactataaaatagtaagctttaaatgccctagcaaaatataaaatttaatatgtattctatatttagaaataaattgcaggacttttatgattagtaattacttagtgatttacataagtgaaatgatgatcagttgtatattatctgaacttttactgtggtgatggaatttgcaggatttaaccgtcacaccaaaatatcttgtcacttttacagttggttatagccagaaaaaaaatatcgatgctgctgttaaaaaggtcagtgttcaactgctgtttgttttctctctcttcatttctcaaactgacatacatgtacagttttcagagaatttcaccattctgttgtttcactatgatggtcgaacaagtgaatgggaagagtttgagtggtcaaaaagggcaatccatgtgagcgtcccgaagcaaactaaatggttagcatttaaatggttgcccgttacagatttttcatcaagtcctgtaagagttatgctcatataaaattcctgaatttcggttttaggtggtatgcaaaacgctttttgcatcctgacatcgttgcagcttatgattacatctttttgtgggacgaggatctcggtgtggagcactttaatgcagaggagtaagttttatctattgaatgtgttgcatttagtaaaacacttgtgtgtactatctgttatcatatgcctttaaaatctgctttgattcagatacataaaattagtgaagaaacatggtttggagatttcgcagccgggattggaaccaaataagggattaacatggcagatgactaaaaggagaggttatagtgaagttcacaagtaagagtgacaacattttccactcaatttagcttgaccatgcatattcaattttgatagtttcatttgagttgctcttttatcatttctcttctatcctttgtacagggatacagaggagaagcctggttggtgtactgatccacatttgccaccatgtgcagcgtatgcaaaaatattagattacatatttagttacttagcaagtgcactctatttcttccatggccttgtgaaagctgtaaaagtagttgctaataagttacatgtattgtgcagatttgttgagattatggcaactgtgttctcacgtgatgcatggcgatgcgtttggcatatgattcaggtttataatttgtactaatctgatataacctattgcatcttatcccctatatctaacatgtcaaatactttgttcctcttcttgcagaatgatctggtacatggatggggtctggactttgcccttcgaaaatgtgtcgaggtaggcaaaaacttgaaattatttgttccttgtttgtgattatgaaactggatttttttttcaacttaccttttttgcataaacagcctgctcatgagaagataggagttgtagattcacagtggattgttcatcaaagtgttccttcacttggttcccaagtgagtcttattcctagcttattttactattgatttgttcggtttatgtcgaataaaatatgaat

SEQ ID NO: 28621 - DNA, 3115 bp, Cannabis sativa
aagtgagaaaatattgttctttgttttagtaaggaaagattttttttatttttatttttaaaataattaattttttattatttttttaaatatttatttacgaccaataaaattgtgctacgtgtacactgtgtccacgtatacattccaccatggcagttaacagcaaaaaatagatagaaagggctaagtgctaacagaacttgggtttaggaggttttaccactaaaattttagaattggaggttagttgtaagtacctagccacttaaggaggttatgccgcaaattaccctataaaaaaaatcacaactacaaaactttattcaatagtagatgtgtggctttaactgttgatgtattgtgactttacatttatcattttatagttttaacaattgcttaactttattataggaattagcagataattagagatttatttaatcttttatcattatatgtctcttaacaaaaaattagaatttattttcaaaaatagactttacaataataattttttaattatgcagatatattaaaattctaagtgtattatggatattatatatgaaattaattttatattttttatattttatgcctagtaacagcagaatgcgatgatttgtccattagtcacctggatacggtagtgtatcttagaattaacgggacaagatagttagagatttagaatgtcaagattattcgaggttatagttttggaccattttatctctaactggaaggattacttcgtggctaagtaaagggcatattagtcttttgctctattttgttttattagaaaattaaaaggaatattggatatctttatattgttttaattctaatttattaggttagattaatcacaaaatcaagtaaacaaaaatattctctttctttctcttcaaattcggcctaaagataaacctaaggaacctaagaattcttcatcttctttagacaaaaaaacaagggtgttttagcagggatttcaagtgttaccaagtaattattcaaggtaagctcctttccattctttctctttgatttcctagtaaaaagattagttttgatgcatgttttggtgagttagtttctgttcaaatttgagaaggctatggtttgcttctgagcttgttattggagtgtttgaagttgattttgcaggttggtatctgttgtagcctagtttaagcaagcttgagttttataactcaaagcttgctcaacaatggtggttttcatttctagggtttgtagttgctttttattgttgatttataattatcggacacaaaatgggttctacagagttaaagaatgtttggggtaattttggtgtcaaaattaaatttttgggaaatctacaatagaaaacggcagactatttcttagaaacgtacggtctactgttttccctagtagtgtcccagaaaaatggcctaccctttttagagaaatggcctaccaattttgtggaattttcctgaagtcttatttttggtgtttccttgatatttagagtatttctacgctatttattgataaaaaaaattttagttttgagtttaagtccccaaaagtgatttagcgggtcacttatcagttttacataaattgtgacttagggctttaaattgtcaagcagtattttctacttaggttgactggcacatttgaattcagaatcaatgtgagattagtataatgatatgtatgcttacatgtttagcatacatgttttatagtttccagttagataacatatcagtaagagcaatattagtgtacatagagttgcactagatactgacggatatatgttagccaaatctaagccattagttcaaaatatccttaagaatggtatcgttgtaagtagagttgaattggatatcaatgaatatatgctaggctttatcacgaatgttccaaacttagtacgcattagaagcgagataggattgtgattaactttatgggtgcctggttatgatatggttatatgtttatgtttatacttttcttactgagtttgtcgactcacatatattatttacatttgtaggaaaaggcaaggcaaaagctgaaaatcagtgagttttgggctagattaagactgtacataccaaggcagttagacctggagtgttcagatcttcaagacagttgggcctttattttgatagtcgttaggcgataacttttgtagtacatgtatcttggaaacagttgtaacttttaatgggatcccaaaatatgtatttatatatatttatttatgtttaagtttagttatgaaaattttaattaaatatgtttttcaataaactctttgattagcaaagaagtagacaataattatgaaagcacaatagcacgcctaaactagtagggcgttataatttggtgtcagagccaccaagttatcttctgaagattgttaagatatgtacaatcatcatcagagataagcttgactcacggtttattaagcctttatatgctttagtagttttatataataagatgtgtataagaaaagcttgataagaagtatgttaggagcctgacagctgaatattcccatgtatacggtaattagattttaaacttcattgcggtctgaccaggctaactgatgatttcgtaggctagtccaaaagaatggatgcccaaaaaaagacgagaaaccaaggcaacatggtcttatccagtggcgatcggggagattagaattcccttaacatctgtggctgaggtagaggttgaaaatgtagggctcgcaatcggggtaatgttaacccactgtttgctgccaaggattgggaaccaaggttcgtagaaatgcaagccaaaattaatgaacaagtcgaattgattcgacacttaaggcaacatgatcctcctatggcacctacccctgaagtaccaatagctcctggtccattgttgccagtggagaaaattgttgttggtaatctcatggaattgctttacgaaagattttgtaacctctagtttttttaggaggtctaaatgctatgatagtcgagtagtgacttacaaccgttaacaaaatattgaacttcatggctgtcac

SEQ ID NO: 28622 - DNA, 4180 bp, Cannabis sativa
atattatagttatttaagatattcagaaaaaattttagaacttcaaaataatttatagtgcttaaaataaagtttaaactaattttttcaaacacagataataaaaaataaataggatttgtcccactttactttataaaccttataaagttttgtctcatgatatatatatattttgaaatcatttcaaatattcttctttatttacattccctttattttctatacaatttgtcaatataacactagctttactaagttttaatctgataatagaattttgatgattggataaatgttatgtttgatgtgatttataaaaaaaaattaatttggcgtaataaagagtccaaacatacaaaaaaaaaatgtataaataaaagtctaatagtgaattatgagaatatgtatatagtggttttatggtactatattaggtacgtagtgaaaagaatatatctgattatcattgtactatatgtccaagtgttttgtatatattaaattgaaaataaatagatgaacataatatttatctcccgtctatcaagatatcttctagttttttcgtatgttgtattatcgaaacaataatgacaaaattcacaccttgatttttcagatcttctatcacacacaagaactagtgtaggctaagataatagtgtatataaagttcttgtattctcaacacatgaacaagaacaatcttgttgtagtgatggaaagaattttttttttactagttaatcctttttaggcactcagaaaagttacctacaatttttttttaaaactatatagaatttggtttatacaatatattaaataattcaataaatgttttatttaattaattatttaaatttaaattattttattaaatcatatttaattatttgaataaataatagaatttttttcatttttacacatcaaagcattttttttttaatatttttacagaaattcacatagagcaacttaatatttttttaatatttttacagaaacacatataacaactaacagagtaacttaacttgcaactaaaatctacacaacaactcacatagaaaccatcggagcaactgaactgtaagtaaatttgaaaaaaaaaaagtttaaaaaatggtatatgaggtaattttcctaaataatataactgaacgctgttatagatatttatattctataaccgattgagggaatctctcaaccacttgagagaatatcttaactacttttcaaatttaaatatttatcttttgaattaattaattaatctaaaaagacaatcatcggagatacctatatcagtggtgcatgactatgtctggacacaatgtatgtggcgcctctctgtggcttaattatgtctggggatcatggacctataactctaaactccaataaactagactattaattgaattttatcaactaaataatcatgtttattaattacatgattactccactataaatatggaattgaacacttagcaattatagaattatatttaatgagttttactgcagtatttattaatataatcaattccagtgattagccctccttgtgtcggttcgagtcttgggcttagggctaaggccagggggtttgggattggggcagggtccggtgttcgtggctggagtctggggtccaggtccaggttcggctacgggttcgggttgggggtccaagtctgggtccagggttcgattctgggtctaagtccaaggccacgtccagtgttctgggtcggggtctggggtttgggtcaggtttgggtccgatggtccaaatctatggtcagggtatgggtccgggttgggtccgaggttcaaggctggggttgatcccacaccctttgtaaacattagaatactagctaatacgagttatctgttgtgtattaaataatacgactcacattgtattaaattttatggttgtagtaattaatacaatatattgttttatccaaacatagtgttatttgaagctactaaggctagtttagtggtaagggagggatgagaaaaagagagactgatgggtttgaaaccaagacccctaattttttagttaattataatatcattacgctacattaaaaaaaatataatattatttattatttaatacaatagaacttttatatattctaccaaacaaatccattatgaatgttgtgatgaggtttcattgaagtgacatgacttcatcacaattcattatttaactgaaagtggtcgaagtggtctttacggacagtgctcgtatttgtgagttgttaaccaatatcatgcaacatagtttgctaaaatggtaagcacttaccaatttttgaagtttttttaacaatttaataatacaaactgaccatcacaaattttatacgttgtttgtactaattcaatagatcaaatatatatcatagagaaaagtcaagatgaatagattaataaggtttttttctttctttcttatatttaagttatatgaattaatagtcatttatgcccccaaaagccttctcttggacgtattcaaaacttctatgtacgacaggtccttatcataccgaatgatccatcgcaccacacaccaccactacccacaaactaaaaacagttgactttcaaaaaattagtgttgactcggtttcattgactttgtcctctgcaaactctcccaatcccaaagattagaaactccaaagcagtttcctctctttgctttatatatatatatatactcctttgtcaaacccaaacagagtttaaaagttgatatatttaatttagagaagaacaaaatgcagtacagaggcgtagagattaccataatctcagccaaagatctgaaaagagtaaaacacttgaccaaaatggacgtgtacgtcgtcgtttcgctctctgggggtccagagatggaacagaagacaccagtggacaaagcaagtgggcccaatccaaattggaactacccaatgaatttcaacatcgacgaagaagaggcccataagggacgtttggccctaaaattcgaggttaaatgccaccgcagacttcacagcgataaagatattggagaagtcaacgttccggtcaaagagctcttggataacggcggtgacggcaagttcatcaaatacgtcacttaccagcttcgcaaaccaaacggcaagcacagaggtcagctcaacttgtcttacaagttcgctaatcaagtcctcgaaacgacgtcgtccaccaaggttcatgatactgtttatcaagttccggctttagtaacggcttactaccccgttaattacgctgccaccaatttgaacttgcctaagtcggacccttctgttggatatccaatccagggtgggaatccagtatttcagaattcgggttcgggttcgggttcgggttcaagatcgggattgggttatacggagtatcataatccgatgtttgtttacggcagctcagaatttgttcagccacataataaggctgagaatccggaagtggatgcctgcttttttcaatagttattatgatgatggggttggtagttaatgctaatttccttcgtattatgcttcgtttgatttttatgatgtttttatttcctcgaaaaaatgtgaatagattttttgtcaagaagatttgattaaccttcctattatttatggtttttgtttaattaactaatgctatatagtaaaagggcttttttttgtagatggtattcaaaataatttctttacggggaatatgattgtttggaaaaacgtgtaaactttatttagttgtgtaagaattttatatattattttaaaaaattaaaataaaatattttttttattatatgtagttaaatttttttattagatatgtagttaatgttaattatacacgacatgctccaacaacaaaagcgcatcagctgctttaaaactttttaatataagttaatacatacaatttattatgtattaaataatacaacttatattgtattaaataaatttattagttgattaaataatacaattacagcacacaagtgatattgattttgtttgtagagcaactactctgtgttgggccttgtggaaagctagaaacaaagttgtgtggaataagtataagcctactgtcaaagaagtta

SEQ ID NO: 28623 - DNA, 2521 bp, Cannabis sativa
aaattatgaattaaagagttaattcaaatttaataataatgaaatgaaatttatttataatttgaagcttttattataaataaatttatcataattattaaagtggttaatacgtattaattctagaaattaataaaacaaacacattaactagaatagtgagtgagagaaggagtacatgtcaatgtaacctatgacctccattattggtcaacaccgagggagtatagactggccttaagacggctttgtttttatccccctaagaaaggtatgtgtctatatttgctcaagttgatcttgactaagataagaggaagtaatgtattttagtatgacatcggcccttaaggcgacacactacgttaagtcatgaaatttaaaataatagggggtacactcacaaagttcacaactataagcttcatagtggttagttgttaacatggtcaaaagtggcactttatattttgaaaagaaaatatgagatatttaggttttaaaataatataaagatgagaattgtctcatagacttaatgaaattgactcgataccgaccctaaggtggcaatcaattgtcaaagagttttatcgtggaataatttaaacaagattttatgtgttttacttgtatgcactcatgcatcacgtttacagtaattccttaatgatatttatttttcaagtataatcattatgtcattttatttatttttaaaaaatgtctattgtgctgaattctcttaatgctttactagcaattgaaaaattgaacgatgtatatttccttaaatagaaatctgatcagaatatgatgttggtttatgaaaatcacagaatatttccttactgattaatgtctctgtaagaactcatgcattgcacatgattgcgctaataaatgaggcagagacacatgggtctatcgtagacaagaggactcaagtgatcattattcttgagtcgctcactcattgcttcaaactgttcaccacttgtggtgatgaacaagctatagttcaacatgactcaatagttgaacgagttgactatgtttgaaaacctttaaaaggataagtccaaggaaggtgagtcaaacaagttgaagcaaagtctatccaaggaaggtgagtcaaacaagttgaagcaaagtctaactttccttcttattcggataagaaaatgaaatgggatggtaaggatagcagtagcaagcccaagccaaaaggcaagaaggcgcctaaagccatgaagaacaaagctagccctaagtccaaggacaagaaagacaaaaggcaagtgtttctattatggcgtgatggaacaatagtagaaaaaatgtaacaagaacttctccgagcttaagaaaagtaaatttgatttatttattcttgaagttaatttatttgaagatgatcaatctttatggattgttgattcgggagccactaataatatttgttttttaatgtaaatacttgatttgttgagggaactggctaataaaaaggggaacatacgagtgggcaatggagcacaagtgtctaccaagtgtgttggcaaagtccgtttaagtttattaataatgagattattttggaaagccaatttattctacaaagcagagtaatggactttatgttctcaagctgagtgaacaattattttttgataaataaattgtttagagtagttttgactgaaacacaaaagaggaaaaagatttctaatgatgatgaaacgtatctatgacatctacgcgtaggtcatattaacttagacagaataagctggttaacaagggatggtccttttagagaacctaaagttggaactcttcaagtattcgaatattgtctagaaggaaagatgacaaaaagacttattctgcaaaaggtaatagagccaaggaacaactttagcttatacacactgatgtgtgcagacctatcaatattcaagctcgaagtggttatgaatacttcgtcacttttattgatgattattctagatatgataatacttacctaatgtccaagaagtctaacacttttggaaggttcaaagacttcaaagccatggcttaaaaataattaggtaaaccatgaaagatacttcaatgagatcatggtggaaagtatttggattccaaattcaaagactatttgctggaagaatagatcttgtcccaacttacagcacctggaacatcttagtagaatggtgttacaagaagaagaaaccaaccttattagataaggtcagatcgatgatttaattgttactcatcactgccactatacttttcgggttacacacttctagcggctacttacattttgaatgtagtaccctcaaagagcataagcaatactctaatggaattatggaatgagacaaaacccagtttgaaatatttctatatttggggttgtcttgctcatgttcttaaacccaagactaggaaacttattcctagaactaaagtgtgtatgtattcagaggaaatttgaggaaat

SEQ ID NO: 28624 - DNA, 6348 bp, Cannabis sativa
agcatctagaagacaccatagaggccgctttccagatcctctcctccatgaacgacgagctctgcaatcctgccttgtggtccactacttctgcttcttctgcttctgcttcttctcctccctcctctgtcaatgctccttcctcttccctttcaaacggtgtccttgccgtcgttaatggagatgcctctgcttctgataccactggagctcatcatcatggggagcttggtggtggcggtgctgctgctggcgctgccggaggtgctcttggtgaggctcagtttcgttacaaaaatgctgtctcttcgcttcgtgccattcttacttcaattcccacttctcagacagtaaattcacaacctttttcttcttctttcttttctgttctttaattcattttaatattgatatgggtgattgtcattttagggcacttttctagatatgcaaaatttctgaactcctttgtttttggaaaagtactaatgcccatgaaagattgagtaaatatatgaactggaatttgttaagacacattgagtgggtgtatgaactggataacatgacatgtaggttgtttgtatgttaatggtgttgattttaatggagccgattctaattgttttaaatgaatacatggaagtttttctgatccagtgaccagaatgcctgaacaagttggagaaaattcagcagaatcaatttctgatctttgtgtctctctccatttgaactccagtacatgccctttaaaagtgtatagctttaaaagtttgtacacgcttatatacaattgccaagtacaatgtttatgcaagcatttaatttgtggtctttgtcttgaatttcagggacggccaaacgaatcgggatcgactgcgactggttcactgtcccaagctgagcaattagagattgaaaaattagaagagagatcatctaatctgaaaaaggtaatgcttcaaagaattttagtctgttttcttgatgataatatttgcttaaccagctctattttttcttctctttttgaatgcccaataactttgactgattttgtttcacaatttaggagcttgccaacaagaatacttatctcaaaaatctcattgatcagttaagaaaccttattactgacatttctacatggcaaagcccatgttcagtctgagctcaaggtggatagatgaggtttcaagagtatagcttgagctcatattgtaagcaatctcatgaggttcccttaaaaactttggcttcagcaatgatgagcagatgtttcaaccaaagctaggggagaggagttgattgtgtttcagtgttgtatgaatgtgaaaatgctatgtacaagtatatttattatgatttgttggaatcttggaaattttgagtgagtttcaagtatttatagtttatatggaggaaaagagagagatatatatgcacttcttatgtgctttgggtcaaactatgtttaaaacaagtttgagaatttcaaactcacaattcttttacagttgattttgacaaaagcttctctacaaagctgtttttgttgactcataagttgaataacacaaagcaaaacaagttatttcaaacacaatacaaacagtataaaggctcaaatcaactgcttactttgctttttcttttttcatttttttaagctaagcagttgcttactttgcttttttcactattattacaaaaccagtaccaattcaataacagtacacaaatacctaatctaatgaggaacgcgatcagtatacatgtaaattatgaacttagatgatctaagttggaaatccaacaagtccagctagttgtgaatggaagatctggttgtgagagatgatctcatatctacaattgctgactcatctgcccctaacttgatggcctctttactagctcttatgaaccttgaaacagcccctttaacatactcatgagcttctttgacactcatcttcttccccatttcatctgggaaactactcaagaaatgatctccattaagaacagcagccaactgtactacctcactctgaaactcagatagtccactgttttctttagcttctgtggttctcaaaggtgtcacttctggcaaggtcactgcaacaagtaaaatcaaccaaataaagttttatattccattgttcattttgtagttgcaaaaattactatgttgtttattttcttgtaatgtaaattacacatttgatgcaacactaatccccgataacaactaagagattaatattgtaacaaaatgactacataaggatttttgtcggttttaagtgcaacaaaatgactacgtaattttgccacccaaaaatttacataaagatttaagtgggacaaagtgaactactgcaaataactaaagaaaaatataggtagtagagttaagagagtgaattatataccagggcagtcagtcctaggagatgttagttctccaaaaacatgttcaaaagttccagcccatgcatctctgtgagtcaaaaagtttgaggagaggttgaatattttcttgatggtagcagggattgaagaatgctcgaactcagagtttggtgttggtcctttagggccacttaccactgaaacaccaaaatagataataagaaaatgagaaattctgaaagagaaaactttaactaattatggtcagttgatttcagccgttacatgatataacatcctcttaatcaatgcacccattacaattatgattttaatgagaagaaagttactttgtacactttgtactaccaaagcatttgaagcattaaatagagagagagggcattaaaacttataaagtagaagaaagattaaacattaagcttaccaatccctttcttgatccaaggagagaccataattgttgggacacgaacaccaagcctatcaaatttgaagaaataaggagctgggcctgtgttcccatctgggttaggaacattaacataaggtgttttgacatgatcaaagaatccaccatgttcatcataagtaatcaccaaaagggtctgattccactgtggacttgctctaagtgcctcatagacttcttttactaacttttgaccattagcaacatcatgagaagggtgatcatcattagcaggaattccctttagatcaaagtaccttggttcaatcacagttaaacttgggagcttaccattcctagcatccttcttgaacttcaaatcaaactgatgaaacttaaatatgtacttcaattttctcatattcctatagaaaagagtagtgggaatgttctgaaagtaaatcccaaagtccaaaccattgtcatgaactgaatcaaatatggtcttttgtggatacccttgtgctaattgcttcttaacatgacttgttgagccatgagaagtagcagagtacacaaaaagcctattgggttgtgttggaccaggaattgaagaaaaccatctatcaaacactgcaaattcactaaccaaagaggcataaacgggtacggatccgggtctaaaccctttcatgacagtttcagaaagatttggagacattgaaagagcttgttctacaaaaccagacattgaaggaaatgagctagacccaaatacctgttgctccacagcttcaaaagagtgacccggatccggatccacaaactcagcatcatcagtgaaacaaatcgtttcgggtttcgggttcttggtagaaacagggttgcattcatctccattaactccattgataactgggttaatggctttcttcatccacccaagcatgtgatcgaaagacctattctccataaccaaaactacaacggttttgatgggttgtttggattgtggggctccaataactaaaagggtcgtctggaaagtccatgaaagagtgagaaacagcaagaaaatgaaggaaaatgatgggtttcgaggcctggttatggaacctcccattgcttgtctatggagaaagaaaaaagaaaaaagatcgtgtttttcccaaatgggtaactctagttttggctgttttagctataagtaattatactaaagctatattgatgaagagagaatcaatattctctgctctttagatatgtaaccatagtatagtgagatgaagcttctggttttgtactgtacactctctagtaaatatgcttcacttttttaaaagtaaaagaaaagaaaaaaaaaatcaatcttttttttttaaaggtgaaaatgatatgtgtcacacgataccatgactttagtttcaagaacagctttaattcaacttggtcaaatagttttgagaaataaaacataataaatttattataaggtaataatatggtatggtcagaaactcagaagtggaataaattgtatgtgtttgaaaaaattgagtttggtttttttttttttttttttttctttacatgagtgatgatgatgatggtgtggtacaatgacagccatgaaagatggaaccacgttaacacgatttgctacttattattattatttattcatttcttcatgtaagtataattttaatattatagctaaaatttatgggttaatatgactatttgaagaaggcgataacttggtttcaaaagaaaaaaaaaagaaggtgattaactttatatatgtggtcgagtaaattttcctaaaacaatagaaattagattttcacaattgaatgaattcttataattaaatttctatagttcgatgccttaagacaataaagtctctctatagaattaaagtgagtgatttatattgtaaaatgaattcaagagttctttaatggtaagatgataaatatatagtttcgaatttttattagaattagttttatattattaatatatagaaataagatatcataaataagatttatgactactcaatactcattgtcaattaattttcatgtaatttaactaaatactttcaaattctacacttatcttcaaatttacaaatagaagaagttgaaataaaataaaataaaatcttaaatctaatattaaataaataataattaataaaaactcgaaacctttatattggaccaaaatatacctttttattctcatatacatatgacgattatatatgtaacatatccaatgaatatatatggtatataatataagtgcccattgttttctctattttataaatttaatttgtagttttgttatatataagtttggtcattattcatttgctatatatattattcatagtagtggataatagtggtggtgacactcatcgtatattaataataattaattaaagcatatttgtttgcactttccataaaataacaaaattttcactgaatatacttaaaaaaaaaccaagccattccatgccaattgtctataacttgcgataatatttcttccttttgtctttttatactcaaaacaagtatgctttctaagtttttattcaaatagtattatatatatcatgatatcacatgcttgtatatatatatggctgaaaatcagtttgtataccaaaaaaaaatgttgtattttgacagatttacttaatatatatattagggtaaattgcagtataaataaatacttacagttttagattttatacacttaaatatttaatttttatttttggagacaaaaatacataacgttacaattctcttacactgttactatcacttccgttaattcatatatatggacacgtgaagggttcagatgcatcacatttatttatttttttttttattttaaaacttaatattcttaatattaaaaactaaatgctacttgtttcaaaaaaaaataaaatattatatctctgttaaaataaaataaataaatgtaatgcatgcattttggccctccacgtgtctgtatttatgagttaacgaaagtggtagcaacagtgtaagagaattgtaacattagatatttttacttctaaaaataaacattagatatttaagtgtataaaatctgaaatattaagtatttttgacacaatttaccctatatattatttttcatttcatacacatattattttgatttcctgcatttctcctaagaattagaataataaactcttcatacattactttatatatttttttaaatcccatatatatataaaataataatatatagaatttcaaaggttgaaatataattttgtgaaatagaagatttttatagctagccaaaagaataaatactcgtgactgaatattgtgtaaagtttcttatgatgtaaacatcaatcaatattcaagctcaaggatatatatcataactcacgaaaa

SEQ ID NO: 28625 - DNA, 1238 bp, Cannabis sativa
cattttgaatcgggcggcatatttgtattctggtttttatagttttaccaaacagaaacttatataaaggaacaagcattcatatcatatactagagaataatatgatatgaacagaacatttgtacaatattatccagatgttatagttgtctttgattctttttcttgtcattttattcatgttttctcttctattcattgctattttagaactcgtgcagcggcttactgaaaacgacctcgttttggatcgccttctcgttgtaatttgagttcttccgagtgctctggacttttcttatatatctaaatcagtgttactttaagcagaagccatggatgaaagcttgcaacttttaatatgaaaataaacaagtcaataattagaaggtaagtgagtggtgtcagaataagatataaataccatatgaaatttgggagcaaattctgtctcaataggtgttctgttggaacatttgttatgaattatggtttgagatttaaaaattgtgttttctaaaagagtgttttggaaacaaaattatgaattttgcatatgaaaaattgtttttaaaaatgtgattggttgagttttaaaaagttagatttgtgattggtttggaatctcaaaataaaaaagtaagagagtatttgtacagtttttaaaatcaatgatttgaaaacatagaaaacataaaattgttatttcattttttagcttaaaactcaaaattatattcaaatttagtttttgaaaacactaaaccaatcaagtattcttatgtggaccaccactttttaagttttcaaaaacataaaattgttttcaaattccaaaccaatcaagcctttaagtactcactttttttagaagatggaagagtcacacaaaggctcacttaaacactatacacatgcccgtgtagctattcgaccgacttgaatcggtgtgcacctttattttattttttcttgggagaaaatttattacaaaactaatgagagaaaaaatcattttcatagaaaaagttatatcacaatatgcattttgagcactagtattttttgagtgtgatatttcgacggttctctatagtatagtggaagttcgatacagtggttcgactggaatgttttatcctggggatgacgaaactgcttgcaaaattctgagcagtactgtgaacatctcaaagacagtgatctagtccgtgacacaacataaatatttattcg

SEQ ID NO: 28626 - DNA, 2929 bp, Cannabis sativa
  modified_base (581)..(583): a, c, t, g, unknown or other
tgagaaaacatcgaccggaaaaagtccatttgccatagcatatggttgtgaagctttgctgcccgtagaactaaaacccccatcccacagaagattgacatatgaccaagaggttaatcatgcactccttgcagaatcacttgatgagattaaagaaaaatgaaccacatcaatcctaaaactagtgccccatcaacaaaagatagctctgtattttaacaaacaagtgaaagcacataaattctttgcgggagatatggccctttgaagggtattcttgaacaccaaagatagcacggcagatgtgatcaaacagaactaggagggaccatatcaagtggttgaagttctagaatcagttgcatacaaactgagtaagtacgatgaaaaaatgcaactcgttctggtaccaaggtattggaacgggaaacatttaagaaaatactccagtaaaagtaccaggtcagatgaccatcttaagtacgaaataaaagaacatttatgcttaagttgcattctgggcaaactatgattatataaattcaaattgtgtcaagtctattagcaagttataaatttannnttaagtgcgtacaaaggtctgctcgtacccatagacccaaacagataaaaaagcatacttgtgaaaagcaagtgaccaagagtcaaaagtctgctccgtcacttgggggtacctatacccatacaaagcaaaaaaacaaaaaaaaaaaaaaaacaaaacgaacacaattgcgcaatgatcataacaaggaaagaaattcattaaggataacaaagcctgtaaatccaggattaaaagctgctcggtcagccagttgtccgaaaatgaaaatatattccaagttaaaagatcgtttggctggtcactttgtctcaaaagaaggcctactggccgaacagacatatacaaaaaagaaacataaagaggcaatcaaatagaaggaatcccaggctcctggtaaggatcgactgggtctgaaggaaccaaaggatcatcggtctggatagaaggagtgtaatgttctggtcggtgggagcatcggaagtagtcgcctcggggttctaattagttgcatgagccatgcagtaattaaggcacatgtccttggaagtgttgaggtactcaaagttccttttgggatcggctttccagaaatcgtaaaaaatctcaagacctactgtctctaaggcatccacatccccctcaagcttctccatcttggactattggtctcaatctccttcttgagtcctccgacctctgcctcaagttcttcctccctggtcttcttgttcttggcctcctcctccaaccggagaagaagagtttggagaccctccctctcatcttggagactggtaacttcttaggacaaagaaacattgtccgcctcaagctgtgcggtcgaaggcatatcctctagctccttggtcagctcgacaaccttggcctcagcagtaagaattttcttatttgcctctccaagttccttcctaatgacctcgagctgggcccgcgcatcttcagcggccttcttggtcaagtccacatctctttgcatcgtgttggatgtggcaagattcttgacagcggccgacttggctcgagagtaggcataggccatcttcacaccaacctgtacggaaaatgtgttcaattttgaaatattcaaagaataatgaaagaaaaaggatatagggaacttactcgagaaatctccttctagactcctcctaagacaagctctaaggacaattcactgtccgccccagtcaggtgttcactcacttcgggaagcgatcgagccacgtaatgatgaagcatgtctttgcctctcctagctttcgtgcacagcgctagggttgtggcaggggccctaacctattcggatccgctcctgacctgctcagatccagtcttggcttgcttagacccgtccgaactccctccccgggaacttttggacttagaaaccttcagggttgaagggtccacagcaggatgctcctcatagaggtcaatgacctcatcaaccggcatcttctccttggacggagtttcgccacctctagactttttggctggaggagacaggcccgagctatcccctactctcttcttcaaagcctggatcatcttctaagacatttttgcatggataaaataatacagtcagaagaagacacaaaatatgggaagacataaaacaacataaatgcaagttgaagtactctgcacgctgacgggagcattttcctgaacaataacggatggatcatcatcgtctgaagagtcttcctggtccttcatgacgacttttccctttccctcaacaggagtcgatggccgagcaggcacaccaggttccctaatccgagtagcatgttctattggcacctgctcggacgggagagttttcttcttcttgcgcggcctctccagctctaaatattcttgagcctctttctcctgctctgaatattcttgagcatactgtttggcttctgcactacccttcaacttagcctcacgcttcagttgaatgagctctttctcttgctcgacatcctccccttggctcggttcttcttcttctccttcacggtctggggtataaagtctgttgggtaaagcttgtacttcacaaagttggcctctgtggtcaacaaagtgatattccgagcagcctctagcagttggagaatttttctgagccctttccataagcctcagcgtgaagggaggatggcaatatacgaggatctgttgaaatcgagtatgatcagtctccatgccagtcccgaagtagtactcgttaacaaaatgccctattttgctaacttctgaatccacaatgcccttcagccacttttcatccaactcagagaagtagaagtaccctgacct

SEQ ID NO: 28627 - DNA, 2354 bp, Cannabis sativa
atttccattaacttatgcttttttgcgcatttagttgacaataaatttgctttaaattataggcaagagacgcacagtatacaaaaaatcgaagctagatgaagattgaaggtggatggaagtctaagaccattgtcgaccacatcgtgaacgggttatgatcttataaatattattgcctaaaatttaataagttttgaataatacattactatttttgtatgtataaaaataggctaatctcgagacaggaaaacttccaagttttgtggacacttttataaagttccaccacaagaacaataaatggctcgatgaacacactcaacaactgcatgcaagtaattgtatatctttaataatcctatcatatttaatttctatcaacctctaaaattttattaaaaaaatttgtaggcctaaattcttaagacgcgtgaaactcaacctgcgccgaataatatctatcgtcagtatgatgtagacctcacccagtttcctacaaacatgcctgttatgaaacagatacttggggagtggttacgccacttgagaggcatgaaccagttgtcaagacttagggcagaggccaaaaggacagctcccaagcaagtctctttgggcctcctattgtcagcatggaggaatatgagacgttgaggctaagagtggaagaacaagaaacacgttacgagtggcaacaataaatgatgcagactcagaatcaatacctgaatatatttcaggagcagttcaagtattttttggcgtcgttccttgcttcaacatgctcgagatagctccaattccactgatatgtcctcctgacacatgttgcccctcccacccagaaaaatgatgatgacgatgatgctgttgacttatagttttattttttctttataaattttattgtaaatattactattttctataaactaatgactctttatttagttttagaattacttgaatattttataattataatatgaaattctagtttataatactattcggatgatatcattatttatgaaattttaattttaatttagttttattaaatttatactaatattaaaaaaaaaacaaatattttgtcggcgaatttagttgtgtcggcaaaacttatatatatttttaaaaaaggaaaatgttttgccggcaaatttagtagtgccgacaaaacttttgcgggaattggaaaaggtgctaaagttttgctatcaattaacttcaccgacaaaatatggcagaaaagcctcagccgataggtggatgctagtcggtagatttacaccggcaactgaactcgctgaagaaaaacagttttgcaaccaaagttactcacttcattaacaaaatgtctttccccgaccatccattgccgactagttccccaatggcaaaaggttgctgacgagttttaggtaccttttgctgacacaaaaactcatcaacataagtgaattttcttgttgtaggttattctaactttattattttgtatttaattaattgattgattaaataataaatttataattataaaatacagaatttcgatatcaaattttgtatagaaatatatgctacctcatatttggataccatcaagtacctataagcttacatatttatctaaaaataaatttagtaccaagaaaattatattatatttgagatgttataactaaatagaagtaaattagaaaaaaaaaaattaaaacatccaaagtatcaaatatataacaaataacagtaaataatcatcaatactatatcacaataaaataattgttgagtaaatattatatttatacatatattacaatttgaaataatttttttgttaaattaacaatttgtattatttcaaaagtgagaaccatgtacatcaacaatctctcatcttctcacttacttttctgtacaaagattttcataccaactctcatctttttatttttccaatctttcctgtatctatacaaagcaatatttaagttattatatatacatttttttttacaaatataacaacgtgcttagtggtgggaacctctttatgccagaacttcctatgcttagccttccatattgcataaactcataaataaatcctcatattattttcctttaggaaataactgtattattggttggtacttttaattatttgtccattgagttctaagccttatttttctttttttttttttttgaaactaagaatttctattaaaggcatcaagccaaaagatcgggatacaaaagatagacaatttaaacagctaaatcagcaagcaagcctgaccaccacacccgagcctcatctaaatctaatgctc

SEQ ID NO: 28628 - DNA, 3441 bp, Cannabis sativa
gtaccctaagtaataactgttttcttagttcaaaggaagatctgtatgaacacttctcttataggatgattgtaaaagtattgtcctctgaattagcttaagtagaaagttttcgacttggcacattcgaaacaattcttgtcaagaaatattgaatgttcatgtgtgaaaaatggtaactttctttgttttaaacttcatcatatagtacagtattagtgtgtatatcataggtattttctaagtggttattttttggggaatctggagtttgctgcaactataattcaatccgttggcaaagttctcgattctcatctgtgaaaaccaaaagaaaaaaggcatcccgagaagtttctgagatataaattatttcctttgttttttgtgctgtttagaaaatggaagaaactgttagtaatgaactctcattgtcttttaattttcagttggaatgctttgggttgaacgaaccccgaaagctagtgaactccaagagaacatggaagtatacttcaacacgctgcagggttttattctactttctcatgggagtacagtaggtgcagggcctaccttatcggcttgtgtctatgcagctgtgaagcgagttgttgattccagctttcatttatggaaggagtctgtctcatcatatggtaatctttctgtctctctcaacttacttataaagacgctcatgagaatagaacaagcagagaatagagtagcaagaacaaacagagagccaaaagaactagaatctcaattgatattgctgagaaaaggaaaatacaatgaactgatcttaggcaaataacacaattctttgcataacttctaattcttcttaaactcttatatatactattctaatctctccacaaacactaacattccttaataaaaagactcacacaccctttcatatactctcttatactgtattctattatcttggggtctaacacaatgtggcctcctttcatatgcatagctttgcaagtttctgttgcacttttgttagttgttttagaaaaattctcttatcaatacttagaacttatgccccgctctcgttatactctagtgtttgcttttgatttttatatcgtctagtctgtaatacatgttagcttccatagtatttttctgtacaattgttgatcatatgttaactaagatgcaattctttcctagaaatgctgctattggccgaaatagcctgcctaagtcttttttctcacaatttcggtctcagtagtgacattctgatgattctttagcatgatagtaattcgatagtttgaagctaagttgaatagaaccttatattttgtgagtatacattgacaggaacagacgagaaacaatcgatcccgcagctggttggcacggtgtgggaagcatgttcagctcttcagaaaactccaggcaataacattacggcaattggacgagcaatatctcaggttgcagttacgatgaaggatgttctccgcgagatgaaggagctcaagcctggatccacagacccaaaagatgataacggtaatgacgacgacgatgacgatgatgatttatgtgaaggtgatcttggaaatgatttgtcacctgaagagatgaaagttgcccagttaaccattgctgcagtatccgcgacacttgtagtgataaaagaaattatccgctccatcacgagtttgctcaagatcgggaacacgaatgacaacactactgttgtggattcgttggagaatttgttgaaacagattcaaaaaatcggcgaacagattgatgagatgggggcctgtctttatccaccacaggaagttcccgttataaaaacagcagcagaaaaaatctcgggcatcgtcgatgacatgcaaaaagaagttgaaaaccttaagggaacctcagaaggttttcttcaagcatgtagtggattgaaggtctcactagcagagttaaaatctgaactagattcatcaagttctttagatatagagtccaaattgcagaaagttgatttgaacaattaagagagaaacatcaatgttttggtcatgtgaaattagataccattttggcaaattttgattaagactgttgtttatcatgaatccattttgagattttggattgaaaaataactgttaccaactgtatatttcattagaaaatgtctacaataatcgataaattcggaaaatttatacgagtggcttatagctttatgccctctgaatttacatgctgatatgaatttacatgatttttttttctctagactctcaatctgacaaaggcttatcggaacaatcatgcattttcgaacggtttaacgccctgtaaacttaaccatccaggcaccgcccaagtagagaccgagcaacggtgctgccagaagacactgagtaagaggatcagttgatggtgtcaacacagcagccaccacaaccgccccgactacaacatatctccatatcgacaacatttggtctcctgtgaaaagccctacttgtcccaataggaactgaattaccggaacctgtaaaaaccatggaagaggatttttaagatgatcaacaatctccggacaataaattgtatcgggaaataaggcgtttgaaagagggtcggatacctggaaagacaagcctgtgctgaacatgagaataagtataaactcaaagtactgatcaatggaccatagtgattccacaactccttcggcataagtaacgaaaaaggtcaatgctgctggtgcaagaaccaagtaggagaagacaattccagcatagaaaagtaccgaggagcctaaaacaatcggccccagaaatcttctttccgattttgttaaccctggaagaacaaatgctataatctcatataggatgatagggcttcctatgagaagaccacagtatcctgatacctgcagtaagagcataagaacatagtgtgttatttacttagttttctagtttcccgaagccatcgattctactgaaatttacgagcaactcttgtctatcaagattaagagatttgtctttctaacctttagagatgtgaagaaaaactcgccaggagcgagctgcaggaacctaacaccttgtgttttaactggagcttcaagaatcatgatcaattctttcgaaaatgcaaagcaaccgacgatggctcctccaactgccaaaactgatataaaaagcctctcgcgcagctcttcaagatgatcaaataagctcatttctttatcgtccgggagaagctctttctcgggatatagaaagtcataaatgggacttcccccattttttcgggcaagatttccaagcgcttcttctgttgaaatgtcagcaacatctacagaatggatcataacataactttagcttccaaagtcacaaatcaaaaaatccaaaacaaaatcta

SEQ ID NO: 28629 - DNA, 1708 bp, Cannabis sativa
gagtttggaaacagccacgccttatctgtaaagtcaataattaatatttagaaagtgaaagtgagtgtgttttaattaattaatacgtaataattaattacacacatataattaactaataattacatatgttatagcatgcatgaaccaaattatatatgtgtgttataattgcatttgcatggggtgattgggttgggtgttggggaccatttgttttgtattttgtatatattacaaaaaggatcgtcatcatcaccatctttttttttttgtatatatttttagctttttaaagctttatttaaaatttaaaaggtagctttgaaggagtaataagttaagacttggaaagtgagtcgaactggaacacaaaaataacatatatatatttgtggctggcactgccactgtcacattgattcaacattatatatatattgacgtacgtaataatattaataattaattaattaaaaccacatgcatattattatttcatataggaattaaaatgaaaatgattgaccctatcatatcaccaaaaggtttagacttatctgaattcaaattcaattcaatatttggaaatgggaatagggaatatataagaaataattaaagtctttttaaattaatatttacattataaaaaagtggttttttgctaaactaggacaggctctggttttggttttggttttggttttgggtttgggcccatagaatattatatataagaaatccactgccagttgcatattatatactatcacatgtttgacatatatatatatatatatgcattaattgagggatctacttgcttctatttccaaattccaagtactatatagtacgtattactactgtttatatataaatatattatacaagatgatcaggattaattagctttattaattaattaataccccatgtctaccggaaaaccataatttcttccatcaaaacatacaaatttaattaattaattaacttaatccctctcaaattctcattatatatatacaaatatatagtatatgtctcctataggctatagctataggttgtttacatatatataacgtgtgtgaatgattcattatatataagtacgttaaggtacaaaactaagctaaattttatgggtaatgcaatgctcttacacgtgactatgttaattttttttcaagtattacaaggtaaagtattgggctttttttgaattgggttctttttaatagtaattgaggaatattttttatttatttattaataaaaaatattctcatattatatttcattaaaatatacttatttttgtgaaggttgcttaatatatcctcatcctttacttaagtttagcatataatttttattaacttaaggggtataatagagatatcatccgtgagtatatctcaaaaaatatagaaataaaaataaaaataaaaacatataaagtggatatacaatgtaatttcttttttttttgataagggttgattgagtttttccataactaatttaataaatataattaccaatagtaaaatttgtttagaagatgagattttttagatgatttggacgtagtgagacattagtcgcactactagaaaattgggttttagtgacacacattgaataactctaaaagtctatagtgacacttcaacgcgtgtcactaatgaggctgact

SEQ ID NO: 28630 - DNA, 2042 bp, Cannabis sativa
tatcagcctatactcggtatgctagtcatactctagtcgtactgatgtgatagcgttgattagtatttgagccaaacatacatctatcactatccaatttaactttacgtatactgataccgctatcgatgtaatctaacaggcttaataaacatgcacgctaaatatgtgaacacatatgcatatcattatactaatcttacctcgtttttgaatttaggtgtgccagccaacctgagtggaacaactgctcgacgatttataggcccctaaatcacattaatcgtaaaactggtgcgtgatacgctaaatcactattcagggacttaaacttgaaactaaaagtttccctatcgatggatcacatgacaataccttaaatatttcaaaaacgggaaaaactagggttccccaaaatgccccaaccggaggaccggttccccaaccagaattctggttccgtggggtttcctggggaccaaccggtcaactggttcctataggtcaccctgaactagctgaccaatttagtgtaggaaacatcaaaaacctcctaaaccactcaattcgacccaaacttcaaaacaacctctagacctgctagttacaccataaagaacaaactccaagcaataaaaaaaacaagtaataaccccaaaaatttaaatcaccattaaagaccaagggttgagctctaaagcttaaaccttgtctaaacaccacaccaagccaccaaatcagcttaaaccaacttaaattaactcaaatcaactatagaaacaaactcaaacaacttgaactactacagaaccctaatacaaaaattcatgcaacaaaacctattaagaacatagaaaattcacaaaggaagaggctagagagtttaccttgaattactacaccatgattcttctataacacccttgcaatgaagctgaataaaatatctagctgctggttcactagagggattcaagagagagagggagtgaagagagggaaggctagtttcttaatttttctttaatgaataatgacaaaagtaatgaacttaggtattatctactaaattaactaaaggataatctgaataataaacttaaataaatctcacttaaaagacaaaaggaactccttggaaaaagactattttgccctcctatatactaaaaactacactagccacttaggggtattttggtcattcccaaactctcaactattcccgacattcccaaaatctaactatatttccccgcaactactaaataccaaaatgtgattatattggccaaacgtcgtgttccaatgttgttgggcacaaaacatacagaaacataaaattttatgtatggcataaataatacatcctgaattcaaataaatatccataatataataaattataattattattctagtttcataattaaaccctaactatattccaaataaaaattaagcggtctttacaattattcccccgttaaaaggattttatcctcaaaatctaacctgaacaattctggatatgagccctcatgtctgactccaactcccaggtggcttcctccaccttactggatctctagagtatcttgaccaaaactatggtcttgttccgaagaactttatcttttctgtctaagatctgaactggctgttcttcgtatgataggtctagttgaagctcaagattctcataactcagcacatgagtgggatctgaaacgtatttccgtaacatagatacatgaaacacgttgtgaactgctgaaagtgctagaggcaagactagacggtatgctaccagtccaactttttcgagaatctcgaaaggccctataaacctagggcataacttggctctcttcccgaaacatctgatccccttcattggagacacccgtaggaatacatgatctcctacctgaaattctatatttttgcacttcgaatttgtataactcttttgcctactctgagaggcaagcattatggccttaatcttttctatggcttcattagtctgttgcactgat

SEQ ID NO: 28631 - DNA, 2471 bp, Cannabis sativa
aataataataataataatatggcatttttattttcttaattctgtttaattttattaatttaatcaaattaatcccatatttttgtaagatggaaacttggtcaatattatagcctaacaaaacaagtcaaatatcataacaataatacaaattatattccttatacacaattctattttgttcttctctctcctttacacacgtaagtgatataacttcacttctgttatagtattaaacctatacatacacaaaaaatatatataaaaatgtgacatatatatatacatatagaattggagattaattcttgttcacatgcagccgacgtattaaagtcaaaaagcttttttttttttaccaataaatatatatatataaacatagtgagaagtacaaacattatatacattttaaacactataaataatacaatattacaagcattataaagcaaaatcaaaggaaacacccgaccatgcatgcttagcttttcacactattatatatgtaacattttttatttatattggggagctaatattttattctgtttagaattcactcctaccataataacactattttttttttttattttttttagtgaaaacacatttaattaattaaagcattttgaatacaataagtttttaagctcagcaggagcaatgtgtttaagaatgctacgattaaaattgaatcaagatagtaattcatatggtaaatacgatttgcagattgttttttttttcttgaaaatagatttgcagagattgtttaataaaatgtaactgaacattacatatagaagaaaaaaaaacttgacaatcttttacaagaaaattgagcacactacaaattttttttacttttagtcacaacaaaacttttgattaaaaataaataaattgtaactaattataaatcatcattcttatgttgtgattaaaatgtctgtggttaaaagtatgagttacaaaaattacaattttttgtgattaaatgtgtttttagtcacaatatttgttgttactaaaactaaattaacgacagtttgtatataaatattatgctttaatcacaagtaactttttattgtgactaaaaatgataacatttaatcacaacataaattaagatagttgttttttgtagtggcatattagaacgcacagtttgaacagtgactaatcaatttcaatgatcacctgttctcaaccagaacccttcactcggttcaagggcgcgcgcttctttcactctcattgcttccactaactcaacaagataataaccatgtaattaggagcttttaacttcaatgagagaactcaagttcctagcaacaattccaaactcatattttctttctgtttcaaaaatcacaaggtcaacattaattttgattgaattacaagtagatttaatccaaatccaaaaaaaaaaaaaaaaaaagaaaatccatgatagagatcacaatttacactaatcttattaatcaaacaatttttattcattatataaaaaaaaaaagtgaaatacatcaaattaagattttgatcaaaattgcatttcaattattttacaaaagatcagataattcattttatgtatatccttaaatcatggatcacccaaaagaaaaaaaaaagtgtaaaacatggtatggtcatatacagcatttggaccatattccaaagccaatcaaaaatataagaagaaaaaaaaaactaagtccatatttgatattccatgtgcaacatgcatagcatgtatattatggtcctcaaaaacttttaattattattaaaatttttacataatttttgaaataacattttatagttatggccatcctatatattcctattgagtcacaaaaaataatccctttaattttgctttctgtcctttatgtctgccacatttagaatgaaaacataaagaaaaatatagttgccataatgcaaaagattgaaaaataaatgaaagagctaagttagggccccaactaaaaacaacaacaacaactcaactacaatctcattaccaacaaatccgacaaatattcagacaaaagctcttaatctatggcggtttcaacaattaaaaaaaaaacttaatttaaattaaaaaaaaaaaataaacaatagttcattgctagcttagtgagaaacattcccctaattgaaaagaaaagaacccaagaaagaaaatctttatttatctttttcgtaaaaaaaaattgaaatttattttagaagctttttcatttctacacttaaaaacaattattttttgtatttttacaaaattttacatataaaaattattggaaaaactaccgaaataattcaaactttaaatttaaaaaaagaaggtcaaaaaataatatatagagtaagttctctttattttagtatactttatgttcgatcaactcaaattattaatttaacgatggtaa

SEQ ID NO: 28632 - DNA, 1404 bp, Cannabis sativa
acaactgacatttgcaaaaacacggttttttaatatttttatagtatttgatattttaaaatgttccttagtatttttctatttttattatattttttttgctaaataaaaatagaatcacatagtgcaaattccttttccacctcttcggtggcttagacagtcatggagaccatgttctagttataagagtcttatatctcattctgccttaattggatcctcaatactactatctatgagagttttcattccatgatgatcccaccatagcaagttataggccttttaagggccaaacataattccacacaaagagttgtagtgagattcgaatccttgacaggaccaatcctaaagtatatggagcataaggtaaattaaattttaaaacccctatatatagtttaattattatcaaaataatagttatagtactttggtgtaatgataaagttttttaaaattctgttccaagattcaatctttcataacaatacattaaatatttttttttaaaaaaaaaataaaggttgagcattgatcacttgacctcttagcgtaagactctttatcactacaccaaacaatatttgttatatttttttattatttaatattttatctatgtactaatattttttttacaattttagggccctaagagttcgggggcccgaagtccgcgcctgactcgcctaccctcaagcaggcccggccttgggcataggcatgctaggcctgtgcctagggcccacctagcccaggggccaaaaaaaaatttcctttaaaaattataccattttttttctaattttaaaaaataccatatttttttataaataagggcctaatttttttttctatggcccactaaatttcagggcccgccctgccctcaagactcgtcatgacccttgacttaaataaagaaggtcgccaataaaatctttcctaccactacacacaacacgtggtctctatatttttattgttgattacttaagattatcacaaaatatgaatataatatttttcaatcaacataattatttagcttgagattcactagtgataatgtatataaagcatctctaatagtgacacttattataagttgcaaagttctccatatcatcttaaaatattatattttattttaattgttttacacattatttttagtactcttacttctaaaatactctaatagtaaatactcttgaattttgctccaataatcccacaaaatattttttaatatattatttattttaattttatttttttaaaaaaaagtatggctcaatgttaatttttaatttggcactcgaacatctctaatggttaacttctttcaagtattatgtcacattaggaggaagtattttctccaaacactac

SEQ ID NO: 28633 - DNA, 3455 bp, Cannabis sativa
gtgatccaacaagttgggatataccagatgaaatcaaggaaagaattgtgttgccaccaaagcataagagacttgctggccgtcctaagaaagacagatatgaatatataattgagttacaattacaaatcagatgtggaaattgcaaccgaaaaggacacaacaaaagatcttgcaagaatgaagcagtatcgaagcctaaaaagaaacaaaagataacacaacaacattctttttcttttgcttagattgcacaacaacagtttgcattcatttaaaattgattgacaacatacataagacaaaaacataactatttggttctttgaaatttcaattttataaaaaaaaaaataataactcacaaaaagtactttagtaatatattatattatctactatacttattactttataaatttcagtgagaacttaatttaaacataaacatataaaaaaattcaaacataatatatattacatctaatttacttaaacatattattctcataatatgattagaattttttactttattgttcttattgttagaatgatattgttatgatttcaaaagccaaaaatacatgtacaaaaaaaaaattctaacctctatctaacagcaacttgaactcccctacaaagaccttgaaaataaataacaaaaaaaaagtcaattactgaaaatagaaaaatagtacagtaacaaaatataaaaaccaaaattagattcaatttctattaaaatactaacttgttgctaaatgtgtaacttaagttgctatttcagtcataatttgcacattagttcttccttcaaaagtattcattttttaataaaatataataaaaacttgaaagaaacatttgtaaaaataaaattaaacatatacaaaataatttatgacaagaaaattataaaactagaaagcttataacatgaacattaaaagtttttttaatcctaaaaactgaaatagtaaaaaaaaaaaaacaagcaacataaaaatataaactatgaatttgaatatatccataaaaaaaacaaaaagattgaaaaaaaaaaaaacaactaaaatccaaacaggcagtacctattcatatttctataacaaattccaaaagattataaaatcttaacagtttgttttcaatagtctccaacaaggaaaaacttatagcataaactttaaacaaacaacaaactttaaagagtttgcttatcaaaaaactccaagcaagacagtacctttacttatcaataaactcctaaaaaaaacattagaaactctaaggagttttcctatcacaaaagatgtaaacataaaaagtatgttcttaatcagttacatgtaaactgttttgaaccattacatataaaagtacttcaaaaaggcactactatgaacaatctacccatccccaccatcgtccttaactggcgcccttccacaatgttcagatgaagaaatgtatccatttacttgttttgccatgccatgcacaaacaactcgacacaaattttgttccggacaaacttcacatccaaaggatttggaatatcttcaatcaaatcatgtgcaaagtattcagagtacttgaaaatgaatataccacaatcactgcaataaaacataaacaatgaataaataaaaagacaaaagaggttataaaaacaaaataaaggacaattaatacaaaacaaaaacaaccttaattgaaaaaaaaaaaaaaaacttatgaacaatcacctatgagtttgttgtggcagaccttgaactataaagatatcaaggggatcatactcacgcttccccctgaacaatccttttgacatgtcaatatccttcctgcgaccataaaaaccaacttgtgccaacagaattgggatcatcacagcaaaagtcttcacaaagttgttcaagtttttaaatttgccaacagatagtgaattacatacttttaaacatctattctttatgtcaaatatgatcacaataaaatgtgccaatgaagcaacattcactggaataaaaacataatcaagcaacaaccatggctttgaaacaagcatgcggaatccctcaatatagctaacagccttagaattttaggaatagaaaagcgattctcccccttgccaagatagtttccatacaactcaaaaatttgagttgcaaaataacaatcagttgtattgcctttcagcttgatagattgatcatacttaatcttcttcctcaaatagtaaaataacacatcaatgtgctgcaaatgaaaaaaaaaagtatcaaacaaaaagaataattgctttattatatgcatttcttacttatgcaaatatgagaaaactaattcctaagataaaactaacaaaccaaaaattaacaattaacaaaaaaagaaccacatggcaacaacagtggggactaagtgttattgagtgtcatagtaaacaggctacaatcttccaaaattgaggagaagctttaaaagatcaatgactaataatagtcagtcaccacagaatagaacatatcataatataaaatatgagtcactcgtataagaccaaattactttgaaaaaaaatcagaaattaaagaatcccaacattttattagaaatattttattaggaactttttttcttgctttagatattttattaagactttttttttttcttaaattgcacatttcataaggaatatttgtgagaaagctacctattctcttacaaaagtttcaatcaaaccccaaacaaatattttcacaattaaatattaaccaaaaaatattaaccaaagacatgacaaaacttcatttagaccacatgacaaagataatgccaaaggtttgattttcataatttcagtatacaataattgactaaaaaatagttacaacgagaaattaaagcactaatttcaactttctggctgccaactctttatgctcatgggatgtttgtgtttttgaggttataaccaagaagccagcactacttcaagtgtcaattataagaaatgatgattgatgtttagttattaatgatgctttctattatgacattgctaatttgctattagggtgatcatatttgtcttagtctaatttgattgtttttcattttaaagttcaaaccctatggagcttctttacatctttctctctctactacgatggatggaatctatgatgagctcgaaatctttattacaggactttcaattttaatattgtttagaactagcatataccaattacaacacagctcctgttattttttgttttcctacctattattaaaatttattttttaaaaaatataatttcagtatacaagaattgactaacaaaatagttagaacgagaaattaaagcactaatctcagttaaaattctccaagtatgaaaatactatcacaaaaaatatgcattccttacttatg

SEQ ID NO: 28634 - DNA, 1865 bp, Cannabis sativa
aaaaagaagaagaagagaaagatataatgattccttattattaacacacacacacacacacacaattggaatatacatattatatcaatgaaaaatataaacaacaattaatgatatattaataattatatcacatttctcccaccaagcaccaaccatcatcttcttcttgttccaacacaaatcccacatcacaaaagctcattctttcttctttttcatcatcatcatcattattcttgatgatattctcaacccctgtttcatcatcaatctctaaatcaatcctaataggctcattagcattatttggaccataatcataaccattattataatcaatatcataatcataaccactttcttcttcttcttcatcatcatcatcatcttcatggaaattggagagttgatccaagatctgagtggcagagaacccagaaacattattcaacccagttcggccatcgacgactcgccaagtcagcaacctgtgattggaaacgacgtcgtttgacttgagcttcatattgcctttggtcttatccttggctttacacgtgggatgcaagtggcacccgttgcaacgtggctgcccgcacttgcccgtgaatttagagtggcccgtgggtttggtggagacccgagtgaacagtcccgctgtggctggggaatcgaaccggttcacgaaacgggtctcgggtctggggtttaacggtgagggtaggattcttaaggtccgaaccatcccatgttgacgaccctctctcttcattttctctccaaatttcagagaacagagaaaataagaaaaatatagttttgaagagctttagttgtttgcctttgatatttatttatattaaagggggttgatcttgttttttaaaataagcttggaaagcaaggctttttattttttatatttttgtacgtgtggaccaagccatttatctactctaatagataaggagaatatatgcttatatagtggaaaaataaattgctattaggcatgtccaacaatttcaaggtgttgttttttatattatttattaaattaaaatatgtaaaattcgatattaaattatattaatataaattaaatatgacattttaagatacttcctagcattttttaataaaaaatattaaaagatgctttaaacagaagtgacatattacatgagaaaccgttagacgtcaatcaaataattataagttagtacatcaatataatttgataaaatattagattaagaacatttgtgccaaatataaccatgctcttatatatagaaaaattagcttcattttttttgcaaataaaaaaagtgcgtgtgtgttttttttttttttttattttctatatttatacaaatcataattctatattttcatgtgatgttattttataattaatgaaggtattctattttactcgtggttagttttttctatacacggtgaaaaaaattatttaaattttatctttgacgtaataagttatttataattttttataaattgataaaatatatgttatacctataattatactgtataatataaatcataaatattctctaaacactaaaaacaaaagaacaaaagagatgttccaccacctaaaatgctccctataattatttatattaatataaattacgaaagtgattaagacataaacttcttaacggattaattgggagtgtaaccattacaaaaagagtaatggcttttcatacaatataggcaatattttattattagtattgctttcttagagttatggtttttttatttttgcatatgacacataaaacggttgacaaaagcttcaattttatgtttttttttttttt

SEQ ID NO: 28635 - DNA, 1221 bp, Cannabis sativa
attattattattatttatctttttacaatgaaaactttcagtttatttgtaactttagaaacgaatttaattcagatcaacttcaaaaagatataagctgtacatttacgaagggttaatttttgacatttgtatttatttgaagaccgtccataaaaactttcttggtcttggaagtttgaatgtggataaatgatcatgattataataaagagtacaataatgagttaggtaatagttatccattattaatgctaaatgtttttaaatgtccatttacacatgcaggtcaaataagttaaaagacttaaagaaagaagtactgtataatgatccaaacacaaaagcaaattaaaaaaaaaaaggtgtatatatgatgaatctaatttaaatccaaaacattctccataattataaacatgaatcatataacggtaatgccaacggaaaaaacatatatcttttttcccaaaaatcaaagtcactttatagctctacttttctttagatattcactaaagaaaacatttcgttcaacttgttttttcggcttaatcatatatgtcttcgaacaatgctaagctaatgccactagggacggaggcagaaaaaagaatatggggccaaaatgtaaaaataaaaattaaggggacctatatataaatttgtaaaaaaattaaaaaaaaatacaaattataagtgaaaaaattaaaaaaaaaaaaaaaaaaaaaaaattgggaggccaagaccctatatcacatcacctcccatcgtccctgacgtcaagtcaatgtaaatctctttttgtttctttaaataagtcaagttaattcttttttgattgggcaatttattcaaaccaaatataatagactgatgttgtgaaaattccaaacacacgagtgccggtattgtttataagtaatacttatgagaatgaggctaattttacaagaattatagttaaatatcaaataattgaatctttgttattatttagcaaataaataatttgaataataattgtaattgaataataaaaataaaataaataaacaaaaagacaattaagattgattagaaatatagggcattcaattttaattgcatcaatttcaaaatataatttaattaccttttaatttctttgtgatagcaaattattaattcaatctatatttttattaggacatatgaaatctaaatcatatgataaaatcc

SEQ ID NO: 28636 - DNA, 3001 bp, Cannabis sativa
  modified_base (2689)..(2690): a, c, t, g, unknown or other
aattatttttttatatatataatagaaaaaatatttattattattattatttatttatttgaggtggttctcacgtggatgggaagtgggggataatgggattatatgaaacaattgagaactacttttactaaccccataccttcccttttcgcgcgtgggttttaaaattatttccattttaagttttattttttaaataattcaaatttattgttcaaaaattgtataatttattatgtccaaaaaaaaaaatttagaatagtataatttattaataactcaacactaatagtatttaggctaattagcaatttttatattcaaattttgacatgtactaaattatatcccttgaacttttttggccgttaaaaatttccttgaactattaagattgttagatttaaagacttttatttaattttagtaaaaaaaattctaacatgatgaaagttcaggggcatgatttagtacatatcaaagtttaaggggcatgatttgttagatataggaagcatgatttagtatataaacaattactgaaacagtaaaattgaatgaaataagagaaaactccttaaatataacaatctcaataattcagtgaaaatttttaacagcaaaaaaattcaagggacatgatttggtatatgtcaaagttcgagaaaaaaattacttattagtctagtatttaatatgattttgaggtaatgccttataaatatgattgttgatattttataatagctattaaattaaattattaggaatccaatacttaattgtattgataataatataatattataaatagtgttaaacaccacttatatattttaacatttcttaccgtaaaaagaatggagagaacgacatagctctagccgagaacataaaataagtttcaagtacttttatgctatattttagtaagtttgtgcatttttctccaaactacaaatttagaaattcttttcaaaacaaaaaaaaaaaaaacaagaaggtaatttaatactacattttaataatgtttgagaatttctctcaactaaaaagttaggaatttttttgtgtaatgttatggtcataaacattgtttaatgcatgattttatatatatatattttttttttacaaaaaggaagtttcaagtttgaattttcctcttcaaaattaaaaaaaaaaagttaattaaattatgtaaatattcaatatttctttttttgaatacttcattcactaatacaaattaatgttcaatgattaaaaacaaaactacaacaaatattatatgccacaaaaattatcaatttattttttgttggaaaaatgatatatgaggataagttatgtgataatatgttaaaaaaaaatgatcaacttgttctccaacaatgagaatggtctaactggcaacacaattattattattatcattattattttcatgaaaaaacaaaaactaaaaaccaaaaaaaaggatattaatgcaaataaaacataaatcatttgtgacttggtagatagggctttgttaggaaaccacaaattatgggatcaatcgaaccctccaaaattcataattgtaaacaattgtaatttttatagaactattcttttatctttgaatggaaattttacattatcattcacaaattatgggatcaagcaaaccctccaaaatttattttttgccccctaattaaaataattgttttgcactttagctcccttacaaatattttctacatccatccctaacccatcctaacaagaatttctctcccagatagagaataaacgagtatggggtgaggacagatattaaaatagttaatgaggacggatatgagagaaacgctatttgtctattgcccatccttagcataggatcgattctaagaatatatgggcctaacgccatttaaatttgaagaaattatatcacccactttattttacatgttttaatttttaccttcaaatttatatttttttaaaatatacctacttttatagatgatgtccctattatacccatagattagtacaaattatgtgttagacttaagtagagggtcagggtgtattaggcaacccactcagtaggtacatttaaataaaatataatttgaaattattttcgattaatggatacaaaaaagaggtatttctcaacttatctctttaggaccctcattttgagaaatatatcaaaaaaataattgaaaaagagtgttgtaggacttgaacttatactattgtgtaatgtatcatacactacaaccaactaagctgtcaatatttgttgtttacaatgtacataattttatttaaataaaagtctaatgagacttttaatttttttattttgttcatccgaaaagtgtgggccctaagcactagccgagcctgcctttagggccgacgcgcactactgctacttaataacaatattcaagtatattataaggagaaaaataatttacgatgattaagtattttttcaatctaaatgaagataattaaatattgagtctttctataatggacatcccttaaaaatggtgtattgatatatctattatctgtttcgttatttaaaagaattttttagtctaattttttttatagttgtatactttgtaattatttgagatatataaaattttaaaaaattcagaannatttacaatataaaaaataatatttaaattatttatttcccacgtgtataaaataaaagagtcatgtgtacaattaattgtttgaaccatattttcagctttttaaatttttttgaatgtattaaaattttataaaatatcttaaataattataacgtatatgagtgtaaaaaaattaatctaaaaaattatctcgaatataaaataaataagagtgtattgataaatttattttaagaaaatatattgtagaattttactaattatgactatgagatatgaatatgatttaaggtagagattagaacaca

SEQ ID NO: 28637 - DNA, 3372 bp, Cannabis sativa
  modified_base (879)..(882): a, c, t, g, unknown or other
ataatatgaatttattttaattaatttttatttttaaaaattatattttctaaaagtagtattagtttggccaatactatatttgcatgtgatacttgattgatcaactaacagaacgataaattgagtgttataagtttagaaatttgaagatatcaataggaacaacaacgataacatcaactttatatgattggaatataaaaataatacattatgaaagaatttaattcataatctcacacatgtttcttcttctacataatctcagatttgctttttttttttttgttcaattcataataaattttttttataaaaaaaaaatactttttctatacatagttatgaatacatatatataaataattgaataattatttaattttaatattattaatttaatttatatttactgttatgtatttttttaaaaataattaatttaacatagatatttttatagaaaatttattaaaataatagtaaaatattttgtaaatttaagctctaataaaatattaaaatattgagacaattaattagaaaaaagaaaaataactttagagagatttcggaccgccatgtcaccgcctcatacttctcctttatatagagatgaaaatttttgatttataatttcacacctatttcttcttctacataatctcacacctacttttttttattcaattcataacgtttgattcataattaattttttctatataaaaaaatatttttcctatatatagttatgaatacatatatataaatatttgaataattatttaattttaatattattaattttgtttatatttattattgtgtttttttaaaaaataattaatttaagatagatatttttatagaaannnnattaaaataatagtaaaatattatgtaaatttatgctctaataaaatatttaaaaaattgagagaattaaggagaaaaaagaaaaatagctttagagagatttttgaccgccacgttaccgcctcatacttctcatttatatatatagattaggtaataatgaaataatagagctgtaaaatgtaaatacatgctgcttttgaggtccaaaaaaccactcaaaaggtgagcatatatgctaaattgtatgatttctttttgttatagattataaaatattgtaaatccctacaacacaaactcaacacaaaaacatacacattgcaatgcatacaaactaggtaaaaaacttgacaagaaataaacaataatttggcaaaaacaacgcagaaaaacagagaaaaataaaagagtgagacaaagaaattatcgtggttcagatctcaatgtgagtcctattctagctctctcccaaggagtttctccactatgcaatggagttcacaaacaccaataatgagtttatcaatcagagctacacacgaagagatatagcctctcaaacctttatgatcaaacagtttagaacaccataaatgctatggttcttcacctccaagagtctccaactttggctctctctctcaacactcttctctaatttttcactcactctaatgaattcttacttgcttacaaattacataacaataggtgtttaggagtctcctgcaaagtcttcttctctttggtcagctcagtgaccttggctacttgattttgaaggagaatacaaaagttttacctttcctctttcaaagtgttcacttctttgatcactacctctaggtcttcctcaagcttggatgtggacggcgtgtcctcaatctgttgcttgaggtctttaataagcttatttatggcaagaatcttcttgttggcttcacccaactgaaagtcttctgcttgacatccttttttgcatcttccaatgttgttttcaatgtgttggtggtttttttgacttttcgagcagcaaatttagctcacgaataagtgtatgtcatcttctaattaagcttcacaataaaataggtataaaacatgcacaacataatacatgtataaaatagtgaatggaaaagtgcttactcgagtgatctccttcaacattccgaccatcaggacctccacggacatctcatccgccccaacaagttgttcattcacctcaagaatcacttgatccttatagaatgtgagaatatccttacccttattggtctctagttgcaatactggttgagtagccaatgtctttggcagcccgggcctcttgatgtttttccctttagagcctttggcctgagtagttaaagcttgaaacttggaatttttcttggccaagggaataaaatcatagaccaccacctcgcgaacattcgaagagacagtatctaggttggcctcagtggtaatctagggagttttagtgctcggagcaatactctttggaaaagtatcatctaccttctagcgtttggtgagagacttctgatgggaggcgtcacctaatctcttcttcagagaatgtgatactcttttcgacaagactgcataaaaaaagaacacttgtttgaatatataatcaaggacaatagggttttaaaatgaaaagacaatctaccatgcacatggatgggagcaccctctcgaacaagcaatgaaggagcatcctcatcagaagagtcgtcttcttcttcttcttcaaccacaaaagcctctccctttccttccacctagatggaaggatgagtagcctctttaggatcatctcttatcctaatacaccgctcaacaggtacttggtcgccttgggtagctttcttcttcttcgtcttcttcttcttcttcttcttcttgctcgagtgcaacctcctcaatcacttggccttaatggccaagaatgagatattctgagcttcttcaaggagtttaattattttctgggccctcttcctaagctcctaggtaaagggtggtcagtagaaggatgaaatgtgctaaaaattgatatggttactgctcatgtccttgaccaaataatagtcttcaacaaatccaccaatcttagatacattcgtgtctattatgctagttatccacctacggtcgatctaaggaaagtagaaataccctgacctatactgcatagggatggatttcaagtcaaacagccaataggtatcataggcagaggactaaccccatccttgtgaagcgtacaacacaaataaggcagaaagatacgttattcattggcagtaagttgggtcagacatatatgattatagtttactatttggtcagggtattggcgcttcggtactcccactcaattgaactatcatgtttccaagatgtaagtattggccagaataaaaagttagcttccacgaacaactctaagaacataaatgatacaactaa

SEQ ID NO: 28638 - DNA, 3311 bp, Cannabis sativa
tacgcccaattctacaaaattatgccccaattggtttatattgtaggagaacttacaaaaatactataaaacaggggaatgtttataaaaatactgtgacacagaattttttatatttttactatactaatttttcaatactgtgtttaaagtttcaaaattacaaatatattatgttccagtaacaaaaaaaaaaaatcaaaaataaataaaaaacaagtctagaataacttaacaaataacatgaaaataactataaaataacaaaaatataactacaaagcaacagatgaataacaaaatattgacttaattgcaataagcaaaataatatcaatttcccaatatattttggtattaccaatttttgttacttagttttgacaaaatgatgtatctttttgtactatacattacattgttttttatttttttttatgaaatttgttgttacaactttattctttcaaccttttttttcttttttgagttagtgataattaaaaaaatagagaaatgctaacaaatggctttatttttctctatagtgaaagttaatgtttttttttttttttagaataataaagtaaatgtccctttttattttttgctacctaaaatacccttaactatatataaagtatatattattatgttttattcattaaaactaaattataaacaaagaataaaattgcctgataaaaatatgagttgtctcgtataatttaatttaatatattatattttttgttgtggtgtatcagtttattttttaattatagttggagtatggtatattaattacatgatatgttatattttttagtcaaacatagataggtatagtatatacattaaatgaatgcttttttttttctgttattctttttttattaacgagtgataaaattaattattgtatatgtatgaatatgaatcatatatttcatgctaatttagaaagataaaagttataatatatcaattgtttgtactatgataaaaaaattttgatgaaatattaatttttagtcagtggtatatacattttacattatggtatatacattttgtgtactagagtataacatttacaaaataaaataataaaattttgattttatgaaaatataccctaatcctaacctaatataccattatagaaaaaaaatatatatgtatatatctgtacaatcttaaacatagaaacaacatactccaatcaaatatatttatgcctcaaacttaaactaatattttattttttttatttcacccaatatatgttatatcacatataaataatatatcttacaacaatatgaatataccaaaaaattaatattaatgatgcacttaattttttcgtatccttgatgatataataaatcacgtaaaatagatatatcaatcttttaaattaatataccagttaataagtttatattttactatttctctcaatattcataatatacatacatcaatttttatttttatttttattttttatatatataaaaatatatgccacaatatcacatttaaaaattaatatagtatcatagtgagaaataaaaataccaaaaaattagtttgatattccacacgtttttttttcctttcttttttcatatatcataaaaaataaaaagaatacaccccaataaaatatatctatacctcaaacttaaattactatttcacattttttcctctttcattctttatatactaatatacttgaatatgaatatattgtaatgtacttttgtctttcgttcttcatataccaccccacataaaaataatatactacattattaaagtaatatactcgaatatgaatatactataatatgctttattttttgttcttcatatactaccccacataaaaacaatatatcatattattaaagtaatatactcgaatatgaatatactgtagtataatttgtctttggttcttcatatacaacttcacataaaaataatataccacactattaaagtagtatatttgaatatgaatatactgtaatataatctgtctttcattctttatataccactccacataaaaataatatattacactattaaagtaatatactcgaacatgacattattgtaatatacttgtctttcgtttttcatatatcaccccacataaaaatattataccacactattaaattaatatactcaaatatgaatataatgttatatattttatctttcgttcttcatatataaaaataatatatcacactattaaactaatatactaaaatatgaatatactgtaatatgaatattttgaaatattagtgtaacttaaaaaagatgaaaaaaaaatacacaatataatcattgaagttttactcaacctgataatttaaacttatttgattcaccaaaaatacaagaaaaaaaaaagttgatcaactagtgagtggtaaaattttctttgcaataatatttcattagtatataaatagtattagcagttgtttaaatttatatgtaaaaatgaaagtaaaaaaaaaatggaacgaataattataaattgtccaatagacaatcaaacaacagatgacaaaatcatgatttctataatatttattttcctactacaaagcaactttatgtacaataaaaggttataattgtaatttcattattaaatttttaatcaaatggccattttgctaaatgtttataaaaagggacatttattaacttaatttctaaatatgaggccattttacatcttaacccaaaaaaataactataaactgaaaaacaattaaaagtaacataaaataacaaaacaataattgcatatatatacaacaaaaatatttttggaacaaactgaaaaatatacacaataaataatgcacctaaactaaacaacaactgtaaaaaaataatagaaaaacaattataaaataactataaaatacataaacaacaaaaaacaaaaactatgcaagacataaaaaaactatgttagcataaaaaaaaactataaaataattattaaataacaagaaaaaataattataaattaatggaaaaataacaagacattaatcttgttaaaatatgcaaatcattcataaattaactctgaataaactacaaaatatctccaagaaaatatactacttttattaattatgtaaaagatagaaaagtactataggaggagtgctcttaattttttgtaagagagagaaagagtgttaaaaaaactagatataaaaatgtacacttattatgtacaaagataaaaaaaa

SEQ ID NO: 28639 - DNA, 2880 bp, Cannabis sativa
actttgagcattcttaatcaatcatatttaccattggggctatcaacaccaccggctggttcttcgtaaaaagcataccactgcatcttccctgctcccacatctgacgaaacaaagtattgcttgtgtcccaagaacacccggtaccttcacaatgagaagtaagatcgtcaatttgagtctccactttcaatctaagaagaaatgcagtttaaagattaaagatagaaagcataccctacagtatcgatgtcagctggtacaaaatcagcaataccagtataacatgtataacctgaataggtagcttctgtttgaccaaacaagttcttcctgacctatcacaagggaacaaaaggaaaatgtcaattcaaattgatgttgaaagaaactatctataacaattatagctcttcaggattgtttccagtggcagaacatttcaaacgagctcccaccattttgatcacaatagctgcttatggcctaatgagtgataatgttcgctatgtaactaggacggattttgttacaaccacttagacagaactcaatctttaaatactaaccaatgagaggcctaagtgatcttaaaccatcaacttataccatacttagttgatgagggatcctaggtctccccttctgcaacgtcagcgtccgtcatagataactcattttcgaaagactagcttcttccagtagttgataaaccaccaactaattacatacttagttgatgtgacgatcctaaagacttcctctctaatcaactgttatgttatcaacttcctcacctaactaagtttttaggagagaagtgtacctttgaccaaataccatcagctccaaccagaagatcaccttcataccgttgtccattctcaagaactacagtaacctaagcttgtgaaatagaaaagaaatgtcaaaaccaaaagagtaactgaaccaggtaaaagttatgaacaccatattcttttacctatgctacaaatatggtagtgttactaataaacaagatgtaaaaaagcaagactcaccttgtcaccctgatcctcaaaatcaacaacgttactatcattcataataatctcttctccaacagcacgagccaggatttgttgcaaggacattcggcttatgactctagttacaggtaatcctcgttctgctgcaggagtgaatgtatcaaacttgacgtacctgatataatcaactaaacattatctatctcgctagtcccttaattatatataaattcaccgaagttatataaattacaactcacaaggttagttagacttagaagatgtaataatatcagttagactagtcaggattctttatccgaactttaacctgtatcgaattgtgtacttaaacttttcagaccatattattgaattaatagacttctgtataattttactaacaagagcgccagatgtggaaaattgttcgggagcacaatttggtacatatcaaagttggaaggcgtacatggacacattaggcgtcctgaattaggcataaatctttcagtccaacaatttcaattgttttggaaaaaatttaacggctaaaaaagtccgtacaatatggtacatgtggaactggaaaaaaaatattaattagcctatcagttaaaattagaaactttttcaatccatataatcatatctatcaacctccaaccaatttgactcttcatctattttgttggactaaataaattagagtgtgattaatttaaagcctaataaaagaacatattgagcttaccaagtaccggaaaccccatcaaccaaaccattaatacggtcgccggtaacacaaccgacccgcataacttcatcagcaacatccaaatcaatggcttccaaagcagccaaagcattactctgtatctgaattggacctctgtactgtccttcacctctaacagcactcaaatctctctcaaacaccgatacctcaaagcctttcttcttagccgccagagcaagaaccagtccaccgatccctcctccggcgattagtagcttaagtttcttctgcggcggcttcctgttatcatgggtctcagctggggcaagttctgcgggaggagcctgagttaccatagcctttaactcagtaaagctcttcttttgactactacttgatctacttttaaattggtcgtttgagtaatttgaaggtgagaattcaagtgggaagtctttagaaaagagatttgggaattgggttcttgagaaaacagtggttgaaagactcatggcgttggaacatagagcggaagccatggtcgtcgtctactactgttactgctaaactacttggtttggtataaagcttgtgtctttaggcaaagaaaaacttgggtttcctctctgaacagaggaaagaaagttttagagggagaaacaagcagagtgagattagctgatgagagagatggaaatggtggggtaataaaagattaggagccaatccatgaatgaagaaaatcaccagtcatggagattcttacgccatgtggcaaactctccacgtcctaaatgaaattccttgtttggaaaaattaaataaaaaccaaatctttaaagaccactacaatgagctcagccgttttttgtggttctagttcaagtttgatttttttttttaaggtataatttctaaattcatttatgtgtatgttttttctagacttaaaggatataactataatataatacatttatagtgagaaaaaaaaaggtaactaaatgaaagtgatctctcaatttataattgttatgattatgttgattgaagtctttacccgtaaagatatagaaaattatgtcggaccatattgtaagtaatcatcaa

SEQ ID NO: 28640 - DNA, 2407 bp, Cannabis sativa
aatgactgaaattcattaaaaattgttgcatctacatttaccttgacactgttttactaaggtactatctaaagctcagctccatcaccaatctcataaagagaatgtaatgactcaaaatttgatgcctgagcctttctccattgcttaagatacccatatgtcgaaagaacaatactagaaattccaaaagcctttttgttacaaacaatctcattcctagctctccaaatggcccaacacaaagttgttaataaacaacgcctctcattatcaacatgttgaaaacacttaattcaccacccaatccaaaaatgtgttctcgattgccacattggtccaaatcctgttccaaacaagctgaataatttcacaagagacagtgaagaatagactcttcctccgtgttacagatggggcataaagaactcccctcaactcgcttagtaagaagttgagtcatagttggaagacaacccataccaacacgtcacatgagactcttccccttgggtgggagtttgagcttccaaaaacttgaaaaatcatgttcatgccaacgcccttgaattttttgcaagagattgtaagtactcttaactaaatatgcaccaaagacttcttggttccaaacatagtgattcactccttgattaagatgtgatgggatgcctaaaatgagatcaatatctcgttgttcgaacaaatctataagcaactcctcatcccaaccattcccattcatattcatcaatttacttactttaacatgatttaaggttggaattagataaaaccagtgggttttccacatcaagaagccatgaggaattcaaaaccttaatatttttcaccattgcccacatgcctacgaaccccttcctttactaagtgctgagcttcctagatacttctccaaacaaaacttggattatcaccgatttgtgcagtaagattgtaacattggaaaagtacctagctttgaaaattctcgcagccaaagatgatgactttgtgagaagacgccagccttgcttgcccaaaagggcaatattaaatcctgcaaagcgaaaacccattccgctaatacttttatgtcgacacaaatgatcctaagatatccaattgatacctttccctctagaactagaagacttccacaagaaattagccatttgttgttccatatcacaagtgatctctcgagaggaagtaaaagaacacttattgtatagctgggtagagatacatattaaattatcttaaacttgttaaaaaaaataagaaagaggagaaattttattgagctataaaataccatgtatagtagtatactaaattcaattaataaaagagagtctaacaaaatttggtttctcataactttgcaacaaagaaacaattcttccttcaatttctacagaagcaacagtagcagaaaatactcataaagcaaagtcttaatctccaactttgcagaagtagctagagcttggatgagcacttttttttttttttaaatcaagagatagacaatgctaatatctacctacaaccaaactcagcaaattaaatttgcacttgtactcatactcactcaataatgtaggtctcaaccatattaaatgtcctaccaatagtcttttttaaattccctacattagaatagtcttatatatataaatatatatattgttttttgtgtgagataaatgaataatgtcctatatttgaagtttttttttttttttttttgataaaattagactaaatatatcatttatctaattaccaaaaccttatcataggttattaatatatttgaagttggttcagtgtaccagtcttcttatttttttgatatgaaaattataatgttatttactctattctacttggtgttattcttacttttaatatgttatatataattaagggtatgtaaattagtgatcggtagaatcaattttaccattgaaaaataaataaattgaacaattaattactatttcctttcaaatattaaaaatttaattattttgtgatagtacaaatagtcacaccgcatcacattttggtggtgtgatttttgcagttttgagctcttgcagtgctattgcggtttagaagtttacaataaccgtatgtgcaattttgtttgaaaaattacctaaaaatcaacctgcaccgcgaatataaatctagagtttggagacttagattggaggcgtccaatctcaagacatggacttagtttggagcacacatggaactatatgtgaggcctcctaaatccgaattctttttcggcttgatatagaaactcttcgaaatgaagtatggtttaagtatcaaaaatctcttcatttcccttcaatgtccaacataaacagctaaaatcctgtta

SEQ ID NO: 28641 - DNA, 1598 bp, Cannabis sativa
cagtttaaaaatcattatgcagtttagggaaatttacatacacatttttggattcaattgccagcttcacttgagttttcagacccgcatatgaaaagttgcagtctttgtgctgtttcattggagtctagacaatagacaagcttaattatataaactctatgatgatatttcagccatatgattatcataaaagacaacttacagagaatttgattgcatgtgcatctccttcccgagcaagctcctcaatagccggaccaccacttctcctcaaatcaagaccaagccattttgcagtcttgtcataggcctcacctatagcatcatctatacttgtaccaagttgtatgtagtgaccaagatcacgagcaagaacgagaagattgtgtcctcctatggatggtcaaatgtaaaatgtactaagtaaccattaagaacacagaagttcaaattgaatgcatggctgtcgtagtgtttaaaaaggttttgcatggattggaaaaaatttatgatggaaaagagtactaaactttataacatactttttctttttaatatttcactttctgaatatatttatattacatttaagttctatttttaaaaagttcacaatgaatgtttgagaaaatgaaatcctttggaatccctttttttcccctcctaaactccaagatccaaacaagaggtaagtgacttaagaaaaattagagaacagagtggaaatccaaaatgccagaaaccaagaaggtagtatgaagctagctaaacgttggattgaatcttgagattgagaaacatcaagcatcatatattgtgcctggcatggcaaaccgcaccgtcacagctttcaaataactataaacttgggtagttgtttaagtacacaacccttccccaacatgagttttgactagaagaagtttactataatggtaaataattaacaaactaagtggggtgaaaattttgttttttattacctgaaataagcaacgccaagaaaggaaattgcaagtctcgctcagttaatctagaacaaaagagaacagaaaatacgatgtaggaaagcacctcaaatcacattttggaagcatatatacttacgtacaaaatgcttcatagagatcccacaaaaagaaaatgtatgctaatctatttagaagaactcccctatataaccccttacctggcaactagagcatgagcctccatgtgatgaacaccaaccattggtagattaaagctactagcaactttacgagctttccgcactccaactgcatcatattttttgaagttatatctttaaagaaatccttagcaacattctgagattatgtttggaagttggattttggtaaggaaagaaaaaggtaaagaaagtgtggaaaatataataaaaaatcaatttttcatgttcaatataaaaaatttgttgaagtaacttttttcccataataatctttccataccaaacattttttttactctacattttccatgcctattttcccgccaaaatccaacttctaaacacattgttaaaggatacttcagtgaaagctgttttaattaagaaaataaaatgctat

SEQ ID NO: 28642 - DNA, 2978 bp, Cannabis sativa
aaaaaataaaactccctatgaattgctttacaagaaggaacctgattactctcatttaagggtcttagggtgtcttgtttttgcttcaacacttccaattcatagaactaaattcgacccccgtgctagaacttgtttcataggcctatccccaaaggaattaaagggtacaagctttatgatattaacacaaaataaattttcatatctcggaatgtggtttttcatgagaaaatatttccatttcataaactaaatgaaagtattactaatattgatccatttactgaattagttttaccttcttctcacatcactaacacacctatgagtgattatccaccgattgcagatgaacaaagggacaacacagaaaataccaacaatcctgctgccaatgaacaaagcatcgaggaaccagtcgatgctcctcaaagcacagaaccgtgtgctcaaaatcctgctgcaactgctaatatagttcccaggaggtccagcaggatctcaaaacctcccacctatcttcgggactttgaatgttactcttctatacaggacaaatcatctactccccatagtttaaataaatatttgtcttatgcaagattatccgattcttacaaagcatttattcttgcagtcacttccttaaaggagccacaaacttaccaacaagctattcaattcaaacaatggttggatgctatggataatgaactcactgctttaaggaataacaaaacatggatagtggtccctctcccaccaaacaagaaagaaataggatgtagatgggtctacaagatcaaattcaacagcgatggttcaatagaaagattaaaggctagactagtagcccaagggtactctcaacaagaaggactcgacttctttctttgacacccaccttttctcctgtgggtggccaaaatggtgacattcaaactgctacttgccatatctaccataaagcaatggcacactttgcaaattgacattaacaacgcgtttcttaatggagacctcaacgaagaggtttatatgaccttaccacctggtttgacagtctctaataaagatcacacgggtcctcctcttgtttgcaaattgcagaaatcaatctatggcctcaagcaatcctcaaggcaatggtacaaaaagctcacggatgctctcatccaagaaggatttaagcaatcacaagccgactacactctctttacaagaggacacaatgacaactttatagctatcttggtttatgtcgatgacataatcctcacgggtcccaacatagcagttgtacatcaagttcaagattccctacaccaacaattcaagcttaaggctttaggtgagctaagtatttcctaggatttgaaattgctaagtccaaagaaggcctcttcatgtctcaaagaaaatatacactacaacttcttgaggatactgggttcacgggcagcaaaccaacaaaaactcccatggatcctaaaactagactcgatgacactcaaggagaacctctcacaaacccttctgaatatagacaattaattggcaaacttctttatctcaccttatcaagaccggatataacatacgctgtcaacaacttaagtcaattcatggctgctccccgaaccacacatatgcaagctctacaccacctaattcgttatctcaaaggaagtccgggtcaaggtcttctctacacgactaactcttctctacatcttagaggtttttcagattctgactgggcttcttgccccatcacgagaagatcaactaccggtttttgtatattcttaggggactgcctcatctcatggaaaactaaaaagcaacctactatctccaaaagctcagccgaagctgagtatagggcccttgctgccaccactagtgagatcacttggttacaatatcttctctcggatttgcaagttccacaacatgcaccagcctttatatattgtgataatcagtccgccatccatatcgccaacaatcctactttccacgaacggactaaacacattgaacttgactgccatttcatccgagacaagatcaacacctctaaagttcgactcatccctgtctcaagtactctccaattagctgacgctttcaccaaacccctctcggctccttccctcaacacacacattggcaagatggctgtacataatatatacagtccaccttgagttagctgagttagctgagttagctgagtttgttattattttggttaagttagttgttgagtctgttatgattagtcaaagtctttccctctctcttgtatatatatatccctgcctttcctttctctgtaactatcacattcttttcatcaaataaagttcttttcctctttcgcattaattataaataagttaatataatagtaaaacttgctaaaaaaaaattttacacctacttgaagagtgcgtattagaatttccctaactcaaagaaggcatattaaaattttaacattaattgaagagtgcgtcctgatacttatatcaattgatttctatattcctctaaatgttgcagacaaataatttaatatcttatttaagtatacgatatttcactttgttctattattgtatcctatgctaataaaatggtttatttcgtctaataaatttaaggcttgattatagaatgggatataggagggtttgtttgttaacattcctctgtatttcatagatttggcaactcaactctgttttcacaatagtaaaattaagaaaccggtttaatatgtaattacacaaagtatgactttatcaaaacttccatagataaatattgccaacttctaaaaaatatagagagtgagacttaaaaaaatgaattccaactttataaaaaaaagctcttcacaataaaaaaatatatagagctcgtttggtacgccgtataatagtcatattgtattaaataataaa

SEQ ID NO: 28643 - DNA, 2277 bp, Cannabis sativa
ataaactcggtatctctatctctctcgcaaatgcattatcactttttttaatgtctcaaagatcatgtgtcatatttctttctcctttttttcccaaaagaaattatacataatctctcgctattttgttttttttaaaaaaaaaaaaaaatcagacatactgttaattaatttagctcttattattataacataccttttaaaataatcattttgacaaagtatatgttttttttaatctgcaaacaccaatttttagacttaaaagtatcattttataagtttctttagtatatttatgttaactaaaacgcaaaagaaaaaaaaaaaaaaaacctgaagattaactaaattgtaaacgtacactcacaaagaaaattataaacttaaacaaaatttactatagcaaccaatttcataaactattataaaatattttgttattttataataaaaaattattcaataagtatattataaaacaacttcgtaaattactaacaaaaatacttataaaaaaaaactaaatgacatcttaagtcataagtataggctagtactttcacacatctcttgcaaagaaagtttccaagttttaatcctctctcccctaatattaataataataataaaaaaatggtcataaaatcacttacattaccatttttttttataatgtctaagatactatttagtttctttatataagttattttgaatatcttatcgaaattacattgtaagttaagcttatgtaaaatattatttagttactattaaatataaaataataaaatatattttggtaacttgcaaaattggttggtatattttgtttaagtttaaaatttgattacttttttgagagctaaatatatataaactaaaacgtcaccttttatttcgattatcttttataacaagaaaaaatatattattcgtacgtgttaaaataatcaccttgaaaagtaagttgtgatgattaggcctagtgatgactaactcttgagctcaaatgattatcagttatcataatttttttaaaaatgtttgaaaagaaaaaaaaaagtaactaaagtgtacatccttcattaaaaatttagtatataattaatataatttttaaaatgtaactaaatttatattactttgttattttatgagttattttagaaatatatttaaattgcttattaagtaaatttgtttataatatactatctcataacttttaagtataatttaattaacaaaaagacttttaagtataaattaccaaaatgtttaagtaatttatgaaattggatggtatatttaattttaattatttatttgttaattgtatagaaaagaaactcgatacttacttttaattctatttattttctctagtaaaaataaaaaaaaataaatatgtaatcacacatcaaaataatgatctttaaaaataaattataattgtgtaatttttgagctaaaattattttttttgtgtgatcgaatttcctttaaaagttataagaacgagagaaatagagaatgaaataaaataataaaataaaatatttaaaatgaatgcttcaaattaatgtatcaagcaaaaaaatgtgctgagagaacataatagaaaagaaaaaagatattttgtatagacaaatttacatagtagaccaaaatttataaaaaaaaaaaaaaataggttaacatggaggaaaaaaatcacttttatgctttgttttttttttacaaaaatatcttttcagttaaaataataaatctttttttggttgttttatagtttatttatttataattgtataattaattataattatcatgagattgtttgtttgtttcatagtttatttatagttgtcgtgaagttgattttcgctgttttcttactttttgctgagcaaatatttttgtaattttaaaaccttacaagtgtatttgtatttttataaataaaaactttgtactgtaaaattataaataaaacataaaaaatatatatttttgaaaattttctattttgtatatttatgaatttaattgaggaaattatattttatactttactttacatgatttaatttctacttttatttttatatttttttaaatatacccacttttatagatgatgttctcgctatatctttaaattaatgtaaattatgtgttagacttaaacaaagagtgagggtgtattagtcaacccacttataaaagtgagtatatttcaatgaaatatattttaaaagtatttttttg

SEQ ID NO: 28644 - DNA, 1178 bp, Cannabis sativa
  modified_base (353)..(366): a, c, t, g, unknown or other
atgcatattgcaccttgtaatctttcatagaaaactaagaattaatattgagattataatatttgttttataattaagatagaaaaagtacagttggccatagttttgattcatgtttcaatattatatgactagattgtgttcactatatttttgttgccagttaccattacttgattggcaatttggaatatggaatatttgaatatagtataatattttaaaggttttttttcttatttttacactttaaaataattttttttataacaattaacgagcaatcttaattgcaaccaaaattcatataacaaaaaaattactgaaataacccaaatcgtaaatttaaaaannnnnnnnnnnnnntaatatataaagtaatttctctttaaattaagttctatataactctcattgaatctcatatatccattccgaaattattttattttatttggaactccaaaaattgattgatcatgtgtaataattcagtaagatttccagttccacaaagctcttcatttcttttgaatagttcatcaaactattcaatattacaaaataaaagctattataatgactaggtaggaatcaaaaaaaaaaaaaataaataaatagcaattgatcatttgtgaacaaatatgtaataatggcttttatttctgataatcaagcaaacaattataacattgtctcaattaatatcaagcaaaacttaatatacaagaatcaaagatcaaaccaaaacaaattcctataaacacatattattacataaaaataaaaaagtaattaataaatcgttattataaaataccacactgtatatttattataatgtctcaatatataatcaccaaacataaaaaaaataaaataaaaaaaaaaaggtgtggtagagcttcatactaaaaccatattattattccaaataatgaacaatgatcaactaataatgaaacctttggagaagtgtcattaaagagatgaagagagaaaagaatgtcgaagccccagaaagcgacaatgcgaacccggctccagtttcggctccggtttctaacccggatgtgggagcaagggccaggtcttgtgccatggttttggttactaaactaaccaataatattcccatcattaatacaataacaaaacgagtaccaaagctctccatt

SEQ ID NO: 28645 - DNA, 1291 bp, Cannabis sativa
gaaaagtaattccttagtttacatgaattacaattcctatggaatgagttttccattgacaataaacaaaccaaacacttgaatgatttttctttaggaatagcaatcccattcctacactcattcatgtaaaccaaacactaccttagtgtcttaaactaattgtctgtaagacacgaaatggagtcgtaaaaagcatttttttattgttatggttaaacatgtttcgtatttgtgtcaacatgacacatatattaaacatattatcagggctgacccatgagggtaggcaggctaggcgtgcacctcgggcccccgaacgctcagggctccgaaattgtaaaaaaatatattaatattgctaataaaatattaaataagaagtagatataataaaatttgtttggtgtaatggtaaaatgttttactttaatctaagaggtaatgagatcaattcctaacctttacattttaattttttttaaaatatttaatctgtagttataagggattcaaccttggagctcttaagaatttttaaaagctttaccattaaactaagcactaaaactatcatttttataatagttaaattatatacataggggccccaaactttgatttcgccttagaccccatatatcttagaaccgaccctgcttattatcgtgttgtatcatatgttaaaaatgtgagcgtaatcgtgttaggggtcttaacataattaatataataatcatgttgtgtatgtattgatcataaatgtgtcaaaaaaacatgtcaacaattacatgatttgttaacccaactaaatttggcacatgatttcacacaactcttagcataacatattgaagtaatttttttacaaaatgaactatattttagcacttcatcatcaatttgtatctcaaaaagaccatttccttgcaactaaatgttgggataccttgtgccagccgaagcagagaggggggctgggatttaggaggttcagagacatgaataaggcgttagtggcgaagttggcttgggaagtggcgtgcaatgaggataaaccatgggttaaggtcttaagggagaagtattgctcttggctttccttttggagtgtgcagccaagagagtcggattcaatggtttggaaagatattcttgaggtgcggcaagtggttagagaaggagcttgcatgatgttggctaacggtcaggaggtggatatttggtatcaaccgtggataccgtgatggactatgttgaatttaggactgtcatggaagaagtccgtgtc

SEQ ID NO: 28646 - DNA, 5069 bp, Cannabis sativa
tctccaacaataatcttcaggtatgtattaagatgtaataatacatatatatatatatattaatattttcattcctcacaatcattttaacctctaataaaaaatgttgattggtgtaaaacgctagactttttcgtcttacatcttcaaaattatatagtcggagttttcattttccagtcaactccatgagaaagaaacatttttttaccttttgaagaaagagtagaaataagatggggtttcgatttccgtatccttggtttctttatggcgccgtggccgtttactttgttgtttttgcacataaagaaaataaatattaaattgaaatagatatacaagcataaagtacagccatgtgcctgccttcaaagaaattttttaattaatagtataacttctaattttatctttgatttttataattctgggcttttctatcttttttccttcttttctcagctacaaacaagtctcaaaacgacatatataagttaaaaaaaatctgttattttcttttcaattttagtttcagtctagctataaaaactctatttatatttataacaattttctttcatcgagatacatataatatatacttttgtatatataagtgatgtgtatgaatgtatatataatattttgattctgatgttcaatatcatatatcaaatcaaataacaaaactgttgtccaaaaaaataccaaatctattaccgacagtctctccttagtattatttctggagaaataatatctttccttaattttctctccctaaaatttgttttttcaaatttattaagtacttattttgttgtttaaacttctgatttgcagatttggtaataatttatttattttggctggaagagattccttttacatacatatgatcaatctttttcttttttttttttttttctaaaagataaaaagctttcccaatataatattttatgtggtaaattaattaattatttttttttgctgcattttgtgaaagttgtaatatattctccgttaaaaggaaaggaatgtacgatatatgtctcaaaattttatttacctatcgttgtcttcctgcgtgtcatactataaatacgtatttggttttataaatttagtttttttgtttctttgttttgtcaaaattaagattccttgacttttatgtctacttaacgtacacaagtccgatttgtttgtcatatatgacatgttagcccattaattttaacccttatcacaatccacttgttcaaaacataacattttttgtttgttcacatttattagttgttgtaggctacttttctaaagagcattgctataaggcactaatggtgcttagcactttcttaacatgtcacgttgcgattaattagcgatattctttaaaaattattatattaaactatttgggacccgatacttaattggaccaatagcgatactcacacataagagggtgctaagcaacactagtgccctttagcatttctcttttctaaaacataattagctatacatataattaaaaaaaaaaaattactcataatattgacgaaacaccataaatattataatggtacttatatcattaaattgaggatgtcacaattaagtacaccagaaaaatagtgttttttttttcgtttatataatttaagtaactaataatcattatctcttgtattatcataattgcagatcataccagagtcgttaattgcaagattattaaatgtggtaatattggatgtgcactcgaatcaacttagatcacttccgaactcgattggttgtttgtccaagctaaaggttttgaacgtttctggaaaccttattgaatcacttcccaaaactattgaaaattgcaggtttgtacttgctatatatattcattatctcactatcatcattaatgcgtatcgtatatatatcaaaacaattatatatttttcttggaaatattaaccactattatattaattgataatacatattgacatctatataaattattcacatccgtatatattaatgtatgatacacagatagacacaatatccatccactttatatgtgacttgcatgtattatttatttttttattcattatatatgtgatatttgtaagctgttatattcaaattttgtatcttacaagtcatataatagaggataatattgtaatttaacagaatgtcataattgctctttgacttatcatatatttgtatacgggaataaatgggagattgatatataacgatatggaacagtaaagagcctgtaatatctatagtgacacgcgtgtgcagtaggaaatgggctcacttttgtagcggccgactaagacctttcaaccgctctttatataaatacgacttacgaatttaataactttatatttttaattctttagtcaaacttttcgtggagatagtctcaaccgtactaatcattatattcagccattcacacacatacatattggctctctaaatgtattaagatttttgttggccttatatattatatgttgaaaaatgttcacataatcacatatacattttctttaaataaatatctatatataccataatggtgccaattattcttgatgttgactcacgctctcaggcacgtcaataacgtttcagtatatatataagatgagcccaggacgttattcctacacgagagatatataaatggtaaaagaactgctaataagtactgcaaataaatagtaacgaattaaggtaattgtattttatattttaacgattatacttacaattttgaccacaaaaagacgaaaacattaactagctattattttttttaactaatttagcactcgatcttcatattgctctattcatgaattattgtatgtgcaaattttgctcaataatatgccatttatagtggcagattctctattaagtaagtaacgttaatgtaaattaccattttatcaacgcagaagcctagaagatctgaatgccaacttcaaccaactgagaaagctcccggacaccataggattcgagttaacaaacctaaagaagctctcagtgaactccaacaagctcgtcttccttccctactccataagccaccttaccaacctccgtatcctcgatgcccgcctaaactgtcttcgctccttaccggaagacctagaaaacctaatcaacctcgaaacccttaacgtcagccagaactttcagtacttggaaaccctaccttactcggttggcctcctcctctcactagttgagctcgacatcagctataacaagatcacctccttgcccgactccatcggctgcctacgcaagctccagacactctgtgttgatggcaacccgctggtgtcgccacccatggaagtgttcgagcaagggctgcatgcggtgaaggagtacatgagcgatagaatgaacaatggtggtgccagtaatgggtctaagagtaagaaatcttcttgggttgggcgacttgttaagtatgggactttcaacggacgatctcagaagactagtagtagtagtggtgctggtagtcgccatcgtcacagtcatgatggagaagcgttcatgcctgaatatcggaccattgatggcatagcttcgcctagttatttggggatgttctctccacgccgtctattctcatctcctcgtcattctttcagcagatagagagagctgcatgcatgtgctatgataagtggcctgtttttctttcgtataatatatcgttgatgatgaaattgtactgttttgtgcacgtgtcaacaacatgttatgaattgtgccgagagttcattatcattggggatatatatatgctcatgattattagtagtatttggtcattaggtttttgtgtgtggtgttgttgatatttcgtgattattgtaataatggatattgttggatgttcgtgatgttcttttaaaaatgctgttcgtgtggttttgtatataatcttcataacattcatgaaatcatcaaactctggcgaaggtgattggcatggaatgatcgttcatggtgggttatataaatgctttttttttttaatattattattagctttgggcggttgttggtatcgtgtttttgtttactcttttcggctcgtttggtaagcctaataaaattgtattatatatatattttttttttggtaaatcagagtaatgcattacctcaacacaatttttacaagctattagcatcttcaaaatagaagacctatattctatgtgtgagtcaacttctaattacactttacatcccaatattacatgatacccttccctttcccatttactattgttgtacaatctctaaaaaccattgagtgtcatatgtagaaactttttaaggccatacataagtaaatctactcttaacttcttctttaatattcctagtcacctcaatgactctcggctccttggaatcccacaacagtaagttccttgccttccagatttggtacactgctgaagcaattacggtataccagatactctttcgaaacctgcctgcttttgatctttcaatgcacctcaaaattgcatccaggtccaccgattcaatcttccaatgcaactgttttaatctgcaataaacactcagccgcaaatgtacaagagaaaaataagtggcctgttgtctcagattggctactgcagaaaaggcagcagtcatctgagatgacattcatgttcttcaatcttgatctagttcggagtcggtcttgaacaacagtccacaatataaagctttgccttggaatgttttgcctattccaaactccatgactccaatttaccttcctttgaggggggcaaaataaattgtaaccattagagattgtataggttgagcttgtaaactgctgcttactcatttttcccttgatttgttctttgacatataccagttttttccaataccaactcgcttgttgtggggcttggtagtcccaccaatcctccccttttatgtatacacaatgtatccacttaatc

SEQ ID NO: 28647 - DNA, 1624 bp, Cannabis sativa
tttattgaataacattaagaaaaacgataatgttgttataaaaaatgatttttttagttttttggtgattttttcagtgatttttctgacgacaatgccaattttgatgacttttttggcgccgacagcaacttcgatacgagcagctagtccggtggattttttggtgtcgacaacaagcttcggaaaagtcatcggaattgagattgtcgccgaaaaaattaccagaaaaatcaccaagaaaccaatttcttgatgaagattcttggtgatttttccggcgacaatgccaattccaatgactttttcggcgccaacagcaactccgatgacttttctagcaccgacagctattcctcgtgacctttccggtaccgacagcaaactctggtgtcttttccagtactggtgacaactccggcgatccctgtagttttgtttgttttattttttttttaaaaaaaatatgaaaggaattttaatattttttatggtaattcaatcctatatatgttaagtttttattttaaatactttattttttcctattaagttttcttaccatatttatctaaattaactttatttttcacatatttatgtaaataccccattataaataaacccataccagcaatcactaaactttgttagacaaagccggtgtactagcaagagaatggggaggtctgccttttactgattttgaaagcaaacattttagtaactctgcgcgtttaatatttctaattagtaaacttatttgaaaattgtaaccaatcaagcttttctgtttttggaaattttttatatgaaaaatcagaatataataaatagcaaagaataaatataaagctaagctaaagataaggttacctaaatcagaactgatcagattttgtccaatagtgttaatggttgctaataacagtagaagagtgtttcagtaagtttcgagacagctcctaaaaattgcgcctttatttacgaatctaaagttgggaatttggaaacactcacttttaatttaagatgtgaactttgaaattgaatttggttgtgtttgttttctattaatgttgctaacttctctcgtgtactccatcacccatacgattgtatgactcactcaaataacagcaaataaacagaaacaatagaaaagtcattcttatgcactttgattctataacagtaattatagcacagttttatttcacacgccatcacaactatatatcccatgctatgctatatttgcaacgcgcgtgcttaaattttaattcactctattcttttcttatcttcggatattgaaccataattaattaaatttagatgtgttggttgtgatttgtgaagactcgtctattttccaagatagtaagactcactgtctcagttgaaaaacatgttgtcccttgaacattgcgttgtcattatttggaaatagtgaaaattttacgtgaattgatgtaagtttaaatgaagaataaatgacaatgacattattaagagcattgatgctggccaaagtcacgttgtttaagagatgtactttacaatattagcgatattttctacgagttattacattaaattaattgagatctattatttaact

SEQ ID NO: 28648 - DNA, 1965 bp, Cannabis sativa
aataataaaacaaagattaaattccttaagccatgtatcattgtgttacatatcatgcccattattacttctttatagtgctcacgaattgatcatggtgggtaatgatcgattttcatttcgcaatatacccatgtaaattatttataatttatggaatgaagcacccatgaacctggactaattaagttatcacaccgacaaatgagtcgtcgcccggggtccattctattctgtgggatgataatgtaaaatctgaaatattaattaatacaatatttatgataatgattgtatggatgatgacataccattagaattgttattagcttgatttcagataaaaaaaaaattaaaaaatagctagctattagcttgatttcatctattatcttcgtctttctttatgttaattatttaaaggtcatagcatagcatgattcattttttatatgtacaagtattcatttaaaatatattagatagtgcaaacagtttcataaataataataaattaatagtaaaaaaaaaatgcaaacaagaagattaagaggaaagaggtgaaaaaaaaaaagaaaaaaaaaaaagaaaagcactttcgtagggcccatctcatgtcctctcagtagacccaaagatgtgattttcatctttctccttctgcacttaaccaactcacctctttttcttccaccttctccagttctacctcctctcgatctctttctcttgtcaagaaaaattacgcaaattaaaattcgctaatgatgtctggtgacagaccaaaagaatccgtggatgagggctcctcgtcgcgatcggttgcaacaacggccgatcatcatcctcagtactctcaacaccaacaacaagttgtaccagttgcagcagccgctccactaagccggtacgagtctcagaaaagaagggattggaacactttcggtcagtacttaaagaaccaaacccctccagtttccctctctcaatgcaattgtaaccacgtgcttgacttccttcgctacctcgatcagtttgggaagactaaggttcacttgcacggctgtgtgttctttggccagaccgaccctcctgccccgtgcacttgcccactcaggcaggcctgggggagtcttgacgctctgatcggacggcttcgagctgcctttgaggaacacggaggttcccctgagaccaacccttttggaaacggagctattcgagtttacttacgtgaagtcaaggagtgtcaagctaaggccagaggaatcccttacaagaagaagaagaagaaaagaaatagtaatttacacaaggcaatcagctctcatgaggagcccaaggttttgaagcagtcttcttagggattctcctctcaggctacgtttcccgcggggatcaatataaggtaattatatatatatataactggaattttatactaaaattatatcatattgttgttattgttaatgaaattgtcttacccatctgcagatcttgattttacggtttaacgaaaaattaattaagatgtgtaaatggaatatataaatatatttagagaaataaatatttcttcaagtactaataaattaatttcagaataggtcaattgactgggtaaagaacgaaacgaagtatatcattttatagtcttattatttggggataatttttttagttattgtacagttaaaccctagtctttggacacaaaaaccctaattttgataagtatatatatatatatgaatgatactgtaagtaaacaataatccaaaaccttaggtaggtatttttattattggatctttcaaccacacagagtattagatgccataattagagtgggaaggcctatataggctttctttcttttttttctctctctaaactgtttgtctctccctctctctctcaaatcaggcaaaaacactgtttgtgatgtcttaattaaatctc

SEQ ID NO: 28649 - DNA, 3350 bp, Cannabis sativa
gaatatgtcataggggttaattagatctaaatcccaatctgaaacttgatggctcactctatacaagttagtccaatgctgctcggcaatcccatagaaagaactagtgtaactaagttgaacatggaatggtggataccaactatccaacctatgggtaatacaatctataaggaagaggttccaaatgtaaaagttataccgactatcgttgaaagttactaaaaaagtatgtcttgccctaagaacagtggggaaccatccactttgattacctcgggatgcatctttaagcttcccaaggagctacattttggagataatgtacctgagccacataatcttgactctccttgtcggctggaagtagaactatctttgatgaagtatatctaggaaattcgtaataagaagtatacttgtctaaagcgtgaagaccaaaagtcttcaaattggcctcattcaagagaaactcaaccgatcgcagtccgaacaggagacccagcaaggctttacgccgctcgcccatctcaagagtggggactggtcttttcaagacctctatcaacaaaataaataagataagtcaccgaggccaaaggttacaaatatgaaataacttgaaacctagtttttaagataaagtttacttacaaataatgcaaaatgttgtcgtgttgattggggaacgactggttgtctagaacaaatcctccttaaaagcggtcttgtttggtaatcctacaatgatcctatgatcatttgtatgagtccgaagatagtaaaaaccccctacacaacgcttcctcataggaactgctttaacagaataaagataaacaatctcttggggagtgggacactcccatcctaaaatatgatacagaatctttagactttcatgaattttgtaggaaatatgaaccaattggaaaggagcaattccaagatggttgatgaactctttaaaataatctctcaaggggagaatttctctagccctgatatgctcgaggctccaagctcctattccaactgagctagtagtacttgcttcatccctggcttcaccactagcctccctacgttcctcgcgtataagtctttctagtggataacaactgaattcaccaggtgcaatgagtctaacacaaaaccctcgcttttggttgatgccacaagtccttaatataccaccaacatagtcccctatggcttttattcttgactcaatgagctcagcctcgaaagtgacattaagatcctggggagtcttttacttacggtgcttggatgacataattttaaaatccaggtcacctgctgaaaaaataattgtgactctgggtaaaaacaagggtttagccaaaggaatagaagataacgacaaaggttcaggccaggttgcatctcgcaagtcacgacatttacccaaagttatttgttgtaagaaacgcctataaggcctagtaacttcatccttattggattttattaaatggtccctaatttttacatcgtttatctctattttggactgaggtttgagaattttgggtttgtatgggagggctaattcctgaggatattctttttctaagaattttggagaataaacttcaccagattgggacatttctacaaaatgagcaatcccaattactggaagaaatttattatacaagaaacttataaatatgataactctaaattttttactcaatctaacccctaaaaattacccaaaaaaattaaattaaaattacaaaacccaaattgaacaacaaaagatgcaactaacagaataatgatcataacccaggaaaatagagaagaccagagaaaaggggataaatcacttaccgttcgaaattgagtttttgtatgaaaaaatgctctgaaattgagtacgagttgaatggcgcaaagccttttttgaattcctgaggtcgaacagtatatttgaatggatgcgcaagaagtatttcaatgacaatgagggcgtgcaaagccttacgaaatcaaaatggggtttttttgcaggaaagctcgaagtttttgttttgaatgtaaaaatggtggaaaaatggttctttttttggttttataccttcagtttgatcaccgtcagattaaaaaaattgagatccaatagataggaacaagagagaattggaaaagatgtgtcaataaatgctaatgatgtgcctcgaaaccatgaactgccaaaatcaaaagcatgaaatttttcaaattaggataagacgaatataatctttgtaataatttaaaaagtaatttttaaggggaaattgttataccaaaaatttggctgtactttagaaagtgacacgggtcaatctcgtggagtatgaaccaacaaatataacaacgattatatcattaaatgcaaaatgaaataactcattaaatatagaattaatagagtatattcataactcgctgactgtatagttctaggcacaaggatacacaaactataaattcctatgttgatgagagaccatcttccttggaaggcataatcctgagaaaactgcgtgaaatctataccgagacatacacctcgctacatataaggaaatattggtgagaaaaatcagcgcttgaaacacttagcgtataatccacataataataactaagtgtaacaacttggaaacatgaaggacatgattgtccagtctgtgaggccttatggtcaaagagttgttcttaagtttcctcagtacaatggtgctcatgccatttgtagaaggcatataattaaactaagatattatttggtggtcatctatatgcaatgcgagatggctcaacccacgtcaactttaactgccttgaagataggaatgacaagcggttgtgttgttatcaattgttttctccacgtgtttaaatagaacgtgatcgaagcccgtgtttttatgaaaaatagttatgtaattcaaattaaaatgtaaataactgccaacctatatttctataaatagggacaagaaaagggacggaagatctttgggagaaaagattactaattgtaatactgcattaagtatccagaaatatcttagataagatagaatcgtggagtatgcaaatttaactgcaaaaccacgtaaaatactttgtgtcattataactattattattcttctcagttttcttatcaaggagtattccttgtggcgttcaatcgacttatcaaacagatttccaccaccatttgtggtgtcttccttcatacccgggttgatgcttaactaagcattgggtcgcggttccacatcaaaattttgagaattcttagaggctgccataattggtat

SEQ ID NO: 28650 - DNA, 3852 bp, Cannabis sativa
  modified_base (3291)..(3294): a, c, t, g, unknown or other
  modified_base (3488)..(3503): a, c, t, g, unknown or other
  modified_base (3701)..(3713): a, c, t, g, unknown or other
aatttccaaagtaactaagcgggctttacacctaacagggggactcggaggaagttaaagaggccatcacagttattactactgaggaagccttaaaggcagtgaaggctgatgaacaatggctgaaggattggaggagacaattcctagaaggcctgagcaaggctgaagagctttccatctgctttaaggatgtgatgtcgaatgaaggtgctcaaggagcaagcacttctggtagtgctgagataccttttcatatatatcagggctcccactgtgtctaactttgagacgatcattcaatgttgatttgatccatacttcttcattttagatcatcataggtattcattcagtaaataggtagattaagtaggctgcatcatccaaattcccaaccatttcatccctcctatgcaccatcatgttagagtggatgcacttagtgaaatttactttgcaggattcttccagcacaaaactaatttaggtcgagaggacatcacactgttttctaagggaaaaatcaattatgctaggattaatggtttgggcccttctgatgtcttgcattataatgcgttgcaaaattcatgccttttattatgattctatttaatggatgttttgttcgttttgtgtgatcaaccagccactcttcagatggggctactaaaaaagttcttgggcagcgtcatgactcgatcagatgagatctaggaaattacccaacgtggtggtgatgatagaaagaaaaaccacacctgtgagagtggatctgaggagccaacacctccaaccttaaatccagaagttgatgcaaaggctttgggcatagaggttgcgtctacaaccatcatagacctgaccgaacctgctctgttcatagagccatttaattaagttccaatggagagctctagaggggacaactctgactacgatgggcctgttgtaatcaataagaagcgagcgagttcatctaacaatggcaccaacaagaaggcaagggtggagaccaaagagaaggtcttacaattggcaaccttgaggagataagagacggatactgagtcctggaagggatcaagaacttctgatggcagaaggcctcaaaggcaaagcactcggatattaatggatagttaggatcctcctctccaaccccaaaaactaaagttatgtcggccacctctactcagatgtccaacgaaaggattgagctgcctccactgcctttggaacctttcacacttcccatcaggcctttacggttgatggaaggaaacaacgctttcctcgaagctatggatcagttctaccaaaagaggcactgttgtgaagttgaggagatgaggaagctgtccacaagtatctcttataggtgtaatgctgagttcgccaattatggcacatggaacaaagctgcccctcctcttatcaacagagttgagttggcggagaggcttcatcctcatgttgggactgatgtatcaccatttttagcaaatctattgaacagagtgctacaacaagctgtaggcttagagtttacaaatttactatgatggcaagtaggtatctgatatacatggtaaactccctgaggcccaggctaatgttgtaagttcaacacctctttgatatgaataaatgttttgtgtgtttatattattttgattcacttgtgtactttcttttgtagattggcctgatggcagagagaaattgttccctacttgtccaacaggcctacgacttggaggtgttgaaggcagagcaggccaacattgagcgaaggagagaagaggtagagagagcttctactaaagcaaataccaagatggacgacatcataaggcaaagggtgtccaaatctttggacaggacattggctcgtgaaatgaaggcaaccaaaacagagaaaaagcgtagagacatgtataaagatctgcattccaaggcccttacctgcattaaagacttcgaagtcgacgtgaagtaggccaagctcgatgtctagagaaggatactaaaattgacaccttatctcgagagtacgacaaataagcccagattatccaagataaatttatcagggagactactttggagagaaaggtgaatcactatttgcaaatgtagtagaaggtggaggcagctgaggcagatgcggtcaagaaggctaaggaagctgagagaaaattggttccagccacgaaggctcctgaagaatcccaaaagagaatcacttatctgaagggcaaaagctcccatttgaagagacgtctttagaagcaggaagccaacactgcaaggctttggaagaagcctttgtccacatagtgtacactctcttccagcacaataaaaccatgatcgatctcctagatgctgaagatagggaagaacttctgcccaatctaccggctctagaagtggcagaaaagtttaagggcgcacctcaaggatatggagtagtcgatctttgaaccaccatctttgttggtgagaacatggacgattctacttctctggcatctgaggtacctgtttcaaccgactctgtgatctcgaagggcccaactgatgtccaaattcaagaggcacctgcgttggacaattatgctaagctttaattgctcttaactcttttttttttatctaatttttcttttttttttgggggggacaagggtcccccttttttagtgtgcggagacaatatatacccttgtcgtggggttttttagtacctggtacttatttagtaattcctgagatatttttattttatatcatagacattgctatgtttttaatgcttccagcctcgtcaagttttggttccaaaggcctaaatcttttttttttcgattaaatacctagacgcttttgtgaaaaaatgcttttgcagaaggttttatttggaactcgaagtaattaattaacatgaaccaattaattgtctgataattttaccctttcttggcattcatcacttatttttctgggtttttttgaacttaactctttaattgacttgaatcaattgatttaagtaatcttaatgttatggcattgttaacgtgaattaaccattaggcatggacctttactttaagttaatatgaattaaccatgagggataaacatttattttaagttaacctagactaaccaatttaatgtacgtcaattaactcaaaatgtagtaaggtgatgacttacttcttgttccctgaggctctggtttcaggtcatactttcttcgagcttggcttaatagannnnaatggttgagtactcatttcagtaattatactagtttactgtaatatcatttacacatagataagtgttgtaaggataaaatacattgaagggtgtaatgataaatttgtccctactcgatgtagatcatctacaaaggatcattgataattaggattataacaatggataattcatagcgtatctatatcgtnnnnnnnnnnnnnnnntctatataattaagagtacaattcaaaatctatagtggcgcaaggaggaatttataagttagagaatttacttggtaaattctaaagctacttattcgaagcttaattatattggcccatggtccccacactagttgagacattactgcttgtaagactgagttaattgattttaagtaatcaattataattctaaannnnnnnnnnnnnttatatatgaattttcactaagcaatgacctaattgtgaagaaaggaggctttaggatttatttgttaattaagagacttagtaaagtctaattaataaataagttaaatgatagttttttataattaattataattat

SEQ ID NO: 28651 - DNA, 3604 bp, Cannabis sativa
aaacaaaaaataattttttaattatgatgtcaaacatacacttagttttgctgaaaacccgattgtagcacgaaaactatcaaaggcagcttcaaacaatttcaagggatttaaagccttccattgttttttctctcacattctcacttcatttttttcaccttgatttttctctccttaaacaaaaaattaaaaacaaattacaaataaaagttgctaaacatacattcaaaaatttaaaattaaaattttataccaagcccaccctttttttcaaaaaaaaaaaaaaatcaaccttcaacaatagattctactcaaaaaagcacaaatgattaaaactgattaatacataagttacaattgtactaaatttgcccatattttacatttcaaattgaagtgaagcattttgtgactactttcattaaatgacgaaaggaaatcaagtgagcatgagatcaaaaaacatttccatctagtccataaaatcaaagctaagaagctatttcctttctgaatgaacaaaaccatgagaagtgttactcgtaaactccccggcttcaagaatgattattgaagataataaagagatgatgaaaaacacattagagacaaacgaacgaaacaatgccttcattggagaatttgactgccgtagtcactgttgaacttctcgtagcggtgagcatggagatgagcagacggcctcgtgtttttgagtgccgcttctatatcttcatgagtgattggtccaacctttggcagttctgcagcaacccgaaaattgattaacattagctctatgtatgcagtagaaatgaaatgtgcttttgaaagaaacttgacttgaaacacgaaacacttaccatcctcgggcactacttcgagtttatcttcaagttgtgccatcaaccgtcttaatggttgcatggccgcctctttgcacaataaccggatatcagaaccggagaaaccctctgtcttttctaccaaagtgtcgtaaggaagattctcttcgctaggctttgatggaaggagctcctcgaccatagctcttcttgcttctggttccggaagaggcactaagatctttttattgtggttaattgaaacagatacagtggaaaaagaataaacgtaaaaaagataagagagttagacattgcttgtatgtaaagttacccaataatgaactaactaataaaaaggatacacgcttctcaagacgacggagcatggctgcatccaattcccagggaagatttgttgcagccaacacaaaaacaagttcatctgtccgcgtcaaaccatccatctaaaatcaaaaccaagttagtcaaacctcttataaaagtctgttgataccgatataacagaacaacagcaaatcaagaaaagtagagaacataaattgtgaataaaaagagaaatgatatcacctgtatgagaagttcagttttcaaacgcctacttgcttcatgttcactgcgtgcttcaccacgttgactaataattgcatcaatttcatcgatgaatatggtcgatggagcatggtgccttgctacctcaaataacaccttcactaacttctcagaatcacctgccattgtaaatgcatcgcatatgaagatatatttttattcgttcgtgcattgtgatattaacagtaactacgaccaagggaattgcttcgctattacataccacgccatttactgacaacggatgatgctgaaatgttgaaaaaagtagtattacactctgttgcgacagccttggcaagcatggtctgcaatatagaagttgcaatcactttattgtctaaaatcgataggtaagaaagattaagaagttacattgtaacaaattaatgatgttcctgcttgaacaaattatcctctaatgaaacatagtgaaaaagacctagttgtggaatggaaaaacataataattatcaagcaaagaatgcacaaacctttcctgttccaggaggaccgaaaaggagaatacctttccatggtgataaaagaccagtaaaatacctatataaggaaaaaagggcaaatcaggttaattgtggaatgatcaatacatgtgcaagacatttagcaatcaaattggaagctagaaataagtgtttgggggtccacatatctattgtgatatatagatagattttaattgagtgatgtttgatggtccagataattattttgacagatttgaaaatcatgtacacgcaaacacaaagtcaacaagcaaggtccactaacaattaagttgcaacaatgatatccagcaaagaagtcatgtaaacaaaaatttccaaacaaagaaacacaacagtagtagatatgaaaatcaatttgaaggtactgattatgacatgtttacatttttatattaagaaatcctagtttacagttcagagggtgctcagtgacaagacctacttgggatatttaattggcatgactaccgcttctttaagtaaacgtttggcattctctagacctttgatactatcccatgtaacatcttgagttccacgaacaatgtccctgcacagcatatagtaaactttttgaaaacatataaatgactatgcaaggtttttacatcattgataaatcgaaaaggaatgcaattgttgtagaaatttaccacttgaaggatctcggttacttacctacatatactctctgctagagaacgtgtttctgcagattcaaaagctgggagaagagatttttgcctgcaaacatgagaatagtatcagtaatttcgctatagaaaaagattaaaagaaaagatatcagcataacctgaaaaccaaagtttactttctaatactcgttcaaggtttgtacatgtttcttgaaggtctataatactacactataccataacaaaaattaattcatgttttcacttaatgtttaacataaaactgcccagtggcttctcatattaatagcttggtctctgtagtgattcttgcttgaaaatcaagtcattatcctaggttggaaactaaacaacagttgtttcaatagggtttttcacagaccatcagcaaaaaagctaatacttcaagggaatagctgaagtatgaaaacaaatatcttagcctcagctaagaaggtctaaccaacaacatggaaagtggattctttgggatatgtgtaaaaagatgaggaaatgagttcaatttggttctctagttccatctctactaataatgtaaagagaggtttcaaaagtgatattaagatcactactttaataccaaaatcatagttaattctttccacaattcactaagtagagttcaattctgcttttctcttcctaatactaaatataataaaacagtacttagtcagagtcagcatcaaaattcaagaaaaaactttaataataattcaaacttccaaccaacaaaagaaattttcgaaatttcaatcaaaatcacaatgaacatgttcttttccaaggtttcagcagattaaacaagtgaaaaaaatcacaaaaatcttacggaatttggccatttccatttgcaaaaacaccattctgttgattagatccccttccctacaaa

SEQ ID NO: 28652 - DNA, 2646 bp, Cannabis sativa
tcatctatgcctcacaaggatggggtgagacatctacgcatgataccaactggctctttgatttgaaagcgagtcctaacaagagtaggttgggatatttctacttttcctagattgaggagaagtggttgataggcactctacactccgaggttagcaggatagggaactttgtggaggagtactactttgcctagggaatggacactgtccacactcagttccaggagatactgtcgtactgccgccctcccttcacattggggctcaagaagagggcacaaagaattcttgaactgccagaagctgctcgaaacatctttcttctggccaccgaggccaattttgtcaagtacaaactcttcccaatatactttgtgccgagggccatgaagaagatgaaaaggcaaagtttgactaggacaaagtaaccaagcaggagagaccaagcaaaaggcggaagaaggttcctccgaatgaccaagcacaagttgagcgtgctatcaggatttgggaacctgatagacctttctggccatccaccccagtggaaggaaaaggaaaggtcgtcctgacaaagaaagaataagaagactctttagacgatgaggctccttccttttttgttcgggagaatgctcttgctcatgtgcagggtattttaacttgtagttttttgttccatgacatgttttacattatattttcccttaactttcttgtcttatttatatgcagccatgtctcaaaaggtgctccaagctcttaaaaagagtactagtgacagtttggcccagactcccccgccaaacgatccagaggcgacaaggttccgtccaaggagaagggcctggccgagacagtgatcgacctctccaaggaggtggttcctattgtggaccctctagcccaaaaggtatctaagtcaaagagttctaaaagggggagctcaaatggatccggtctaaccaaggcatcctctactgccgtggtgatgagctcgaaagccaagaaagtcaaggacatgctccagtaataccttgatcggtcacttcctgaggtgagcgatcaattgtctgaggcgaaaaatgagttgtccatggagctggtgattggtggagtcctgaaggaggtagctcgcgtaagtattttcttgtttgtttttctcttgtctttttaccaactcaagctttaacctttttcctgtgcacgtcaatctgaagatggcctacgcctactcatgagccaaatccacggtcgtgaagaaccttgccacaaccaataatttgcagagggaggtggatgcgcccaacaagaaggtccaggacgtgagaaatgagttgggagacgtgaacaagaaggttcttgctgccaatagctaggttaaggatgtaaagaccgcctagctttaatttggatgttagcagataattatgttttaatatgaaaattgtttaataactttgaattattaatttacgatgatttatttaaattcagaatgcattttatatgtcatatatagaatttcataattttgcatgttttgtgccccacaacattagaacgcggtgtttggctattagaatcacatctcagtatttttagtatagcggggcagtatagttagacattgggaatgttaggaatagtaaagattttggaattcaccaaaatatgcgtaagtgacctttttatgacttagtgtgggaagggcaaaatgggcattttgcctgaatgacttccgttctttagtgaactcattctccggttgattttttttattagttatagtggctgagtttaattttaattaaacaaactttttattttcattttaaaaagataagaatttgaaaaaaaaaaaggaagcactttctcactctcaaactccctctctttcgaacccacctagaaccagctagggttctgaattttgttctttaaatcttgtgatttctagcagctttaagtgaatctaggtgaaggtaagctcctagcaactatcccttttgttttcttaagtttcaagttaagaattttgcatgaatttgggtctttcagtattgtagctactgttagtgattgatattgttttctgaaattcattcatgaatagaaatgttgaattaagcatgttttgttgattgagcaagctttgaattttagaactgaagcttggctctctaacggtgaaatttgattctgagcttgggtagttgttttattgcttggaatatgtttactggggtgtaatatgcagttctggaaggtttggtaaagttttgagtcaatttggttagatttggaattgtcatgggttttctagggtaaactgggtagccaattttatagggcctgtaaaactggctactcgaatttgctgttgggttccctaaaaaatttatgttgtcgattcgtgttatttttagggctttggttggttaattccctattagtttagggtatttccatgttaagttgaagtagataggtttttagtttaagaacctaagtccccggttgcgatttagcgtatcacttatccttattgttatcgatgtgatttaggagcctgtaattcaccgagcagttgttccactcaggttggccgacacaccagaattcgtaattgaggtaagatta

SEQ ID NO: 28653 - DNA, 1199 bp, Cannabis sativa
agtcctcgtgggtcgtgggaacgatctcacttacccgagtattacttgttaaaacgatacgtatacttgcgtgttggatttatcacaacaagaacagcagagtaagcattcctgttcatctgtaattttcattttaaccagcatgttcctggttttgagcttctggtgcactgcaagccacaacagaaaactgtgctttggtgtatttaatttgctccaaacctacttactccattgagttcttgttcgagttgggcacaacaggttgtagccctgtgtgacactgtatttttgctgcaatactgtgcatccattcaatgcatccttgaattgatctttgagcctgaccaaacttttccaataccaactgcattagtttgtagctttgtaggccctccagtctgtgtcatgtaaatatacactattaatccacttcaaccataggttatcttccttatttacaactgcccatagcagcatttttaaaacctatatatatatgtttgattgtaattttgttaatttcatctccgattcttcctctaaagtcttttattgaaatatatattcaataatactttcttctttattttggagtgtgtgcaaaacaaaattttgtagaagtaatattttatttgtttaaaatgtgggtattattaattcaagctataaagctatcactttaattattttcttatgatatgtttttatataaaatatgtctatctaacagattttgttggtttaacagtgttttaatttttttactgctaactttaacagagattaagagagtttttagttctatttattgatattattttagtatttatgtaaattaatcagttaagtttttattaatcttttaaaaaaaataattactattcataacagatatttgttattttaacgctaaaagctacttgcaaggtagagaactgtgttatgtgagatgagtgtttctggttgtagctacatcatctgagatgctatatattttcaaaaggagtgattaattgaaagtgatttttttttttttttatagaatgatgccaaagtgattgaaagattactactgaaggggaaagaaaattgaaggcaacgtggagagaagtcatatcttatcttttacaaaggtaaacagattatacaacgctacagtactatattcctccctagggccgaccctaggcataggc

SEQ ID NO: 28654 - DNA, 1363 bp, Cannabis sativa
aaggggggtttattcatggcagattcataggttataatattatgatttgccaggatcttatcaggcattatgggaggaaatcaaagaaggaaaattgcatgataaagttggatctccaaaaggcttatgacacccttgaatgggattttatagaagagatgctacatgctttcaagttccctcccaagttcattagcttgatcatgacttgtgttagaactcctcgcttctcattgatgatcaatgggtccttacatgggtactttgaggctaagagaggactgagacaagatgacccaatgtcccctcttctctttgttctgggaatggagtatatgtctcggataatgaagaagatatgtaagaagcatgatttcatgtatcatgagagatgtagggaccttgagctgaatcatctaagtttcgctgatgatgtactattattttccaatggagattccaagagtatctattatatgttgcaaggattaaaactcttctcacacaccttaggattgtttcctaatccctccaaattggtagtctattgtagtaacatgtcggatacagagattcaaagaatcattgatgtttctggattccagagacaactgcctttcaaataccttggagtgcccatatgcccgaagcgaatctcctcaaatgactgcaaggtattagttcagaatatgatatctagaatcaaaacttggagtactaaaaatctttcttttgttgggaggattgggctcatcaactcggtgctaatggttatacattcatattggtgtcaagtcatgatactccccaagaaaattgtaagtgaaatagaatccatttgtcgtagtttcttatagaatggacaatatactctaacaggtgttcctgcggtagcttgggcatctatttgtcaatccaaggcctcgggtggattgggttttaggtgcatttcagattggaacaaggcagtattgtttaaatatgtttgggcagtggctaagaaagaggataatttgtgggttaagtgggttgacaatgtatatgtaaataaggagaattgatggacttatcaaccttcgattcaagcgagttggtattggagaaaactagtgatggtcaaggaataaatgaaggacctcggggatttaaaacaaacacaatgcaaatatgaggtgactaccggttacaagaaattgcatacacatttgcctaaggtggagtggagccatcttgtttggaatagattcaacctacccaagcatggtttcatactatggcttgccatgcttaagaagatgaagacaaataaggaaatattgaagaactttggggtgatagacaatgatatttgtcttctttgtaa

SEQ ID NO: 28655 - DNA, 1343 bp, Cannabis sativa
catccaccacagtcagaaaactctcaaaattctgataaacaagctcaactgacagcccttgtagctactcctcaaactcttaatgatgatagttggtacgcggacagtggtgcgactaatcatctcacaccagaagctgaaaaacttaacaacaaagtggagtacaatggtaaggaacacatggttattggagatggcagtagacttgcaatcaaacacattggtactggtaaaattaatattgctaattctgctcatttgaagttgcacgatatgctacatgtaccctcaattactaaaaatctcataagcatatctaaattaacccgtgacaatgatgtttccattgaatttttccctgatttttgttgagtgaaggatctaacaacagggatggaggtgctgcgaggaacaattaaggatggactgtattgctttaatctgattgctgcttgttttcatactgctgttacttctcaaagtcaccctactgtttctgcatctagttctcagtcagatatttctttcaattccctaaaggatacttggcatagacgcctaggccatccgtcaatttctgttttaaatcaagtgttgaagttatgtaatgtccaatctaaaagtaatgtaacacatagtttttgtgatgcatgtcaatttagaaaatctcacttgttaccatttaaaaactctagcagtcgggccactcatgttcttgatttaattcacactgatttgtggggtgcatcccctgttgcatcacatactaattacaaatattacatacactttctagatgattatagtaggtatacttggctttttcctttaaaacagaaatcggatgccttacaagcttttacacacttcaaaaatcttgttgaaaatcagtttaattgataggaaaattaaacaactaaggaccgattggggtggtgagtttcaggctttctcttaattggttagtgacagtggtatatttttccaccacagttgtcctcatacttccgaacagaatggaagagccgagcgtaaacatcgacatattgtcgaaacaggtctcacactgctagctcaggccagtatgcctctcaagtactggtctgatgcattccaaacgacagtgtacctaatcaatcgccttcctacccctgttttacttgggaagtcaccatatgaggttctgttttctcgtgtacctgattacaagttttaaaaggtttttggtgtgtcttgttttccttgtatccgtccatatcaaagtcataaatttcaatttcatactctcaaatgtgtgaatctcgggtatagtgaagtccacaagggttataagtgcttgagtc

SEQ ID NO: 28656 - DNA, 2159 bp, Cannabis sativa
  modified_base (44)..(52): a, c, t, g, unknown or other
  modified_base (104)..(115): a, c, t, g, unknown or other
taacatttaatgattaggtacctacagagtttcagaaatataannnnnnnnntattaccgccaaaaattaaacttgagcatttatttgcaactgagagttaaannnnnnnnnnnntgccgcaaattactcttatatatacttactaagagtttctttggtgcaccgtttcattaaattagtatgaaatttttacattattttacttcaatagcacattaaatatagagcactagcagtgcccgtcactttctatatgtggcgtcccataattaattagcaatattccctaaaaattatatttttaagatatgcgggaccagatacttaattacaccaataacaacaagataccaatgagggtgctaggcaccagtggtaccttttagcaattctttaaattataaattaaagtagtgtgcactaaattccacatcattataagaacaactccaatgatacaccatttcatcatattagtgtggaatctttacactatttcactccaataacacatcaaattataaattaaattagcgtacactaaattctacactattagagcaactccaatagtacactatttcacaaaattagtgtaaaacttttacactattttatttcactctaatgacacactaaattgtctacaaaattagtgtataccaaattctacatcattaatagttggattttataccaatttagtatagaacttttaatttgcattctaacccttattttaatttttttaaaaaaataatcttgcatttttagtcatcaaataaaaatttatctcgatacaaaacaatataaaactaatatattgaaaaatacaaaacaataataactaaagtactaatattaaataacataaaaacaatgtagcactaagttataaaactaaaaaaaataacataagtaaaaataaatattaagtaaaataataatattttaacatataaattgattactcgataattttagctttgaagaatatcaaaataattgaatatttttttggccgacatagacaaattaaaaatacggatgctcactatatgtccgtcaaaatgtattaatatttgatcatatgttggaacacgataataattcagaaaattaaattatgtaagtgttattttatttgtttctttttaaaataagaaaaagaaagtgtgtaatgcttagttcatttaataaatatttaattttattaaattatttcaaaattttaaattcttatgtacttataatataattatatcataaattaactattttgaattaatactgtaaataatataaaatacgagattttttaagtaaaatatatttattttgtgacatatattttgtgtgatatttggtgtgaatcattagagtagttgcaccaagagtaaaagattctacccaaaattagtgtaaccattaatggtgttagattttgaatctacactaatttggtataaaacttttttatttgcattctaaatcttgttttatttaattttaaaaaataatcttatattttagtcctcaaattaaaatttatcacaaaaataataattaatttaaaacaataacatagttaaaaaaaatacaatataacaataaaaaaaaaatactaatattaaataaaataaaaacaatataacactaagttataaaactaaaaaaaataatataaataaaaagaaacattatgtaaaataataatttaacagtaaaacattaagtttattgttaaaaaagttatagtaaatattttattttattaaattattttaaaattttaaattcttactaacaatataatatacttatattataaaataactattttaggttattaatataaaatgtgagattttttaagtaaaatatatttattttgtggaatttttgatgtgatatttgatgtgaattattggaattgttacatcaaaagtaaaaaattttacactaaattagtgtacaccattagagataatctaaaaaaatatataataatatggtttagtcacatataatctcttattttaataaatgataatttttttaaaggtataaatgatagataaatatataaaatgtgaaacacgaagacttttatttaaaaaagaaaatatatcaaattaaattaaaataataacctacc

SEQ ID NO: 28657 - DNA, 2152 bp, Cannabis sativa
  modified_base (1434)..(1435): a, c, t, g, unknown or other
ctaatatagttaatgtgattattaacacatagtgaattattttagattgttattctatattcataatttcttgcaaggtttacaaataaatctaaggaagtcagtaactgtgagcaattttgtccacagacaacactaattcttacatgtagaaatttaaggaacaaacagttgagtagtgattttgttttaaaattatcaaaaacctttatgatccaagtttctttagaaacttgatttagacacacattaatttataaaatgatgtcactcataaagatatagatgttcaattcagcaataagagatgtgttattaataagaatttctctacattatggcactgaagattatggaacatatctccacaaattaaataaatgttagtaaatagtagggatactcgttacacttaatttttcacaaactttatttagagcttatgtggatgcattaaggaaaagtataccaacaagctaaaatgatgcacattagaattgtataatattagaaatcatacaacaattaacaattctaaatatggactcatatttcacaaaaatttcatctcatttattaatatttactcacataaattatatctctacaaaagtaaaggtttatgtgtttcaaagacatataaattttaagaaaataaataatacaatttgcatattaagagagtgagatcagatatagatggagaatactacactaaaattcataagaatggataaactactagtctatttacaaagtttcttaaaaaaaatataggttcattgcccaatacatatgcctggtacacccaaataatggtgtgtgataggtttaagaaactaagcattattggggtggagcctacatagcaaactccatactttctaaatctttgtcggttgatgcttttcaatggtagtgtgcaagtcaaactgtgatctaaccaaagttgcttcccaaacatattttgagttgtgataaggttggaaattgattttaggacaagtacacataaaaatacccatatacagttagagtaaattgtcagaggaaagatttgggcccaaataccataaatgatcctttcatcaaaaaaagctataaggtgtaagagttatatattttattatccatctcacaatgctagaattgtgaaattgaaaattaacttgatccgtgggagatattaatccatgaacatagtttttgagaaagatcattcatatttttttaaagtttcacctcaagtattagattgattgtgattcacaatatcccttaagtttaatggttattgagattttacaattaatcattaaagatccacaagtcattgataaaattctaaccaattagattattagtaattgcttgcaaattgttaaacaacatacatgttgaataattcgctctttaagagagtttgttggttcnnccttaagatgacttattagaataaagagatcattggtttctagtgattacattgtgtataataagagctcgactataatatcaatttgagacacaaattaaactgtggaatggacaacattgaaattatgatacaatatgccatgaatgaagaaatgaatatcctaatgagcaatgtatagtctatctttagtaaatttgcctaatagggtggagaacattaatcgtagggttttcatcaaaaaatactcattaggaaacatggtgaatcataaagatataaaacaagattcattactaagaagtttattttgaactaagaatcaataacaaagaagatttacattatcacttgtctttataaaaaattatattatagtaatattggcattgttgctcatttcaattcattaatcaattccaaacagtgaactaaaggagaatatatacaaacaactataaaaattttcgtttaatagtggtaaacctatgcaagcttaagctattaaaacaaacatctcacaaataatatttttattatgttatctttttctttaggtttaaaaaagcactatgaaattaattatgtactagaaagtcagtggaagtaatatttgttttatatatagataatatgttacttgcaagtgatgataaaaatttcctatataaggtaaaataattcatatctcaaatctcaaataattattttgagata

SEQ ID NO: 28658 - DNA, 1283 bp, Cannabis sativa
agttttgacaccaggttatcaaggatgaagttaaaatttgcatccttttggcgggatctaaaaagcgggaggcccaaatagtttatgttacccatttcacagttcaatcccatagcatgtctgatgcctcatttcataccatcactcgtgttaccgctaaagaaaatggaggttttaagcttactaattcttagaccagaccaatcacaaaacttctctaggaaatgccacatacctcttgcttcttcaaggtttgccctgcctacaaggatcagatcatcggtaaagaaaagatgggagagtttggggccatctctgcttagctttatacctttgatggtaccgttatcaagggcgtgctcaaggatgcgcgagaggatttcagcagcccagataaagatgtatgaagataggggtctccttatctgatgccacactctggagtcaaactgttaaacttccttccattgagaagaaagttgaagaaagttgttgtgatacactggcggacccagtgacagaacttgttaggggccttgaaactacacagaacgtggtcaataaattaccaacttaatttatcgtaacacaccttttcaaaaaaagaagactaaatgtagtattttttaaaaagttcactaatacaccttatcgtgtttttgatatttagatatttaattttaattttttttatatcattttaaatcatagttatgtcagacattttgttttaaaattaaaactatctcaacataaaaaaaaaaaaaaaatacaaagggattttttttaaaaaaaaaaaaaagtatttttagggtaaatttacaccaatggtgtaatgtttataaatgaaaggaaaaatggctggaaaaaaatggtagaaacataaaaataaaatatcttaccgacaagacttttggcggtcggtttagaaagaaaaggttcgggtattaattgccatgaaatgtcacgcacgctacgtggcgttccgtcaaatgttgtgtcttctttggtttgcacacttgcaaaactcttcgattttcacaccattttgacttcatctattgcatttttatatatataaatatttttataactattgcatttttgtattagaaaaatactagtaaaagacaaacatcatttaagtaaatattcaaaatttaataaatattaacattaattttttgaataaagaaagattgcacagaataatacagtagaacctctatttaagaattctctattcaagaataacctctaatttgttataaaaaaaatcaagt

SEQ ID NO: 28659 - DNA, 3836 bp, Cannabis sativa
cataatatttttaacaataaaaaccttaataaaatattaacagtatattaataaaagcattaacattatattctcactattatcatgcttaacatgcattttgttaaaaagtaaagaaaaagtttattttagagaaatcatatataataaaaagtgtattgtaaattataataatataattgaaaatatgtaagatattaaaaattattaattcttttaaactcaaaactaattaagaaaattgtgtccaattgaagatttattttaaaaaatagattgaaaatatctcaagaattgaatttattaaataagatgaggttaaatttaatattacagtggaacttttatttaagaatacatttgttattatcaagaaaaattatattctaattaagaaattataattaaaaatgaactaatgatagaaagctatacataacataatcaattaaatgatttatcaatttgacaataacaaaccagaaaatgtagagtaacattaactcttttgtccatgcttagattcggagaacaatcaattgtatgtatggctatggctatggctgtagcactcaactcaagaatgcaatgacaaaatctttgccaaactccatgaatggaaataatcttctcaacccaattccctgaaactctgctatatatatactcttctgaagcctgtaaaactacttcttcgtgttcctcgttgatcatcctgtcttcaagccgattcgaatcagttcagataagatgtcaacccaagtgtctggtaaacctggtaagcaccaatgcatgcagtcttgaccccagattgccactgcatctttcttgcccaaccatacagcaggatgagcatccgctctgaattcgctcaaatgagtcaagtcgagcaattggatatcggtaccttgaactgaatcattaatcagacggttcagaattcttgcttctttatttactccattgtttctggggtcaaaccatgagtcaagctgtccagatatcagaatctaattttacttggaaaaaaggtaagaaatgcaaagaccatattttcaaagaacataatcaaaagttaagattgtcattgatacatgaaaatggagtgtcatgaaagagagagctatcattaattcatacctgaagctcttcaagtggatcattgaacatgcaacttccattttgattccaatcaccaccatagaaatgcctcggtgattgcaaccgccagaacttgagtgtcttgcggggaatatctttttgaatatatgacgccatattctcaagaactaatttaagcccatccagcatgttaggtggaggatgtatcggctgaccagcttgatagaaaacaagaggtttatctttagggaatttatcaaaaccccacctggtgaagattaagttagtaggatagataagggagatgagggaagactaagccagacatcaagtactatggaaaatcctagacactttcttcaatcaatatacgagcactagtaatttacgcccttgaaaatgtttcagatttgcaccatagagaaaggagcaatgcagcaatttgagatgtcaaagatggaaaagatgagcatgattttcaaacacatcacatcagcattgtaaaaatgaaaactagcatagaatcaccctaatttaagagtacgaaaacctcgtaagaatgagaaaactgacaaactgtgttatagatatgacttctaactaattaggtaagtgagaaactaatctcctcataatgtcattgataaaactaacttgcatcgatgaacataaaatcgtatgcaacttagacaaaggaaagaaaattaccaatggccggtgttgaaaacaagaacatcatagaaatcaccaatgctagcccaatcagatgcaggagtgtccacatctacccgatgaattccttttaatccatcttggtcaccatctgagggttgttttggctgccaccttaggttaatcagtaatgagcatgtgaggttgccattatgcaactaaatcaagaaaaagaaatatcacaacaaaacaaggaaaagcataactagttaaacatgtcacaaaagaagaaatgaaatcaccaagctaaaagtgtaagataacaatgaaaatgattattgtaaaatataacatatcagtgttccttcaggttcaaaaattaataccaattatagtccttcaaccaaggacaaaccagttttgaagcaactgttcaggtttacaaggagagatatatgttccccaatatttacttcattgacaactgtagaagattttaaactaacttacctgccaaatggactgccggttgtaagatttgctatggaaccaggcccccggtttgacagttagctagtttagttgtctagctctgttttcccacccttttggagacctcattatttgtctatataaggtctcattgtacacaattttcattcgattactttgtttggttgcattttaaagtatcagaatatcattccaatgaattgcccttatggtaaaatgactattctattttgaaatcgaaggaaaaacctttccagtgtaacatgacaaaaaaaaaattaatgatttttttatcaatttttttttatacattttaaattttattccattccattcctatagtattaaatttctgttcttgataggtattaattcaccacaataacaaatctaacaagtattttacacacactaagaacacacaattctatcatatgccaaagcaaaagttttcacctttaccaatccattactgtcacaatctatagtaatagcataaaagaactcaaatttaaaagaaagatgaactaagagctaaacaatcttactcatatttagcaagcaaaacagctcgatggtaagcaacagtgacattaaacttgggaaaataagctcctctccaagctcctttctttttccacttctttgcacccatatcagccactctcaaaatacacaaaaaagacaccaaaaaattctcattcaaagaatcaccaacaaacccaatattcatattcttcatcagactcagaaaccgaaacgggtcgatccgtggaagatcacaagtttcgggaacccatttccaggaattgattctacccatgttggctctctggttccttagacagttccaagcgtttctatgaaaagggcatgtttcatcgtagatgggtattcgattggggtccgtagcccagtggcctttgaagaaattgcaggtgggtaaagtatggatcttggtaagaggtgagtttgaagaagaagaagaagaagaagaagaagaagtagaagcaggtgattgaaatgggaggagagaagagtaaaggaaaagaaggaaaatagtgagtatgattagccatggaaatagtggggagagtagtttgggaggagccattgttgagctctgatgctctggttggagagagagagaaaaagagaatggtttgcgctgctatggatggagaaagaaaccagatgtgaaaacgacatgtcgttctcagttctcaaaatctcaattcaatgcaaaggttaaacgctacgtcgttttgttgtaagaaaaggattagttaaatgaaaattttcaaaaatgaaattttaaggcaaatgctttatttacaatttaaggcataaattttttatttatagaataaaaattttgattacactctacaaatttctacaaatttttaaagacgctctatttttaatgatttttattttatataaaatttatacgtttaattgtattattttttttttatttttttcttccaatttatatttttaaaaaatatacatatcaaataaaa

SEQ ID NO: 28660 - DNA, 1595 bp, Cannabis sativa
aaaagaaactgtatgcacaggtttcgtgagcaatggcatcattaactgtaatgtagagaaccgaaatgagttcaacttgcgctccccatattctagtttgcaataaaatacagccaaacacagacagactaagcaaaactattactttatagcaacaatgaaaagagggaaaaaaaaagaagaataaataagtagaattacaaacagaaaaaagctacattactggtgaaataaccatgaatgcctatgaagcacccccagcagcagcagctaattcagtcttcttctttccttccatgagttccttcaacctttcctcagtatcaattatttcaccggtttttatgagatatcgaactcgtttcccattttcaagggttttatggccaactctgcttgctacttccttttctttcgagtacagcatcacattggagctatggatgggtgcttcaatctagaaataccagaaatgaaacgcaaaattcaaggacaactataatacataacaaacatatcaatgaacaaatttaaggttgtccaaatttcaaattctcatacatacttgagatggacatcaccaattttcctgaaggagcaaaagagctctaactaaatacttgttttcacttgtaaacaatatgcagtagatttcatttatgcatgacatgtagaactaaaaagaaattactaatttcaagtttatgagattgaaaattaaccttgattatttgtcctggttcaccctcttctctgctcttcacatgtttcgtctttaagttaatctctgatattaccactgtactattatgcttgaagatcttggttatctctccaatttttcccttgtcacgtccagatattactttcactgtatcaccaaccttaacatgcattttttgtaagacaggaagactgtttggcttacactccttccgctcccatcgcttaagctgtgaacaagaacaaagcatttttatgtcaagtgaatgatcatatcaagatttttatcattctttttttatttgatcatataagattattaataatcactatccggattatctcataattctcactcactcttagtctttcatttccttatgtctattatattttgaaactaacctttgcggaaatgagacatggcttctctgttgacttaatctggcaacagaaacaagtgaaatttgtcagaaaatcatgtgttaatattacagttctagcaacaataaatctgttgacataataaaacatttcagaacaaaagtaataaccccaaggaagaaacaattcacttgaccaacttgctagcacagaaaaacctaaaagtaacaagttatgaccatcgaatcggtataaaaggtgcaataaagttgcgaaaccgaagctttactgttacaattctcacttcgatctccagcaggcattactagacaagaaatctggaaaattatagagctgtatacaagcaggatgaatgctggcatttctgagctgaagagcggaaaaaattaactagctaaacaaccgactatcgatatacattctcactagctgaatatacaatgtatatcttatatctatctaattac

SEQ ID NO: 28661 - DNA, 2872 bp, Cannabis sativa
  modified_base (2477)..(2478): a, c, t, g, unknown or other
cttttagacaagtctgttcgtgctaataagtcgtgtctttgtgtttattatgtcatgtcgtgccaacagactgtatagtatagagcaaatgacaagttcctttgctcccaagacgtatgttgcagccccatcaaggtggtctagtggcgaaaacaagatcacgagtcctgagaaaaagctcagcagcctcatgggagaggacacaacaatagcgggaatcaggccgagccgcatattagaccatatattttgtgacaacttttgcatatcgcgataacaatgttcgcctaaaatattcaaacttccaagtaaaggatacccttttggaccaagatggaaagtcttcttctgattttcttcaatagttaaatacaaagaatactaaagatagtaatgtacatagtcacttattttggaggtgtttgagaattgtgggaattgattcattcaaggatgctgagatacttttcaaaacttgagacattagtatttagtcccattgttttgttgggacttgggatcaataattgcctatgtaagacttttatcatacttttttgttgtaatgacaataataagacattttagagtctattttttcttttcattagatatatttctttttgaagtgacagattatttgatatttttcagattaacaaaattaaaaattactaaaaaagaaaaaagaaacatacatataggtaattctacggtgcactctctataaatagatgtaccgatacactttttttgtatttttgatattcaaaattctattatgtttgaaagttggattttggtggagaaaaaaaaatataaaagaaaaaggataaaaaatgataaactcttcacttatatccaactccaaagccatcataccatcaagtagtgttctcaatcaaagcaatgaacaagccaagcaaccgttagcctcaccacaatctgaccaagttgcgttctcgtgcaccctcttctaacacacccaaaatggaatgaactcgaagtctctacctatgtcacttccgaaaaacttttctaactcatcccaaacttaaggtctctctcaattgtccaaacttttctaggtcaatttttgcgaatcgcgatgagggtgtttgccttccaagtaatggatacttctatttttcttcttcctaaccaactaaaaagagtaccctgaagttagtactttccatagccaattagtcattttcatttgggtgtttagaactaaaggaattgatttattcacaacatgggacattagaggccatattttagttgttgagatcaataaatacccctaacaaaaattaataattataataaaatgaaaaaaaaaaaaatataattgatattgtacatatatttaacttcaaattaaaacttcaaaacttttgataagacttattttgaagctgaaaaagcttctgaattaacattgtattaactaaaaagaggtgtttcttataagataccaattaatataggcatattatttcaaaggaattattatgttaataataataaacatagctacttgaacaaatttgtaacataaatgacatcatgtaatatcttcaaagattagctttattgaaataaaagcattagcatcaccaaaagtctacacatgttctttattttacttcaaaagggtaataaaaaagcctcacatttttttattacttcttaaggcgataactaggaatagccacaagatgtgttgacctaggaatagtcaaaccaaactcttcattcatatccaactctgaactcaccataccatttggtagttcccaatcaaagcaatgaacaatttgagccaccatcaacctcaccacaatcataccgagctgcattcccgggcaacttcttcttcccgatccaaatggaatgaactcgaagtctctacctatgtaatctatgttatttcccgaaaacctttctgggaaaaacttttctggctcatcccaatactcgggatctctcccaattgtccaagcgtttatgaacacacgcgagtttttaggtatgtggaaaccattgaccgtgcattcttcgatggctgcatggggaagtaacaagggtgctactggatgaagccttagggtttcctttattaccatgtttaaatagggcaatttgtctaaatccgattcttccaccattctttccatgcctaccgtcgtttcgagctctttttgtagttttttcattgctgttgggtgtttgatgagttgtgatattgcccattctactactgttgatgctgtatccattgaggttataagcatgtcctgcataaacatagtattggttttaaaaatatactgattttaaattatattttaattgagaggttataactaaacagaaatacactaaaaaaaattaaaacaccaaaaagtatcaaatataacaataacaacaataaacaatcatcaatattatatcataataaaattattttnnaataattataatatttatacatgtgttacaatttagaataaattattaattctacataaataaatttataaactatatattattaggatataattatttttatatagaaatatattatttaatatgagtttgaatactatttatctactttatagaaaatatacacattgtgactaagaaactataagaattattatataggcactcaagaaagacttgaacctcatacataattatttgaaacaattcctaaaggaaacaattttaaatacaccattgtaagaaatgttgaaaaatattgtcatttttgtatatatattccttgatgttaaattactttaaaaatcacttatgttgcatatttttaggaacatgtcaagaacattttgaattg

SEQ ID NO: 28662 - DNA, 3200 bp, Cannabis sativa
  modified_base (991)..(993): a, c, t, g, unknown or other
gtaaaaaatctcgtgctttttaatctttctacggctttcttatatattattatattggttgccgaaaacctcggtcaacagttaagtattattttagctatatacttagctatttttgtggccttttatggtattttttgcaactattttgtgtgcctcatgaattaagatggaatcaagaaaatacattgattgactagttacattagatgggaaatcatattgttcttagtattgacttgattagaatatttataaatgtgaaacttaatttcttcattattggtacttaggattaggtgacttattggaacatctataagagcatctccaataataaaattttagaggatgcttgataaagtggagatattatatgacaaaatattaagatgctatatcgagaagagtaaattcataacattgatgctatttattattttttaataaaatattgaagctaaaaagttatggtagctaaaaattaaaatatgtatattaaataataatgtgtgaaattataacatttttaaagaatgtttttaaaagtaagagtgctaaaaataatataaaagagaaataaaataaaatattatatttttaaataatatgtaaatttttagcatccttctaccattagaaatactctaaccacacaaactattgctaagaatgggcgcccaaagatcaattgttccatatattttcatataaatgaaaaaaaaatgttaatgtaaaaataaaagaattcattttataaaggctaattagggtttttgcctcctgaactttgacatatattaaataatgcccctgaactattgagattgttagatttatggactttttgtctaattttattcaattttactattttagttattgtttatctactataccatgctccccagactgtgatatccaccaaattatatctatctaactttgacatgtactaaattatgctccctgaattttcatccatgttagnnntttttactaaaattggaaaaaagttcttaaatttaacaatctcaataggcatttttaacgatcttaaaagttcaaaaaacatgatatatgtcaaagttcaaaggacaaaaatctcatttactttctataaatataaaattaaacattaatcgagtacaaacagacctgccttcggccaggtgtaggttatattgctgaaacttgaaacggcttaatggcttaatgcccttaaccgcgtgacttgcctttccataccgagtcggttactcgtcttcgtaatggtaataataggtcaggtccaagtaattaactgttaagcaaaatacatctacaccgtcagagattcgccacatcatcaaagcaaacgttactaaacaaatccaacggtcacatctcaaccttttctattttgactcttaagtcccttactcttttctataaatagcctcaaacccattcctctttatcataaatcaaaacaatcccattcttctcttttctactttccctattatcacaccaatcagtccccaaaaaactctcaattttctctctctaaaaatggctcgtgtaagctttgttttggtagcagcaatagccgcaatgctagttgtctccacctttgcccagtcaccgtcaccttcaccgtccgtacaagctccgagaaagatttctcctgctccggcggtgaccgccacaacaccggccactgctcccactccatccaccgatgttacatctccatcatcgatctctgattctcctgccgatgctccttctccagctcaaaacggcgccgtttcagcttcgttcactgtggttggatctatggccgttgtcgttttggcctcggttttcgtcatgtaaagtgctgacttgatattttgatgtttataaatttgttacaatcaattttctttattattattatggtaatttcctgtgtacctatttatattatgattatgtatcatcatttatagtgaatgaagggagctgtgcttacccatttttatatcagtatgaattgatcaccatataaataataagtattggaggaaggactggtgtgtttgcatgttttgaaacattaattaattccattttaaataataataataacaataataataaattaaatgttgtaccttgtgttttcaaaatgtagctcaagaatgtgctaccattcttaatttatttattcattaatttttattttgataaaaaaattatttcatgtactagtttaaaaaatacaattaaagtatcccaatactgtatgagtttttttaggaaactcatatatgaaaggtcccccaatcctcaaatattacaaaaaaatcactaaaagacgttcttaagttattctcaattatgaaaataattttgtgttgtgagttggttgtgatgtggtattgattttcacggtgattaggataggcatgcgactcatcgaaccttttaggaattactcacatttatatatttttccagcttcaaataattaaggaatcagtcgcacttttccagctcactccagcttcaaaattaagctttaaacttactcaattatacttttttttttttgaaaggattatacttttttgttgtactaactcatgaaatttctacaattgtgtgaaaaattggtgtcataataaaactttaaataatggaagaggggacaatcacaatagttttacttttttgtttctttattttattttcatcctcaaaaaattatttaattaattaataaatgtggaagagtttggcagtcacaaatggtgacttcccaaattgatggtcgttttgcaagaaactgagcaaagtcattcttttctcttaaaacctaaacataattacattttttatgatttaattaattggtggaaaagttaattgtcatcttttaaacaatttattttattaagttatttttttccccactaaaattatcaaaattgcaatcgggctctttattttttttttcctttttcacaattttttcctactttttattaccttacattttccactgaattccaacttacaaaccctaacggaaccatattattattccaaataatatttttcattaaaataataattaagaaaaagaaaggtcattttcagaagacaaaaaaaaagttctgccgaaataaaaagggtaaataccattttggactctatgttttgcaaaagtt

SEQ ID NO: 28663 - DNA, 2583 bp, Cannabis sativa
cactatgtaaggaaatcaatcaaggctaattatacgatcaaacttgatctttaaaaagtttatgatactaaggaggagatgcttaatgctttccaatttccttcaaactccattgctcttataatgaagtgtgccacaaccctaaggttttcgctcatgttcaatggttatatgaatggatatttccaagcaagaagtgaattgaggcaaggggtcctaatatctcctttgctctttgtccttgggatggaatatcttagtagaattatgcaaaaagttggggaaaacttgatttctcttaccatgaaagatgcagtaatttaaagttatttaatctaagttttgcagatgatatgctattgttctgcaagggagatttcaaaatcatatatcgtatgttacagggcttataaatattctaaaacacttcttgcttgcaaccaaatagtatcaaatctaccatttattgaagtggcatggatgaaaaaaaaaatcaaaagaggagtagatatgtctggcttcagcaagtctgaaattcccttcaaatatcttggtattccaatttgtgccaagagaatttcttcaattgagtgtagattgatcgttgagaagatgatagctcgaatcaaattatggggccctaggaatttgtcatatgttggaaggtcttcactaatcaactttgtactcttagttctaactatccatgcatagtggagtcaaatcatgattttgcctaaaagaattattactgagatagaagacatttgtagaagtattctgtggaagggacagagcaatatgtctagatcaggttatgtagcttggaccaagctatgcacgccaaaaaaattaggtggaataggctttataaacatccatgaatagaatcgagttgttgtaataaaaaatatatagtcacttgcaacaaaaaaagacaacatgtgagtcaagtgggtgcataatgtgtacattaaaaatgaaaattggtaggagtacaaagccccaacataaagcagttggtattggaggaagttagttgagctcaaagatgaagtgaaaaaagtattggattcgattcaattcaattaacatcagaaacatgtcaaacttcctatgtttataagctgctaaccaagtcccacgagcactatcactggtgcgaagaagtctggttcaagttaaacactccaaagcacagttttctgctatggattgatgttcaaaataggtttaaaaccacggaaaagttgtatagattcaacattgtagaagagccgagttgtgttttctgcaatggacttgtagaaacagtctctcatgtgttcttttaatgcctcttatctcaaacctgtcttagccagattaaaagctggcttagatggagagctacaatagtgactttacatgggattcttgggtggataaatcggtccaaaatgagcaagttcaagaaggaagtgctaaatgttgttattgtagctttggtgtaccaaatctagaaagctagaaacaataagatttggaaagcaaagattgtgagtcagaatgtgattgttcaagaaacaaaatggcaagtcaaaataaggataacatgtgttatgcctaagcaagttgcccaaatagacaaatattggtttgatttattataattagattctattagccttagattcttgtatagagcatacaaatgccttattaaaaaggtactataagatgtattaagtgattgttgaagtaatgaaatctcttattcatgaaaaaattatatatatcattatctttaaaaaattataaaataaatattacgtgtaaagtacgtatacttttttttttcgaaatgatgtaaagcacgtatacttagttatatgtttaggtacttttttaggtgttttaatttttaaaggctagaataaaaatattatatataattttaataatattattttagtataaaaatatttaatttaaaactctataaaaagaaatataatagtatatttttgaaaaaaaaaaataaataaatacaaatgctcaaaactttagaataatatttcaaaaaaaaaaaaagtttagaacaataattgaattcaaaatgtattgaaaaaataataacaacattttataaattaaaggaagaaatttgtagatttgtgaaaattaaaagaaaacatatatattataaagaataataatgatgttttgaataataataatatattaatttttataaaagaattcatgatgagattgtaaaataagacaattaaaaagttgtgatggtaacgagacaatgttttttaaaaaataaataataaataaaaaaaaaacagttgtgatctaaacaaaaataaatttttttttttttttgacacaaacaaaaataaaattagtaacgatcataaataaaaaaaaaattgttaaaatttgaatataatcaactaaaaaatacatgacaatctaaaacataatatagctaaaaaatatatatgcatagaattgaaaaaaagaacaatgtttattaaacaaaaaaaaaaaaacttatattcaatttttatgagatgaaatatcaacttcatt

SEQ ID NO: 28664 - DNA, 2544 bp, Cannabis sativa
  modified_base (1035)..(1037): a, c, t, g, unknown or other
accttcacgaatgaatgtaggacaaatatttgaatgctcgctcgaaattgatttttatgggtgaaaattacgtgtactatagaatttttataaatatttagatatatatggataaattttagttttaggtaacttatggtatttttttattttaaattattatgtagtttttttttttcaatttttttaagtttcttttattttttcccagacatagaaaacccatttctatttttacctcttcgtcttctcctgtcttctcctatttccttctcaagcgaagcttcttcttaggcatatttgagatgtgatttcttttttaggtggagttaggggttcgatttccttcttcgccaaagctagtggttcgattccggtgtagttggtggtgcgagttttcttccggtaaagctcatgttgtttaggcagagctatggttgtttaggcagagatctggttgctcaggcgaagcagaggttcgattccacactcgtttgcttcttaccttcctattctcccattttcacatcattttcttcttacaagaacaaaaatcttagacctaggaagcaactttcaatcccgaacagtatgtacattcgattcttgtcttcctcattgaaagattttaagcactcaatccccaagtaacctaggtgacttttttcaactgggtatattttcaaattacttttagttcacatctttggattgcacactttcaaataagcatgatggcactgtattttctaatccactcttcttctgtttttacttcagctcaaataagatatgtccataactcaattcgtggtccttggtttgagaaattgtccacacaattcaaaataatacttagcataatgaggaagattgtgtagttcaaattgtcaactgaagtagaattcaagttcagatcttgatcatactctgcaacataaaggatcaagggttagacatctgaacaatatgagtcatattattctgctgccatcgatgtaaagttttttattttatgtgtttatttcattattnnngagaattcatatttaggatgttagattatagaattataatcaaacattcatgttagtaaatctaaattctggtaaaataatttctaacagaaaccccatgtcaggtgaagggatggttcaaatgatggaattattctttctcgaaaaaattaataaaactgccaaaagagtttattcattacacttaagagaaaaatataatttttcccattcaggtttgaataaaaagtcctttttaggggacaattgttatgctcctatttcgagcaataaatatggtcacaacacgtggacaacacgtggactagagcttgagaatacaagtgaatccacctaagaaaattaaatatggtatttataatgtctcagagattactatgaacagttttatattttattgttaccattataataattaagggtaagtcaaaagtattaactattaaatagaaagtcagcaaaaactgagatatcatatataatattcatctcaggataaatgagtatagagtacatactttctagaaaagaaatatgagatgtgtgaaggcaagatgagtcataacataaagtatgtacgctgcaagacggattcgagaaaacctatatagaggactatggaagttattcgcgagtagttcaatgtaagagagcatcttggtaaataatcattcattatgtaaggccaaaagacgcttactaggtagttctacattttatcacatgttgtaattacatgaaacgtggggattatccatgttttagtagcggttatttagataagacccaagggaataactgccatatgagaaatcttataactagggacaaacccattgtgtagaagagggggtagaaaggattgagtgatgactttgataaaataagtcatctcttttctcattatttttagaactctatactctgtattctataagataatcatccagaaataagatggactcgtggactatgtagatttaactacaaaatcacgtaaaatatcttgtgtcatttattctatattttataatttctttaaggctttatgcaaagtcagtagtttaattcatgaaaaagatcttatttattattaacaaaattatgagttaatacttcaacttataatcaaaacaaatagtaatacaccgatgctaattgtttttttttatttttttactttggttatgaacagaagcaaaaaaatgtttaagaaatctgaaccactacaccaccacaaccaccacactactacaaattgtgcgattcacatatacacagatttaaaccaccattcaaaccaaaaatatacaaatttaaaccactgcaccactaccattgcagcaccaacatcggaatgccaccatcgcatcaccaccccatcgcaccatcaaaaccttgaaaaaaggcaacatcaaatgaaaaaaaaagagatagaaagagggaaagagagagggggagaaattgagagagagagagagatcaaaagagggagagagagagagag

SEQ ID NO: 28665 - DNA, 2161 bp, Cannabis sativa
ggatttggacctgtttattatggctacctaaatgacactccagtagctattaaagtactctctgaagcatcagagcaagggtataaggagtttcaatctgaggtattatgtctgtaaaaatttagaaatgcattacattgattagaacaagaatacagaagacacaaattaatgtacttagtttagttgagtgtattttgttcggacatttatctccacagtatgatagtaagcctgacacctttccaaaaagcctcatagtaatatggataatgtctattcttatataccaatgattctttctatttctaaccaacatagaatttcggttgcacactcgataatcctcccctcaaacaacgtaccaccttgcctcgcttccatccgtccactcttcaccaactagtgtacttccctccaattcaatgaggaactttggttgcacacctaacatattttatcaccgtgaaaaataattttctctatttgtttcttggttaaatctgcagtccaaacaaaacttgaaatctaaacaatgtcccaatagttttctccaacaaatacaattcttacacctttatacaaccccatgaaccaataaaatgaagccatcatattaataagcttagcaaatctagtaactaactacatttactagtaagttacaagcaagaggcaacaatatttattggatggcctatcattttaacttattttggatttgtttgctatttattcattttaagaagtttaacttacaggtattacttctaatgagagtccatcacagaaacttgactagtctcattggatattgcattgaagacaattgcatggcacttatctatgagtacatgtccaatggaaacttgaatcaacatctctcaggttcataatttttcattcagcactaaattaacaataaggttgagtttatttcaagtccgtaattatatataaaaacaacaggaaatgagttttttttaatattttgcaatgcagaaaaaaatacttgtatattaagttgggagtctagactaaaaattgcagtggatgcagcacaaggttagttgtatatataagtagtacattatcatatgtatgtctaaatgtagttgaaactaaattatgtggtagaatttggttaaaatttcaggtttagagtatctgcatcatggttgtaagcccccaatagtccacagggatgtgaaaactcccaacatcttgttgaatgagaaattggaagccaaaattgctgatttcgggctttcaagagcttttcctattgaaggtggcacacatgtatcaaccattgttgctggcactcctggatatcttgatcctgagtaagttctttaattgagttttttgcctgatacattaaatagataattagaatatatttgtatatatctcgataggacaacgttctcatctattttcaagtaataaattatgttttttgtcttgtgatgttgggtaggtacttccaatcaaactggttaaatgaaaagagtgatgtatacagttttggagtagttctattagagataattacaagtcgaagtgttctatcaagaagtagtgataatgagaacattcatctatctcaatgggttcaattcatggttggaaatggagaaattaagagcattgttgatccacgattacaaggacacttccaagtcaactctgcatggaaatatgttgaaatagctactgcttgtctaaataaaaattctattcataggccaacaatgactcaggttgtgatggaattaaatgagtgtttggcactagaaattgctaaggatagtcctttgactaaaaagacgactctgaaagtccctactgatataaaaccttcacctagatagactttggtaagtggagtaattgtggattttgtgggttaattttattttaatcaagctacatgtactaatatttttggtaaaatgttgttcaagtttgacattaatttattattattgttaaattcctttatgtactaaaagcttttataattattatttttttttatcaaagaagaattatcattaatcaccaaattattacaagccaaattacaaactctacatccaaactacccaacaattataattgatcaaagtacttctagtatagtttttcctctttg

SEQ ID NO: 28666 - DNA, 1763 bp, Cannabis sativa
aaaaacagttttatagaacatgttattgaaaaatattttcacttttctacttttaaaaacaaaaaactaactaaaaaagtgttaccaaaagccacctaagtattttgccgcaatttaccctaatattttatcagtgattgctttatgattcatttactttacttgacagattgtaaggcatgctgagagttggagtgtttctgcacttgaagcaattggccagatatttacacctaccactggacagcctgatgactaacataattaatttattattattattaattgttgatcgtgattagtatagtaacaaaaaagtaaatatagcccctgcttatatctgatttgtatgcttctgtgaaatattttactatttttacattatggtttataaaggtcgttttgttgttaatataatcatatataatgatgttatgtttagtttttttgattagtttaagatattaagcgggtccctatagcaacttataattaacgttgcgtttgttagtgatggtctaagagcaactacagtgagaatatgggcaacgttaattttttattatattccttttaaaaaaaagggttaatcaaaactagagaatcaaacacaagaattacctacttaaatcaaatgcttatgttattggggattgttcaactaacttaacctaaatacaattcttatcttgtataatcttatttgaaaccatgttttgtttgaagatagctcaactaacttaagccatcttcagggatgattggctttgtaaatgtaatccatcacaattttccttcatgaagttcaggagtgccattttttattttctttcttttttcattattaggaaagagaagcatacatttgtaatcattataaagagcataaacaaatcggtaaaagaggacatttatttttatttttgactttaatgaggagctggcaaaatgggtttatgtgataaagggtaaagcttttattggaaagactaatggagcatatacatgtatgaattgatagtttatatactttatatatggatggagaatccaatgaggtaggattggagcagtacttacaactgtgcgcgtgcatggcttttctgttcttaaaatgtttacccttttttgggttttgttagtgaactttcaaaggtttggtattaagtcatccatcttgtgagtgaagtggggtcacatgaatctagaagactttgaattcgtatatatttatatgaagaagaatgacctatttatacatatatatttgaatgttgatccaaggtcagtttgagcatgtctatttttgtatggttacgtttggtttggttggcttatttcattttctcttttagtcttttttctaaacaaattcaaatacaaccattagctgttgtccaaactctcacccaggtttcgcgaatgtttcaaagtcaatgttacgtgcttcatccatttctaaattcaaaagcatatactagaatatacaatatatccatggatacagtcaaatattttatccaaacagtatatattatttatttattaaaatattttctattgaactttgacaatatactactgtaattcctacatttaaatctgaaaatggcgtgtttaaaaagctatattatcaaaattttattttttctttcttaatttaaacttttaaatctccatacatcaattcttttactaatttaattaaagagattttttaatttttctatgttttatttataattttacagcctaaaattttt

SEQ ID NO: 28667 - DNA, 2489 bp, Cannabis sativa
ctcacatcaacactcacagatcgaagctgcacaacaacactcgcagatcaaagctgcacaacactcgcagatcgaagaaaggatgcccacgtctcacaatttcggttccaactttgcagcttttcctcccagcttcacctcattcctgacaagttacagtcccaatattggatatggtaatgcgaacttccttttgcaaagttacattaaagaaagtgtttcaacatctcacaaaatgattaagttgttaccctttggttgagtgattttagctacagaaaattcaacttcattcgaggaaaatgaagtcaagacgctactcatggtatcttcttatttatttgtttatttttttggtgttaaaaggatagtagtacccctttaaagataaatgctaattttttttattgcattgcagaaatatctggaagattcttctttcaatggtaagtagagttggtttatttttcattaagattagagctttttatatgagaacactaataatcgtttgaacattggtatttggtttctgttgttcgccagatatgctgaacaaagtggatagagttatcaacgaattgggaggtgatttgacgttgtaattgctcgttactctaatcagtttagtagttctctttgccctttaaaatttcttaatctcactgtaaagtactaaagttgatgatatattttttttgtgttacatagttgggattcgatcccacacaccccaatactttctatatatgaccacttgaactagcctcaaatggttactaaagttgatgttattaagaaatcaaatagcacattttagctcttgctttagactttgtcctttgacatgattgaaaactagaaggcaatccacaaaatataattgcaaatataattgaaaaaccccacaaactctctaaactagaaacccttaattagcaactctacaactctttcttatctgtccttgatttccagtgagaacgttaaagtgtcccaaccgagtcatcgactcgacaaacttatgagaccatgctatagaatcaaaagccatatgtttcacaaactgtttagttcgtggatctatggccaatgcctgatccgattgaagcaaccctctccctttcaacaggttcacatagtaaacattgtcgagcctgtccgatgtgtagggatcaaacctcacaactgcgtttcttttccctattttaggagataatttcatctcattacacctttttctcagcttagcagcataggttggctccatggaaggtttagagggatcattcgggttagtttcatttagtctgtactcgaacatcgtgcagtgtgcttgtccaatggagtgtgcacctgataaaacaaccaaatcttctacgtttaaccctttactggcaaacaatgctattaggtcttcgacagacattgttggaagaggtaggtttccattaacatcagccgaacgagaagtacggctatcgcggcggccacctaggacagcatagtagggaagcccggagaggaaaatagcttctcgagcagcgaaagccaatatgtctgcacaggaaactgtctctggacatagttcctctagtttggtcttgatctcatcaatgacctcaaaacctctaagggtgttgccattgaaataagaacgcttctctacaggctcaccagagaatgtggaatccaatagaatcgaagcatcacaaccctgtaaatattcttagatattaatgtccacaaaacaagtaaagttaacaattaggaacgaaattaatagaggccttagaatagagagccttatttgttaccttgacgaaacaatcatgaaaaaaaagcctaatcaaaccagctgcaacaccatgatctcttatgaatgcctgagctacatagtgagacaccacaaactcagcaggggtacatttttctttataaaatccaacatgcatgaattcttcattggtgtctgagataattgcctttggaagaatgactaaggacaatgtgaagatcaccactgcataaatatccttcatatctttaactgaagaaaaaagaagagaagaaaaagatatagacttgttgggtacgttagctttttagaagcataaaatcatatcatgtaattttttttttggaggggttctaactaagagtctatgcatgttgattgacttgatcttgatctctctccaaatatgtttatttgtttgagcagttttaatgggtggatcagagttaaaagtgtgtttggttgaaaggtttttatgattattattagatttagttctaattatagttcttttactctgttatgaccaccggtacgaacaaaagaggttcacatagatttttttttttttttttaaaacatctcattttcctaattttttccgtgtgagaagaaaattgtgggttagattgtttgtttgttgtatagataaaacatctttaaactaatattgtcactattttagaataat

SEQ ID NO: 28668 - DNA, 1959 bp, Cannabis sativa
gaagcaaggcttcacaggccgcagtcgcactaatataatcgaaatggagatcctatacattattaaaatacaatatgtatataataattaaaaaataaatcataattacatatctatgagaattagagatgtaactgaaatttgaaaactttcacttccaattatataattatctagttacgtaaaaaagaacattcttattgcaaatatattactagaaactgagctttcaaactatttgcaactgttaatatttttgataatattaccttatatttctttcatattgactttaacattgaaaaacaaaaattaaaacgaaaatacattttactatcatacctatttaattgtatttccacttgaaaaatgaaaaactaatattctattgagttaaatgaagtggtatagggttatatttgtatcagtatgtattccttcaactatatggtgggaaacaaatatgatcttcctgcaaatgaaaacctttaatacagcaattgataaatctcataaataattttaactgttaattctaattcttatcataaagaatctaggcacttagaaaataaataaattcgtatattatctggtatgcaaaactgctaactaggaactagcaaaaaagttgtataataagaaataaaattttcattcaaaaacaaaaaaggttaatcattctaatcatgaatgcgattagctaggctaatcatcctagtatagaaatgcatatatgtatatatatatttgtcactatgtatatatactcacctttatggctcatcatgaatgcgatcaggcacatgcaacaagataacaaaagattttccagacataaataaccgtctcaattgctcaatgaatctcatccatcaaagacaattggcgattgatgcgaataggaactacagaatacctggaatctcacaaaaacataagttcgtatatatatatatatatatatatatttgacatttctatcatgttctatatatatatatattgtccaatatatggggtggaactgagcatagaatttagtggtagtagacgcggatactagaaaagttgaaaaaggtaaatttactatagatatctaaacagataaatatagaatttacattataaccaaatatttatacgcttttagccagaaaaatattcaatgactaacgaagtgctagtataaaaagttatacatacataccatgtattccttcgtacgaagggcaaagctatgtatctttaaaaaaatttatgtacttaccaacagataaaagttgtactcaatagattgtcaagtctatatggacaatatctgcaatatgatgaattcagaaactactttaatctagctcatataaaaatatatatgtaaatattagggtaagtgtacattccctaaaggagtgtttctgtagattttctatctattttggcatttagtctatttttgcgtatattatagttatgtaagaccacctgtaaaatttttttaaaaaaaatagtttataatgccaaatataaaattcacatattttgatgcacacgagactattttttttatacgcgtgttaagtaattgtttgaattttattttcgacattataaattattcggaattttctaaaaatttaaatttgatcctaaatagatataatatacacgatcttaaaaaaataatagactaaaaaagtgttcttaatatcaattcagataaggaatttactataattaccctttaagaaggtttactacaaaaatttccaaaatattatattcgatatgacagtacatgagtgttgatcatatatgcaaccgttatacttaagtttacataaacaaccacatcaattaaagtactaccatacaaaggtcgaatcctattcttgattaaaccatgaatgtgcttgagaaattcggaaaactcacaatcaaaataatccaaacaaaggg

SEQ ID NO: 28669 - DNA, 2575 bp, Cannabis sativa
  modified_base (1636)..(1640): a, c, t, g, unknown or other
ttataaacagaataaggcaacaaattcacactagctcctaaatcaagtaaagctttgttaatcacatgatcaccaataatacatggaattgtgggacacctaggatctttgtgtttaataagacttttatattgaaatatggggttgacttgttctgttaaaaattcctttttcgaaactttggtgtttctttttgcagtacacaaattgttcaagcattttgagtaggcaggtagttgcttaatggcatctaagaaagggatatttatacttacttgcttgtatacctctaagatttcaccatactgactacctcttttgattgggatcgctctctgtgggaatggagctttcggaatgaacgacaaagtttgactcgattcttcaactgagtctttggaatgtaaattttcaggctaactcttttcattctctttcaaagattctttgtttatttcaacatcaggttaaggtatgtaatcaggtttttaaataatttttccagacctaaggatagaaaatgatttagcttcttcagtaagtatagatgtacttacctcgtactgacactttggattgggattgggttgattgggaagctttcccttttccctttcagctacagcaatagcaagcttaccaatttgtgtctcaagctttcacagggattgagaatttgtgtgttaagcttgttgggtggtttgcatgaactgttgtagggtatcctctaaagattgttttctttgttgttgaggatatggcatattaggttgggcatgactctgattaggcgtgttgtactattgcccttggttaggctcgttgtgtctccatgaaaaatttggatgatttctccaatttggattgtaggattgagaaaatgggctatcagatgacttcccataagtctgaagagcgtttacttcttaagagaatgcctcttggtatataggcaatgatggataggactgggtcctatgacttgcactatagcataaggaaaaaaatttaattcctatgtataggagtattcatggattgacttaatgacatagcttcaactctcctagttatatttcctaatgattttttgatatctacgtcatcctttacatcgtaaattccacctctcttaggtgtgttggaagcttacgatctaggatcttggcgattctaatggtgagaatttacagaaagattctcaagagactcccaagcctcgtcccctctaaattgcaaaaaaaaatccagtgtgcattgattgtaccatttgttggtttgtgggagataatccatcataaaagtatttttcaatctccatttgtggacattttagcaataaatccttaaatctttctcaatattcataaaattcctcgtgatctttctcataaaatttggagatttctctcctaatattatccgttttagacatggaaaaatttattaactaattcatcccaagtagaaatagatcgggctgggagtgaatttagctaggctttagaattatcttttaatgagaatggaaaaagtctaagcctaacaaatgcatcagaaaaaagttgaaatcttaaagtagaacaaatttctaaaaaaatctttcacatgcatgtatggatcctctctatctaannnnnaaaaagatgacaaaagttgaattatggaaggtttcagctcaaaatgtgtagcatttatttgaagaaaaataatgcatgatggaggattagcagatatgggagaaaaataatcaatgagagtttttccttctacatttacttgatttggttctatgatgttagaatttttacttttaattttaacccacaacaattttcttttaaccaaatgatttttagaattttgttcctaacgaatcatacaccaagtatcacaaaaattaaaataacagaaaaaattagaaggcggcgcctaccatataagtacgtaaataaagactgaatttaaaatatagcgaaaaataaataatatgtatatatttgacagaaatatatatgctaatattaatatatgtacaaaataaaatataaatattaatatttaattatatttaataatatacactttattatttataattataataataatataatataataatatattaatatataatattaataataataatttatatatctaagttacagtaacattttatgttactgtataataaaatgctactgtataataataatatatagcattatatatattagttttacttcattactaagaaacgttatataatgtatataatataataactagtagaagatttataccaaccacgattatagtaatttttcttcttgcagttccccaacaaccgtgctaaaaatttgttgtatactgaaagtggtatgttttatatttattaactcgcaagcgcacgaatctttattgtagtatagagattttaaagaacgaggtcaaacccatgggaattgcgtgagatcgaagaaaatacttatttaatctaagctattacaactctaacctagttccgaaaatagtgaggtttttagtaataaaataaaataaagtgttt

SEQ ID NO: 28670 - DNA, 2899 bp, Cannabis sativa
  modified_base (68)..(78): a, c, t, g, unknown or other
aaaacagtaacacaatcaatttaaaccatatacagcaattcaacccatcaaaataataataataatannnnnnnnnnnaataataataataataatagaggtatttacaagaatattgaattttagtaaaaaattataatttcactgtcataaagaattttttataaaaaaaaatatttttttataaaataaccgtaaattaactaaatagaataattaaaacaacaatagaacaaaactaaaaaacaacagtagaacaacggtgaaaacttaatacaatacacagtataaaactaacacagtatttttgaaaaatattctactattatctataatagagagtgaaaaaattaatcctaacctagatctgtcaaattaataagcacaaaataatattaataaaaacaatcataataatgataccaataaaaatcatagtttgttgtttttggcagccaacaaaaatcgaacagaatatatatgtatatataacaatgtgcatgattcatctaatcttgatgaaatttatccaaaaatgaaaatattgtaatatatatgttaatatataacaattgttgtattaaacatataatattcactacaacaaaaaaaaaattgttattggcaggtcacgattaaattagtgccaacaaactcaatttttagtgttcatggatatcatgatttctcgtacccttttcgttgtgcctaaaaacattaacggacactataaataacatcgtaccaatttattgatctaatagcacgacacatatagtgtccatttaaaatcgtaaacactatcagctatgctattaggcacgacattatcatgcccaaaggtttttttattttttttttttaaataattttgtaatttaagattaatttatatttaaaatacaattatcaaaaaccaataaaaattaatttataaagatgttttctactatataaattagaaatccaaactacaataaaagtatttaaataattaaagacaataactaaaataagtgttcaaataaacaatacttatattgtcacattcatacaacaactaaaataagtgttcaaataaacaatatttatatagtcacaaataacaatactataatcccaattgtgtggactcctcctcctcctcctcatcatcaccattctctcgagactgctgttgtggaatttgcggcatttgtgaatagtaaggctactgcaatacttttggcatttgcaggtagtacaactactgtgtgtgtggcatttgctgcattgatgtcatcgatgacgattgctacatctaagacgctggtggcatatgatgcatcgatggcgtagaaggcatctattgcaaatgtggcatctgctgcatcgaatgcatttggtgcatctgtggtgtctgttgttgcatgtgtggtgtgtgttgcatggaaggttgttgttgcatgtgtggtgtgtgctgcatggaaggctactgctgtacctgtggtgtgtgctgcatggaaggctgttgctgcatttgtggtgtctgctgcatctgtggtgtctgttgcatcgttggcatctggtgcataaaaggttgttgatacatttgcagtggttgttgttgcatatgttgagtttgatgcatttgcggtgtatgttgcatataatttacctgcaactgcgacatcggcgatgacaaccaaggaaaaggggacatttgctgaggtgatgacaaaggatacataaatggaataggattttgctgggcttggtgatattggaaattcccaggctgtgaagatgaagcaaacccatctccagacatttgaggttgaaacgtctgtgttagaggcattggcattccaaacagctcctcttcagtaggtagacgaacattaggtcccaacctttgagacatccacaacattgttcttgtcaacttttcaagttgacgctccactctgggatccataggcatatcttgagtatgagaaagttgtgtgcgtcgcgatgaagatttccccattaattttctccccactcttcgattatgatcatgcctttcaccaaatacttcattgtgtgcactcatttcaatctcctcaacaggtccaacgtcgggagtattggctcgtttttcataagttgaaaccaactcgtcctatttttagaatataagttagaaagcattgtaaacatacataaaatagcattttatttagaacatatgaataattacttatatatctttgcagccaattgattaacaaatgtatttattctttttaagttatgaagattatttcaagtctcaatataacccttattcttcttagagaaattaagaaaaaattaaaagaaaaatgtgcaattaataacttaattaaataaatattctaacttactttttcaaaacgcctcttagccatagattttgatccttgtgttgtagggtattattgcatcatttttttattttctgcgtttattttataacgagcaataaactccggactagtgaaaatatgacaaataggaagccattcctctggagtaagatcactaggcgggtgggcaacaacattatcaaaatctacaggacttttatagtgttttttgaaatgtacatgccttaacaactttcgtttcttatatatatctgctatttcagcacatgcaatatttgtaattatctcagagtgttcattgttgtcgatatcataataatactagattaacaggaaaaaagaaacaagttagcaacttaaaaattgtaagtaagaaaaaaatttaatataattttttttacccgaagtctgttgaagactgagtcacgatgcatccttggcacattttcccaactacaataatgtcttgggacgtgaattccaatctctctcccaatcaaacgaga

SEQ ID NO: 28671 - DNA, 3257 bp, Cannabis sativa
gtaaacattcatttactaatacctaataaatatatatacacacgtgcaacatatttttttaaccaatactgtaaattatttgattttcttcaagaatatacattataaataaatacagttaataccatcataatcaaaaaaaagtataatttcaatattattatttctattacagccacaacattacaaaatgtaatgatacatgcaccaaatatataccccaaaagggccagaacattacataatgactagattggttgaaaaaataccactacggagtacacatcattaattcaaagtccaaaatacataatttaataccatattattttattaatacaataaattagtctccttatacaaatatatattcaaaagatacgaacttgtaacagttgttacttgttagtctgccaagtgcagactatatgtaattataatttgactcaagttgatgagttgtgcaatttacttataatagtagtaaatatacagctataaatagatatattttgattaaataaataatataaataactgctaacaactcaaaggcaccacgtgtgatattctttagtcctaatagcaaatgctcttaacataaactacttataaaatcttcaaataagcagccattcaaacattcaaaccaatacatcaactttggttgttgcggttcaaacttgaatccatttgtttagtgctttttaaggaattcaatggcttcatttctttgacatgttcttatattctttttgatacatcatccatattcgaccatgtatctatactattcaaaagaagaacttggctaagagttccaatcaacaccaagaagaattccaagtttcaaacattgaacccattcggcaataagcaaaaatgagcagccaacccaaatatacaaccaaaaacttggcctttcgttgcttacaaaggtcaatgttgtttactagaatttagtataatttaggtacaccaacccagtagaagacaagaaaaagttgatggactatagaaataatatcagtatcattactactcggtagtaccttatctcacagctccttttgggctcttaagcgagccattgttgggcccacggcgctacccctcaaagacctagaagaccatgatgaactcttggatgtgctccccgctgaatcttttttcttattccaattgttctcctgggatagctgtgctttctttgcgttcaggctctcgcagatttcatcccacacgtccactttcccgttttctacataaacaaactaaaatattaagcccatccatgaaaattttactgtattcaataactctatgtagtttatactccattggtaacctgattcatcgataccttgtactggggacttggctttctcagagatgggtattgaggacttagctttctcctcaccgataccttgtactggggacttggctttatcagagatgggtattgcggacttagctttctccttaaagatgaccttagaacttgacgcttggcagaccccatttgagactgatttagctttatcagcgtttaagttggcatcatcacacttgatgattcgaacatcagcaagagaccaataatctatctgcaaagggactccatttgttagactattacaattaagaatcggcaacagtgccaacactctggtcgctagatataattatagatgtgataaaatcatggggttgcaaaatataataatttatcctgtcaatgaaagtaacatcacacatgtacaagaaaacaaaataaatctgatggaattgtaacaatccctcggaatgaaatctgatgttcttaaaataagaatcaaaatttgataatgtaagctataagttgcaatttctgatgaaacacatgcttatggaaaaagagaactgcttagtacctcaagagagccatcttctgcatagagagacacatttggttgctcagattcctcatctctcttctcaaaaacaattggatactctggaacttgtattagagttatcttatcagatttagattcatagtttgatacttttccaacctaataaaaagagtatgttagtacactaacccagggtgagtacacattattatcattgttttggttttaaaagaatggttgatggggtttatatatgagtttagggcagagagacttgtacccggaaagatgagagttcaggagtccaggatgctgataactcgaccagacgatatgccactgtatcacctacctgtgttgcattatagcaaagaagctatcattctcaaaataaagaccacaaaaatcttaagaaattgcaataataactaactaattgagtatattgtttttggactttatctagatccgtgaaaaaagaaaaaagaggataaataaccaaagcataagcatagcacgaggcaacaaacctggggtaaggtgctacaaggcttaagcttatcaaagtctacaggaacatctacagtagttttctcttgatcttctttttcttcttcttcattaaccagcatatccgaacactccgggttctcttttttctgatcattccttttaggaaaggctgtcttctctttgccccactgttgacccttcctcttacttgtgatcccattccactgaaaatttatctaaaaccacagggggaaaaagaaaaaagagaattaaaataaaataaatcgagcaacaacattaaattaaaaaaacaaagtcaccttaaaacaattattcacacggaataaatgatcaatgaaaagagataaaaggaccagaagaacataaatgagaactagattggaagtaacaggatgttcattactagatcaggagaatctggaaatacctctgaaattttgaactgtggaatagcttgatctccatcctctgcaacatatttataatattgaaatatcatcatcaatgaataaatggtcagaaattaaaagtgcaactctagtgaatgagccagtatgatcacaagttaaatagagcacaataatccagccaaccttttccaaagggctcaaagcgaatgtgtcctggcctcaccacaatagggactacgttatcctcttcatcattacatttctcacgttgatgttctttggaatttcggccattatctttgctagatgactgctggttatttgtttggtgtacttgtgcttgatgtgactgcaaacttgatgtttgctgattatctgctttaagtacttgtgcctgatgtagctgcaaatc

SEQ ID NO: 28672 - DNA, 2003 bp, Cannabis sativa
aagcaaaataccaagtattatagatccaaaataacctatccaactacttgattttgagcgaaccaactcctcccgcatgcacaacaacaactcaatcaaatgatgaggtaaatgagtagaactttaccaaatatgttcaagatttccaaagtctattagatatattatatagcttgattggtgttattagagctcgacaataaatggtcgagattataattaaaatgttagtataaatttcaactacttttaataaagctcgaccaaatgtagtctcaaaagtcttgaaatattagtgtagagctctattatacagagtacatcttgaccattcacggtcaagatgtagtctccaaattcttgtaatgttagtataatcaaatgtcttgagttgagctcaactgtgtgtgggtaaagctcgactattatgtttttgctcaattaatttaatatttacctctttttttttaaatcttagttacatagtgaagacgagtcaatgaaaagttttgaagaacaatcagagaggagaagaaaaatcagaatcaagtgaacaagaagaaacaaaatcagatagagaagaataattagaatttgatggagaagaacaagttaaatccgatggagatgaacaagtagaatccaatggagaagagcaagaagaatttgatggagaagaacaattagagccttcatcagtgtcacgagacaaaacacgtatggtattttttgaatttgttcactttattttattattatttttcttatgttattcagataatttaatattgaagaaagattgtgtttaatttattacaagtgaaaaaaaatatctcgattggagcctatattaaaggaaaatgaacattttgagtgcaaaataagtataaaaagccagatggacgagatcacaaggcacattaatgatgtactaaagaatgacccgactcacttaaaattattcaaataatctccgttcggccactttctcaatatttttaactaatatagatattttagccaagtgatgtggctattacttgttcgagaagcagattgttacagagatttaaagatgtggtttgttatgaatgaaatactaatttgactctcattgatggagtatgcattaatatccagactaaaatgctcaaagtaccctaaaggttgggattttaagctgagtcaaaatcattcaatgatagacactttcgtgaaagactttcatgcatcaccattgacgacttaaagaccaaataaaataattgtctaactagaactaaaattaaaaatcacgaaagaataatgaagttaaaaaatattaaagatggcttcactcttgttcgtctctggagtcttaatgcacggagacaaaaaaataagctaacattgacccaaaattattaggatcggttgataatttagaaatgttcaacaaattcccttaggggactcattcttatgagtatacgttaaagcaactatagaagtcactaaaagaaaaaagaaatatcaatgcatgaaaaagcgcaaacgatgtccacgttcacttattcaggcttccctcttccattatgagtaagtatatttccctaagtaaagtacaagaatattgaaatacttttttataatttctcttttttgtgtgagtagattttagtgtatgaataaatcctaacagtggcaaacaagtatgtagagcttagaggtcacattaataatccagtcccgagaatttactgatggaggacaacttagaagtgtaagaaatatccctcttgtagtggtgtagtagaggcttcaggtgattcaaatgttaaaatcttatttattattgatatttacttttctttttattatttaatttttatattaataattttatattcaagatataaaaagtattctttcacctactaaaggggagaaaaactgccacacatgcaaggcttctgtaacaccctaactaacataggcgcattacgtgatttttaaacatgttg

SEQ ID NO: 28673 - DNA, 3031 bp, Cannabis sativa
ataaacaaacaactcctaccttctctcctctgccatgaaacggttgagaggatggtgctcgagaatttatctcgaaaaagtagttcaccggacttgatactccaaattcgtaagtagcagtcctctccccctgtaagaacaagatatgagttgaaaactcgggcgaattggttagaaaattacgaggagtgatgtaattaatacctgacataatgaatctctcggatggatcaacaccgagctgtattcgagtgtgagaatttacatgtccctcgtatgattgtacagcacctctttggcaaaggcgatggtcgtaaagcttcacctgtgaataaacaagacaaattcgttcgttcattttcatacgatgattctaatcgatacttcgagttgaaggacaagttactgaagatgtgtataactggggataatccgagaagaaacacaatgaaacaaacacatccccaatccaaaaccgaaaaggagaaaatactaaccgagccgtccatggagcttgccaagaagtattgatcatcatattgaagtgataccaaactagagttggaaatcaaaagacgaagttatcaaaacgcgaaaacaagaactccaaaaatatagcaacagctaaaaacaacaaagagttcaagcaaaactgagattgtacagaagactgaccaggagattgatgaaggcaactgaattgtgtgagaaggatacaaatttccagaaagctgtaaaagataatcacataatcaaataattaataatagttgccaataaaagcacagaacataccacatagatgaaacagaaacatattcacataatcgcatcaataaatcagcctcgtcgttcataaagaaaagcaatgaaaaaattactagagaaaaataatatattaattatcgtttttaatataaatcgggtattttagaatttcttaattcaataaaacctctacgaaattctctttgttcttgttgattcttgcttgttatgttactggtttattaatttactaactaacttgcggttaaagcataacaacataccaaatattaagaaccaagctcacatacttttttgctttttttttagcgagagctttctaccttaaaccatcgtttgcttgattttgcggtagtgctattcaaaggaagttgtgaaattctatgtctgacaagcctgtcagatccttcccgtttctcacgaacatcaacagaaataactgctccatttctaagtccacataatacaacatttccctactcagagaaagaacattgaaaagaaatcaaccccaaaatataagacgatatatattacacaaacgtgaatctacatacttttctttattattctcattctattcttctatgcacaatattaaaaatattaatactttgatttcttacatcagtaactgtgataatcctcaagtataacttaccgagtgaacaagttgttgcgccaaaacatcacttttactgcgtaacacccatgatgtccctcctgtttctggatctaccaaagcagcccccatattggttcctataacagatcaacaatcacaataaacattcaaagattaaatttccattatttcaatcaattaatttatagatattttggtgacaaagattaaattaagccaaaataagaaaggcgctctaaactaaaacttgctgcaaaaacattcatgctgagaactaacaataaatagaaaagggtaaggacaaaagaaacgtgccaatcacaactcgattttgattagatccacaatctgcagtccatatggtacaattaaaatttgcaatctcttgtatcctccgtcttatgaaaagagctgcatgatcgaactccaagggttcacttagattaataatacaaagagatccaccatgtctctctgatcccaaagtagaaatcctgttcactaagttaagggcaactaaaaatgaatgatagttttcaatctcatatataactgtaactatctgatagaaaatcaaacggtgaacaacagagcaagaaaatcgctattgtactacttccgatatatttatacacacacacatcatacaaaacaatcaaactaagtactaagaaaaggatacattgcgtgctggacactcccaccatcttccatggccgatgaagagttctttctaaaagtttttatgcatgatatattagatgacataagtaatgaagctcccgtctctctccatatatgttcgggggacacactacacttagtttcttctcctctggtgattggccacacgcagtatggaatgctttgtagaccatcggattgttgtcgagcctttcccacgtcagaaaaactgcaaaggcaacaaacttcacaaaaaataactagtaataaaatccatacaaatgtttacaaaaagcatgcaaaaaatgaaagattctgcaaaacagtacatttagaaagaaagtaacaacggaatatgttacgaaagatattcacagtaacaaatgacattctttttgttaattattattagttggaaaacactttattgggtggtgtttattttcttttgttgtcaaggaaaaacacttgtttattttgctttcgttttttttttggtcccattatttctttctaaataaaatggcagtttctatatatgaagatgttcaactattcaagttgcttcaacatgaaagataattcccctacactgcttttacgagtgaaggtataaaaatcttagtaattactaattaggtagcgtttagtagcacatattaaataatgtacatattcactcttcactaccatcacatcaaataatgctacaacggttactatactagtttctttgctaaactagcagaaaccctttatcataaagccttgatctcatctcaaatctacaatactaaccttaacagttattactttcggaatcatcataaatttcccatggggagaaagttttttattttatttttcgcacaattatagctgaatgcaaaacaaaaacactaagagcattca

SEQ ID NO: 28674 - DNA, 3099 bp, Cannabis sativa
  modified_base (3052)..(3068): a, c, t, g, unknown or other
ccatcaagaaaagggtgtggaacagacttagagtgtggaaaagaagcatattctctgttgcgggtaaagaaattttgctaaaatcagtgattcaagccatcccttataacatgatggggggttttcgcctacctaaaaagatagtccatgagcttcacgggatgctatcgagattttcgtgggattcttcaaataagaaaaagaaaatccactggggagcttggcctaagctgtgtaatccaaaaaataaagggggtttgggtttcagagatttagagttcttcaacaaagctcttcttagtatacaagtgtcgagggttctaagaaatccaaactcattggtagtaaagttcttaaaaaaagctagttcccgaattcaactatcctaaaagctaaaaaaaggttcttcaacttcaactgtgtggatggggctgctttggggaaaataagttgtggaactgggctctagatggcgtgtagggtcggtggagaatatagatgttgtgcatgatcgctggttacctagactagtgcgtttcaaacccctcttgaaactagaaattcccttggatattaaagtggtcgaccttatacaaaggaatgggagtgggacgagacctttattcgtgttgtttttgtggaggagaattcagtactattattctagggatcctcagtggttctcttgaagaggaagataaacttatctggcactacaacaacactgggggagtatagtgttcacagtgggtacacctcggcgcttaatgagagaatctatgtagaaaatttaaatacggaaagcacggaaagttggtggagctatctatggaaaatgaaaatccctcccaaagtcaaacattttttacggaaagtgagccattcttggctcccaactaacaatattcttttttgcagaggtgtgaacattgataaaagatgcgagcgctataagaaccaagagagggatgagacaattagccacgccctttaggagtgcaagacattcaaagagatttggaagagaagtggtctttacaaatatataaagaaatggatgaattgtggtctgcctagcttcctttggaatttaaaacataatgtttctgcctcaaattttgatctttttgtgatgatatcttggcaacttccgtacaacagaaatttttcgcaccataataacttttccccaaagtgtggagatgttattgacattgttacaaatattcttgaggattatcataggcaatggcaagatagagcaaaaggggagaatcaccaagcaactacccactggcttcccattgaaataggtaggatagtcatcaacgttgatgcgacgatagaggtcaagaaaaaatagagcatcattggaggggtcattcgtgaccatcagggaaggtgtatctcgtcttttactcgccaatggtcttttcccatgaacccgttggtggccgaacttagggcaattgaggaagccattcactcaactaacctgcttcagctcaaaaaaaatttcatccattcgaattgcctcaatgcagtcaagggtatcaactcaagttcttcttacagtagtgatatggaatttctcatgatggatattaaaaaaagggttcgagtcgagtaggtgtttggggctattttatgtttttagaaattgtaataagttagcccattatttagctaagtatgccttaaagattaaggcttctcttttatgggatggagattatttacctccaggtgcctattctgtttttcaagcaaataaggcctccttgtagtgtgtttgtttcatttcatttttcgaaaaaaaaagcctaatcattagagatgtttggatatcaaactaaaaagtaatattgatgctaaaacttcgcaatgatgtcatactcatcttttccttttcttttaataaagtcaaaataaataatatattaaataataagtgtgaaacatgatagtaaatttgtagagtgttaattatgagattacttttagaagtgagtttgctaaaactaatgtggaagagaaatagactaaaatattatatttttagatgatgtgaagattttatgtaaatttaaagaaagctaccattatagcaacgctctttaagaaaaaaccacacactaagactaagggtatttattagaccacatctaatatttgtaggtctatccagatttgtttcaattatatattggatttttaaattttaccatctgatctgatcgaattaatttcagttatctaattgatccaacatccattggatgttagattggatcggttttttcactggatgtatttcatttatatctattgttttaattcaggtttatccaatattttagacttaatattttttagatcgaatcagatccaatcaatatttaaggtccggtatatattggattagattggatctatccattcaaaaaataaaaagtaaaatttaatatgttaatgttaatgttaatattcatatattctattacatgtaacaacataaaatataattactcatccaaactaaatgaatatattaatatgttcgatttgatgttagatgtattggattttaaaccacacaaccaatgtccgatctgatccaattagatattcaaagataatatccaatctgatccaatcattattggacatccaatatttagtgatcaattgtaattagatcattcgattttcattagattagatggatttatgcacacccctaactaaaactattagggcatctctaatggggttaacaaaaataggtgtccaattagcctcacttaacacacttttaattttttagccaattaaaatttttcattttttaattaaaaataaagaggacaccgatgccatttttgaaatcttttctttacctctttctcctctctcctctaccacatcatacattatggtctaccatatttagaccgtgtattttaatttagtctagattctctaataataattttattttaaaatatttgagtggcatggaattagactagggaaacttacaaaaatactnnnnnnnnnnnnnnnnnttacaaaaatactgtcacacggaattttttt

SEQ ID NO: 28675 - DNA, 2013 bp, Cannabis sativa
acttgattatccttgagttggtaagcacaaggttcacctaatagtctagaattctatgtttaagtgataaattacttttaatgatattttgatgggtattattatttgtcatgaagaatataacctaagttaaatgaattatatgctaaattgatttgttgcttagattaacttgtctccatagaatttaatgtttttcctaagttaaatagattacatgctttatgggtctactgcttaataaaaagatttaattattgagcgctccaccataattaattgtaatagggagactgagataagtaattatctccggggttaatagtttaatttttgaataaaatataatatttatccttgttattcttaattgattgatgaaggtggagattacctttaactatttcttaaatatcgtagtgtcacagttcattttttttctaatttatattatttaatcttcataattaaaacccctctttttaattcttgtcgttaatttttgaataataaattgataatagtccttgtgggatcaacttgtatttaccattatactgaagtaattggtaatatagaaataaaaattagtaaattttttgtggcttaggacacacttcactaggatataattggtaaaaaacttgtaagttttggatgctcaacacgctttgtttgtgatcgaaaatcaagtttgaagcttcaaggcaatttttgactatgattctgtcactttgaagaaaaatattgttaataaaagttttagatctctcttttatcttttcagaacatcttgaatcgtccaattttgagcaatattgaaagagttaaggccaaaacattttcagttgacgtagtgggaagctcgctatcaaaaatcgtgcttcaagcactgcgttactacaaggtaatgtcgcggcccgcctattctaaattgtgaaaattaggttttcttttatctttttttagctatagaaaggccctttttcaatactttttagcagacgagtttgggaggatataaattagaggcaggagacggctttggagactttaaacattattttttcgacgagttctttcttttattttacttttcatgttcttaattagttgttatcaattgttcacaatgattatgagtagctagactttttattagggtgttaatggagattgtttgacagtttattttgattttagtatgatttagttctcccctaattttctatgtacatacattcgtacttaattactttcaattgccaaatcatcaattaaatattttatgatttcaatgcaaaatttgagaaagtgttgattatgctataatgaaatgggcatatatttcaatatagaacgagagtacctatatagtttgtgtagcatttaatatttttatgcttaatgtcacctatgtgtttaaatttatcatgagagtataaaatttacatataggttgagatttatatgtcctaactcgaatataagtttctgtaataaatccgctatcacatgaaaattagaatttgggaattaaattatgttaaaccatataaagtagatgcaatcgaaattaatcatcctaagctttaatcattgttaatttcaccttaattatttattttctttattttttattagaaattaaatatcttttctaatttttattgtcaccaaatataattagcaacttagttgtttggtaattaactaaagttcttgtgggatcaacctcattcttgtgagtctattacttataaacgatacatatacttgtatgttagaatttccataatagattcaggctcaaaaagccatgaagagtcatcactaaggccaaatataggccagaactagccaagttattggaacaaagccacgtgccgaccaaggtgccaagacaagattatgaaccaaccaggctcttaggcttgaagccataatccaaccaagttcctaggctaaaaacatgtgtcggccaggttcctaggtaaaaaacatgtgctggcc

SEQ ID NO: 28676 - DNA, 1554 bp, Cannabis sativa
tttaaggtttcatctattttttactaaaactgccaatatagactgcatatgtagacacttttgtacattgtcaaatttatattggcacacttaatattattatttttaaaatataaaaagttatttcaaaatttatattttttatttttataattttatttaattttaaaataaattttaaataataatattaattgtactaatataagcgtgacatgtgtataagagtatatacataaataatctatagtaacagttaatcgaatgacacttaatatttgctactatgtatttcagtagtttggaggattttattattaaaatttgagcttaaaattaaatgcaagtaaaacgatagtttaattatttaaaacgtaaaaaaaatcataattaattagtctgatttgtttgagcaaggtagtcttttcttaacgcaataaaagcagtttagaacctctcctcttctttgcccacgctaagtcagttattattgttttattttattaaataaacgaacaaaagaacaaacttactaacaattacaaatgattattttgcattaaaaatttaatttattttttcatgtataaaactcgtaaatgtggtgaggaaggtgactgacacactgatttgtttgtcaggagttattttaattgactcacgctgaattgaagattaggattttgctgacaaattcttttggttttgttttattgatagtcaatttattttggcttgttacaaataattggtataatttttagaaaatattaataggtgcttctaacatgaattcactatacatcaccccgtatcaattgtatctcactacttataatccgaatttttatatgatgatgtttattataattatttaaggttattttaatttggagaatatgacattcagaattacgtgacaggtaagagagatattgagtaagttgcataattttaaattgtttgggaatattttagttagttataacattaagataagggttataagataaggagaaaaatatatataattattttagttagttataatatatatttctaatgataaattgaatttataacaaaatatttgttttggtttatgggctaaattaatttatatacattttagaggttaaaacttcaaatctcaacttaattatttttgtagtttatttatttatttattttttaaaaaaagattgtcttaagatttgaacccttaccaacaaaacttatatgtagtgtcttaactattaaaactaaccattttattgttatttttttctactttaaattatatttaataataatatgaacatacaagtttgtatacatttttaacatattatatcgtgtagaaaataaagtatgttcgtcctaacttacgaacaaaaaaaagtttgccccctcaacttaaattcaaagtttaccagtgtatgatattacacagttaaaaatacttaaatagattgataggtaataactatgccaacaatatgtatcttcttttcagtagttcattatttgaaagttccaaagttaagtatgtta

SEQ ID NO: 28677 - DNA, 1042 bp, Cannabis sativa
cgaaattcactcgacaacaactacccttaccagaaccagcacttgacgtctgcttccatgaattccttcttacaatatttttctttcgtatttgatcttctacaccctcaacagctagggccaactcaactatctatgcataagtctgaacaaaccaaagctgtttggtagcaacaatcacatcttgtgtaatgtgtttatccaatccccgaagaaattttgcttttttatcagcctcaatagccacttcatctgaagcaaatttttccagtcgatcaaacttgatggcatacgctatcaccgtcatgctgcctcgagtcaatggtataaattcttttgctttgattgctcggataaactcattatgatatttttcgtagaacaatgcctggaaagcttcccatgtcatgttatttaagtcatgaccctgtgaaacaatctctcaccaaatgcgggcatcctcacacaacatgtaaatagcacatctaacccgatcattattctcgacaggcataaaatcaaaaatcgatgttatcatactcatccactactctgccttgagtggatcagcaccacccttgaacactggcagattatacttcctgaactgctcatacaatggttctagacgattccttgcatcctgtggcagtaccagaggttccggagcattagggtttggattttgagtaggctaaggccgctactccctcaactctcaaatccgctctccatgttgccaaatggtctcctgcattgcggcatataattcttcctagtttggtggtggtggaggattctcaccctaatctccaaccttgagcccagcaagctcgcggttacctctaccagaccgcctcgggtgcataatctatatgcttccggtcacatttacaagtaatgacaatactgataagtatttccatacatctcaaccttttcacacttttctaacagctaggatatttcagataaacgtgcaatcaggtaattaacaaataatctattaattaaaacatactaaaccatgagtcaaacgagt

SEQ ID NO: 28678 - DNA, 1827 bp, Cannabis sativa
  modified_base (836)..(843): a, c, t, g, unknown or other
ttcaacatattaaaaccctagcctaaatatataaatatattacaaatatatttatcccatttatgcttcctttcggtcatgcaacaacctacttatatagctttaaatttaaatagacaataaaaaggaaaacctattaatatatttaatttaataaaattataaataaataaaaaaagatagagattgtggtgaaatgataatattttggatagacttgttgttaaaacccatgtggggaaaatatattaatgaaaatatttgttgttgtagtgtcacttctaaagaagagatatataactgattttgtacatgtagactagagaatccaattagacaaaattaattttatatattatagaattaatattatatatttatataaattttaattagtttgtcatgtcatcatgtggaggtgtcccctagctatatgtatgtgtgtttaagctaaaaatgtatagttgtgggggatgagtgttgtgtatatatagccgtctaagtgtcctaatttgatcattattttaattattataattaattaataaataaaataacatttaatttttgtctcattgattgaccctaagtcccctctagtgatccaaacttatttcacgggacttctaattaggaaatttaaattattatttatttattgagacattctagactatatataatctaggcatagcatgaaaaagcttataataataatatgattaatatattaatattattgttaattaattaggtttaaaaattaacaaggggaaagtcacttcacatgacttaaagctaactccacccaaccttaattattattattattattnnnnnnnntattattattattaactttttttcatattaaaagaagtaggtagtgtcacttggaatacatggagaggctaatttgagtctcacacacactcacttcacattctttttaattattaattaattaaaaaattaaatattaataatgctttgaacatatccaaaaaaagggattttctacttgaaaactaagtcatattaaagggcttatctttattattattattatttgaaattattaatattatttattataatcctttttggatccttccaaaaagtaatggttcacaaaaacaaacaaaagatgattagaaagttaatggagttactaatatttgataggatcatgtctctctaataagattaattaattattttttattctataatgaatttatttattttttttggttaaatttcctttataagcacaacttggtgggccttattagcgatttgggcaatctttaaacgataatatcggcatcatttcaatcaacaaacaataacaaaagaaagaaaagcatgattaatgcttcttaaaagtgtttaatattagatggtggaatttggaaaccattacaacaagaagaaacccattgttaagtagacagttgtttgtaattaatcattaacaagattataacatttgattggccaatattttgtacttaatctctcaccatttttatagtatttttttttttgacaaaagaagaataaacttcattaaataatcaaatcgttcatcaatacagaaatgaactccgagggagcattgctcacactcaaactacgatcagcaatagaacaagtggatctcgctaaatagtgagctccattgtttgcagaccgtttaacaaactttaaaaaaacaaaataatctttcaattcatccaacaactttttgcatttagtaatacttctaccaaaataagaaaacatggtagaagagctacagatagattgaatagcaacaaggca

SEQ ID NO: 28679 - DNA, 4186 bp, Cannabis sativa
  modified_base (2485)..(2489): a, c, t, g, unknown or other
  modified_base (2900)..(2902): a, c, t, g, unknown or other
tctctctctctctctgttgtgtttgtctctctctttcttattcttgttctcgtgtttttctcttatgaaatgagattagtagtcctctttatataggtcaaatgacccaatatatttgctgtcacatttgacaattaagttaattaaagactaactaactaactgaatagttgttggaggtttaagaaataatattacaataatattagtcaaacattttttttttgatataattgaattatatatcaagtcacatgttttagagttaaaagaagaagttttaacattaaagtgcattagaaatgtttgactaaggttggactcaaagtattatgtcctttttttttaaataaagaataaggattgcaacttaataaaatagaaagatcgattaataactactacaaaatagagatatcaaaattgtgcgaaatgcaattgtgttttctatttgttttatatattattatattaaatggagtacggtgacaacatcaaatttgaatatagagataacacaacaaaaaattactcattaatcacaacaaagtaaaagtgatgtctaaaagaatgaaagagactatttaacttttattttttagttatgtatatttttgactcctcatttattagtttgacatattaattaatactttaaatattattattttgtaaataaaggtcaggctgacctatttgtacactttaacttctcatattatttaaagaaatttatatgaataaataataaggttaaaaattgatacaattttattacatggtgaaatggtggcgtttgacgagattgattggagggtcgaaacgacgccattcgatggtatgattaattgcaggcagtgaagtttgagaggggattcgatgggaaaggtggtggtgggtttaactgtaattgttgatgtcaatcgttattaatttgaatcttgtagttgtttttttgttcgattatcgtttgtgccaaccgtctctctatattgattagaattttttttcattgaaatgtattttgattttgcttcctatgtaatttgatttcatttttaattttagtacgctttttcatttctttgatttccaagaatagtttatcatttacacttgttttttactttagttacagttctttgaatttttgtttgtcttgatgtatttttctaaaattaaaggcattctattttcatgttatgatattttttagcattaaatgttctttttttttaaacaaagcattaaattttttttaattgaagcaaaaagggaaggaaaaaaagttgtagctttgttattatggttttgatttttacatttcaaaccaaaacttgataaggatatgaacgagtgatgaacatgaagatgagattcttttgtattgaattataatgtatggattttaggtctccctaaataagtttagactcgtttctttcatgttagttattagtaagttttgacttaggctctgttatgtaaattttttatgttgcgtaattattgagaacttttatttgataagttaatatttaaagggtgttagaaatattgtttgtgaactggttttggtttctgtatctaatggttggttttgttgttttgggttcgaagtttaaatttttgttttaattatttaggtaattgattttcgtcaattaattttaatgtatttgttttttgtaaccggtttcgttatattaaatctttgctcaattattttattgtaattgtttttttgtgttccaattaatcttttgattgttttagctaatttatgtatttgttttatttttttagttagttataatagtaaattggtttctgtggttaattattagttatgttattttacgtaattggattctaaatttcagcttttgatttagtttttcaagtaattggtttttatttggttgatttttgtcactgttttctttatgttaaattttgaaactttatgtaagaaaaaaaaaactatattatttcaagtaattggttatcatatgttagttcttaatttgtttattttatgaaactgatttctttattttagatttttaattagttgtttaatgtaattagtttttacaatttaattttatgcaactgatttttaattagatttttaaaagttttgttataattttgtatgagttctacaagttttgtcatggtttcacagattttgttattatattttttatgatttttcatatggtcgaaacaggtttaatgcgttttataggtttgaacttgtttcacagggtttacaggttcagaactggtttcacaggtttgatacttgtttcacaagttcaaaattggtttcataggttttaagtgttttgtcatggggcagctctattttatgatgttattatatattttttatattaagtttctttttttttataattattttgtttctaggttcaaaactggtttagattatatttgtaattagtatttttttttnnnnntgtatttttgtgtttgtgtgtgtgcttcttttttttatttggttgattgatgaaactagtttcagtcaactttgttgttcatcatttcaattttgttatgatttttatagggtccagaaactggtttcacaatgttcacatgtttgaaaccggtttcacagatttgaggattctgtaatagggttgctccatattatgatattagtgtatattttttattttaatagtttctttgtattattttgtttttaggtacgaaccagattttatgtatttttaattggtcatttaatatagttagtctctatgacttaattttatataaatttgttttaagaaaattatggtatgtcttattattttattgattatcataattgatttttttttaagtaacgagttttcataatnnnttttttattatttttcattactgagttttaagtttcagttttttcttttgattattcaaaaaaaattggttttgctttactaactagtttccctatgttagaattttaactaggtgataaacgaaactaatttttgacttcatattataataaactaacagataaaaattaatttcctgaaatcaccaaataaaattctgaaacttaaaactcaattatgaacaacaaaaaaaaactaattatgaaaactagttacttaaataaaaaaaaaaaacaaattatgaaaataataaaataatttgtgttagaaactggttatttaaaatgaaacaaaaacagtttttcaatagtatcatacaataataaaattggttttatacaaactaaaaaaccataaagcaaaatatatgtatatatataaaataataataagaaaaatttacggctatattccttctaaaacttcttattatcaccctaaaacagattacagaagaatacctaaagagtaaattacaattattcaacgttataacatattaaagacaaatgtgtgtatcgaaaaccagtttcataataacaaattcaaaaccagttttaatatatcgtacctataaaataaataaacaaactagttattaataaattaataagaatatcattaaaatcagttacacaaaatcatgaatgtaatatatgaaaacaaaatatacatataaaaaccaatttcacaagtataaaaggaatacaagttattgagatgatcttgttgtgagtttgtttaatcatgctactaggaaacaagttggtggttacataacagatgatgaaacgttgaaaagaaaagaaaagacaaaggataagcaaaaggataaggcaaaggcgaatgagaaaagatgaatgattaaatgtttataattagtttctttttgttggatatatgtttctctattgttaaaagaaaccagattcttttaattgtattttgaatttagtagataaatacaatgttatatatatagtttaaatagatatcttttgtaaagacatgatgttgaatgaatcaactttttattataagtcattacatttatgttgttacataaatttggtttccagttaactttttaagaatatttactttgtgttgatactagtttttacatcatattatttcattttattgaaagtatacttttttttttttttttttgacaaagtgattaaaatcactcatgaatttacgacgcccacgtccgccaccggcgctggaacctcctcgaa

SEQ ID NO: 28680 - DNA, 1438 bp, Cannabis sativa
tggcacagtgtggacagcctagggtgttgtacaacctaggctaggctaggcgtgtgagagaaagaaggagatagagaaagtctgacacttagagagtttgaggtttctagcttagaagcagcttaggcaacttaggttttcagctaaaggttaagtcattgatataggaagccttaaaccctaggtttataattcaaatcccttagaaatcacatagttagttagatatttacaaaagacaaaaatgcccttaattctaaatattattaacctattcagtttggcttttaggggcccaatttgtagctcatcttggttatccacgtacaagagtgtcctctgggacttgcagtgcaatcctaggccagccaggtctttgtgccggccagccatgctatccctgggctggctggccatggggctgactagggtgtgactggccagctcctgagagggagctagtccgtcacttgatccctgttttagtgccaaggtttttgttggctcggatgctgacttggccttctttttattgagttgtactaccacgcgacaaaagttctatccacgtaagcatgccatgtcatgaggataaaaattggcataacatttaccctccatgtccctgtgtggacgtatggataaggactttaccaacagtattgatgttgttgggactgttattacctttactgaataaaaagtgatgcgtttgttgaagcattttgtcttgactgtctaatctcattgcagttagagaaataacttatttatgtgcctttatgatgagttggtgaagtaaggagaaaaagggggcccacatgtactacataagtgagtttttggggggaaacccttttttcactttcattttttacttttactttctctcactagatttttgttcattaaaaatctcctccttctctctaagtggccgacccttgaagcttcattctccttgggattttagcattattttaacgatccaagcttcccatcctcatcctcatcttcatcaaaatcttgttttgggtaagcttttctattccttctctttcacttgatttgattgatttttccatgaatgcatgaacattatttcttattttgaacatgctttgattcttacgttagattgtagtccatttggtattttgatctgcatgatagcttaggataaacaatgtatgattttctagatgaaaaagaactaaatctcaccttctttgtgattcttggctctttaagtcatgaagaacacgaagaaaatatttgaattcttgaaaaatcacgtgttttaatccatgcacatgctagtcggccaaggaggctttgtttgaagcctggccagccatgggtggctttcatggggttttccccaccatgggactgtgtccttaggctggctagcctatacctggaactagggttcctg

SEQ ID NO: 28681 - DNA, 2526 bp, Cannabis sativa
tattacctggagtcggcaaataaggtcgctactaggcttcaccttgtggcgatttgcgtagaaattgagacgagcctcttcgatttgagctcgttcttcaggactccctgcctttggatcaaactcaaatgtttgtctccctaagaaattgttggtactaaacaagtatgcctctcctgctccacttccatacttgatcttccacatattcaaactactcctacgttaattcaaattaacctgtacgtaatattattgtaataaataaagcttcaacactacgtaacaccttatatatacatatattatacacatatatttatatatcaagaatatattttatacactcacaatacttaacttaatcttattcttcacctatatatacatattctcaaatattgtcaagggaaaaatatatatataaaagaaaagagaaacttaattaccgaaagagctagatcaaagaggttggaagaaacttagaattatatgtataggaggagaaagtttagaatatatatagagtaagtggtggcggtcaacacctacttaattattgtctccactagtttcatggtaatttcaactatatgatcctatatgcattgactatatatatattgctcagttcatttgattttaattccaatatttttttgagaactgtattacttaattagtaatatgtgtatactcgtagaaaatagagactttgaaaagtattatatataatatatgtaaatgtgtcactcattttatatatatttattaattttttttttcaacaaatatatttatcatattttgattggagatattactctaattctctcgaatagatgtatcaattttttggtgtacgcgttatacgcttgtcccagattaataagtctattttaattgtaattaagactggtatacatgaggccaaaaatagttaggtgtgtgttattagaaaattcttagaagatgaatcattttctaatagtagaagttatacaggacattgaaaattacaagagtttacttttttttttttatggtataaataaataacattataaggttataggtaggagcagatgtacattaaaacttatagtggcaatggatcccctagctttgtacaagtgaaatataagtcttatataataataattaacaatcaatattaaataaagaaaactaagttaaaaagtcaatggaactgtagtaaaattaataggaataaattaatttaattgctaactgtgcatttcaaaaagataaaaataatattttaatatatataatgaaatacaatttttttttatactaataaaatattaattacatttcaaaaagacaatatatatatataatattagttaaatgaatgtgtgtaagtgtggttttatataaattaacataataaattaaagatacctcaaaatatgtatgatatttttaattaaatgattcatatatattaatctcgatttataatatttataaaaattttaaattaaatttaggagaataatatattagatcaccaataaatataattaacaccatctagaaataaaaatattggtcactaaaattcataaatatgaagttttatttttgcatgtgtcgttggttattggcccccttgatatttaatcctggctccgcccttagttataggtttttattttttttttacattaatatgagattttttatgccatatttttataaaaaagataaaaattctatatttgtaaaataataataagttttgccagaaaagttaccggcgctagaaaagttgccggtaccaaaaaagttaccgtcgccaataaaagtcactggaaaagtcaccagaagtaggtctgaaatataaacaaaaatagtaccggttctataacataataaataaaaacaaataacacaaaataacttaaaccggttataattgaaatataactggttctgtaacataatgaataaaaacaaataacacaaaataatcaaaccagttataattaaaatagaactagttctataataatgttatgataaataaaaacaaataacactaaataactcaaatcggtataactaaaatagagccggttgtataacataatgaatgagtatttttgggataaatatagtatatgtaattatttgatgggttaaagcatattgaatggatgtttttgtttgagttattttatttaattagtttttgtgtgtgattttttttatatcttagttgttttacggaaccaatttttttatctcaaatttttaactagttgataaatatagggcattttacagaaatactggatttggggtaatacttttcaattttactggaacacatcagaaattatatttatactgtcctcccccttttttttcttttatactgtaaataccaaaaaaaaaaagtatgaggcttccatctttcacaaccacagaagaaccaccacagcaacatcaggacaaccagaaaataaccattaattccaacaagattgagcaaaa

SEQ ID NO: 28682 - DNA, 2848 bp, Cannabis sativa
  modified_base (2200)..(2208): a, c, t, g, unknown or other
ttgttattaaaatattgaaaggtaattacataaataatttacaaaatacatattatgaggtaattttctctaaaatatatggtttgttaagaattttcttgaacttttacatatgcataaatttagtttttctggtaggtttcgtcccattattttatttcaatgctgaagtgtccttgtaaattagtaactttgcctcctaaacttcgacaactatcaaatcgtaccccctcagaataaaaatgataaatattcaatatttttttagtaaatctcaaaaaattaatgtagatcttaagaaaaaattaaaagaaaaataaaaaatattaaattaagcgatttaaaaaattatttatttttattaaaaagttcatttagatatttaaaaaaaatattcaaattcaatttttatcaaaactaaattttacgggaataaacttgagtatattttatttttctcaaaaaatgtagatttgtttaagtaacataatattttttatatttaatttataactttttttcaaaataatttatatttttaatgaatttttaattattttgctttatttgttaagataggagtttataaatataaataagtttgattttttcttcaaagaatcttagtttatttaaattatttattagattctcaataattttggtttaattttttaagatacgtatttataaataaaataaagtttaaaaatattttttaggaataatttaattttttttaagtaaaattaatatttttattaggttttttttaataatttttattatttttttgaaattaagagaatattataattgcttaaaaaaaataaaattttataattttgaaaattgtttttttaataaaagggggcaaaattatatattagtcaaagtttagggggtaaaaatgctaatttttaacagtatagataacggaatctaacagaaggtgtaactgttatattttagagagaatttttatcaagccgtatattttaaggagcaaaatttagtaatgtcgaaagtttaggcagaaaaaatgctaattattctaattttatctttgaaggttaaccactggcattaccttctgttttattttcttttaagaaaatagaaacgttaaaaaaattattaaactaacaattgtcgttatatagccaatgtataaaaatcacgactaggtattagtaacatacaatgcaagtttgctaaaagttaaattagaattgttattagtactcaattattaatttaaataataataataaaatattttttaaatatataaattttaatttagtttttaatttatttatataaaatatatatctaactaattttattaaacaataaaaataagtttagatattttccacaatatgattaataagtttattataaagtatgattaattaattaattaaattaacgtctaattctaatttaagttaagatatattttaaaaaataattatttaatttattgatatttttaaattaaattttatatgaattttttttaaaaaaaaaaatcataataattaagtgattgatttaactagtaattttagcaattaattataaataaaaaaaatcattaaaccaataatttttattaaatagctatatttaatataagagagatataaaccttcgccattaaggtacaaacaaattgcaacagttaaatgaaaatcaaaacagtatttatatgtcaattgttggaatagaaacaatagtataatgcatcggattcgattagaactccgcaattaagcgtgcttgggcgagagtaggatgggtgacttcaaaatcctcatgttgcatccctaaatttttaacaaatattgacaactagttaggtattgtgtatgacacatgcattacacaatagtataagttcgagtcctacaacactctttattagctcttctcttccatggcgaaaaagaagaaagtgatacggaactattcaatcaagctgaatctaacagatcccccttcaatccaaaccaataatttctcttacgaccaaaaataacattatatattgcctttaatttcccaacgtagaatttaagaccattaatgatatagaaatagaaaaagaaaaaatgaaaaagaaaggttggggtgaagagactttaagcacattccaaaagccaaggacctttataaatatatatatatatannnnnnnnnatatatataatatatatatattatgtaaaagtattttgttcgtggccatttttatagtagtgcatgataattattaagagttcacatgtttttggaaaaacagcatcgaaaagccaatggtagattcttgatcttctgctaaagtatatatttatgatcaacatttttttgtcttcgtttccaacattgatgacgaagattctaaactgagggtcctaatgaaatatagatacttattggtagagaaataatatattataggcatttttttcatcatttaaacatgtacatgtatatgtatatatatgtacgtatacatcagcaaatcactctataaaaatatatatacatcatcatcaaattaattacatgcactagctatatattgtttaaatttatttggctcttgagatttctaaggaccaaaaactaatttaggcagtgagttagaagattgaattgttcgtttgattcctataagtaattatatgttgggacttttcaaatcaaaacaattttcggtttaagtcaatatatgggaataaagggttcggtttattatcatcaaatgttatcccactatattcccattattctacttttattgttattattctttttgggtgaaccagaaagatta

SEQ ID NO: 28683 - DNA, 2244 bp, Cannabis sativa
  modified_base (1708)..(1740): a, c, t, g, unknown or other
tattaagtaggtgcgtgtaagcgcaggaattcactatggtgatccactcggagattgtgttgaagactcagagacggtgaagcttctttattgcagcccttaagaattgatcatgatcaaagaattgtctgacaacaaacctccatccaccctctcactttacaagaaagaaaacagaaaagcaataacaaatatagatgtgcaagttttgtgaatctgacatagtgcccaaagtatggtttttgtgtgtatcttctttataccatgtacaggttttcttcttcctcctactccagttcctaatgtaaattagagagtttcaactccaatgacaccaaaagccattgtgtacagtatagaaatgcttttggtgtcacgattttggaaatactatgtgttagttttgtagggtgagtataaattatgtgattttagtgaaagccagaaagtgttggcgaccgattgaaatgtattttaaatcgtgtccttgtaatacaaagtattatggtgcttgggaatatgttggtaatatgatgtactttactttatataaatatatatatatgtatttgtttttttttctttttttttttctgaattttctataaatttagacatgcagataggagattaatatatattgttctataaatatggaagaatctttttttaattatggttttattgtttagtgtattctatatattgttcatagttttcattttttttttttaattccttcatagaaaatagggaaaataataaacactctacgcgatcaaacaccaattttgctatcattcaatggaagaatgcaccaagtttgcctagagaacatacgaaggaaaaaattttccaaatatttttatacaggattatgtattatgtaaaagcaaaatatgaattacacaaataatcaaattacaaaagttcaaaaatgtaaagtcatttttgctctccaaattttgacaagtacatactctttgaacttttcagtttgaactattgagattgttgaatttaacaatttttatctaatttcatctaataatacaaggaaaatttttaacggccttaagaattaggggatatgacttacttgtaaaagttcgagacaaaaattctaattggccaaatgtaaataatcttatcaatgtttttatataaaactagatataattttacagggaaaattatatatctaactttttatcctttggcatcagctgttttgaatctataattagaatgttaattatagcaaatgattctaaatcatagtactatgtaagtaaatgtcctcaatttaacacttgtagagaaatgaccattttatactatttattatttatattattttttgacacaacaaaattaataattttttttttatatatattttagaattagaaacaaattacttaaagattatggtatatttatattagttttgtaaaaatattttttactttaaagttttgtcgatttttctaatttttatgagttgttgtgggttgttgatatatagattttattgtattttgttgtgtaatatattattattcttagatgatatttattttatactttgctatgtataatagtggtataattttgttagcacaataaaaaaattttaaatggatgtatataattttattggcatactacatatatttaattatatttttatatattttaattgtannnnnnnnnnnnnnnnnnnnnnnnnnnnnnnnnagtttctattttattatatacaacagtggtatataattttgttgccatggtatttatattttaattgtggtatataattttattagtatagtatatatatatatatattagtaatatatattttgttattatcattattgttagtaaatatgttttggtaaatgatatatgtattttttgttatacggtatatcttttttaaaataatatttaagttctattttctagtgtacttttgttgacatgatataattttattagcatgctatatatttttatttttatttaatgttattatatatatgtctactgtaagatatatattttttgttatattgtatataaattttattgtatagtatattattttattttagatcatgtttagtttttgttttattgtatataaaggtgatatataattttgtaagtatgatataattattttatagctgtatataattttttttaaatggtatatataattttttttaataatattat

SEQ ID NO: 28684 - DNA, 4029 bp, Cannabis sativa
tctttattaataagtaaatatgattatattgaaatgggctttatttagggcacaaaacccaacatgatcttcatcccatacctttggaaaaccgagaaggcttcctcgaggtctgtactgtgctattcaaatgtcttagattttaccaacatgtcatcaacataaacctccatatttcttcccaactggttcttgaacatcttataaaccaatcgctgataggttgctcttaaattcttcaggctaaatggcattaacttatagcagtacaaacctttatccatttagaagttggtttgttcttcatcaactatgtgcaatttaatctaattatatccgaaataagcacccatgaagctgagcaacttgtatccggaggctgcatccaccatctagtttattcgcagaagaggaaagcagtctttgggataggccttgttagggtccatgtattcaatgcacatcctccatgtgccattgggcatagggaccaaaactagattagccagctaaataggatacaaggcttcccagaggaagttattgtggttagcttgtctacttccgcttttactgttttacccttaccaaatctcagggtctctacttctggaaaactggtgtagcatcttcattgatgttcaaagcatggaagatgttattacgattgatccctgtcatgtcagaatgactccatgctaggacatcttgatatcttttaacagtacttataatgctttctttcaccattggacgtagatttcttcaaaccttgatggttttggtgggaactacatcgcaaatgttgacctcttccacatcctccataggtttgataattattttagttcccacatgggggtctaattcatcttcatagtcctcccagacggcttcaacttccgcttgaatctccattttgtaagcaataagtgcctcttcccagaccataaacacaatttgaatggagacattataacaaattctcacactcttctggtcacctcttactccaacgcattcattgtcacaggaaaacttcatacatagatgccttatggaagttactgctccaaaatctaccaagactggatgtcctagtattgcgttgtatgtcgtcggataatccaccaccacaaaagtgaaacacttgaaggcacaaacattttttctcctttaaggatgatagggagtttgatctttgccattggcatcaaagagtctccattgaagccttgcagcttgatgggacaaagtgacaagtctacctctatgagcacagttgcctaaaatgaaaatttgtgtagaatgttcactaagcttccattatccaccaggactctagaaactcccttgttggctatttgggcttcaatgaacaaggggttattatgggtaaagtgcacatgttgggcatcctcttctgtgaaagtaataggcaaattcattgttcaagaatgttgggctggtgattgcccaacgacacatgtttccccttctctatctaactccattaaatacctctactgggactttttggtgcttccctcaaggtgtggtcctccagagatcatacccatgtgtccatcaatcggtggcatagctaaatttgagggatatgggtttcatgatctcggagccactatggttactacatctagagctggtgaagaaaggagtggtggaaattgtactctggaagcgtgaagatgacctacccctttcaaaggatttttggtaccctaatgtcctggaataaccaattgtctatgagagaccccatgtccaagatatatgatgagaatccaaatccattgccccaaatttcccgctttgaccagcatctcaatttcatcttttaggtggttacattcattggtggagtgtcctacttctacatgatactcgcagctcttacttggatctcttttgaatttcccccttgaggcgtctataggggctttctatagtaaaccatgttgcaggttgctcaatacacattctctcaagtatccactagaatggagtactttgtgtatcttggttcagtctttcttggcttttttgaagtctcactttatcccaggcccttttctcctctcttgttttgggactaacttacatcctgttatgtaacgcctactttcaactacccaggagcgatattgcatccaatttgtaccgctccatacctagagaaatgggtttccatgggtgcttgtatggatgcagatggttcgtagattgtcagggtatactatgttatagtaacaagaatcggtgagatgaattcaggagtggaagcagcaagagttggtgtcggagggactacaaatgcttgttgataagcctcttccaaactaataaagccttgtgccttaagcatgaacttagacaacgttttgaccctccttctttgcatctctccccataggaaagagccaattacaagtctagactgtagggtcacaagtttcatgacatcggtgaccttagtcttagttgttactttcatcattcgctaattaaaactcttcaagttttctcctgcctgttgcttgatgttcgtaatggaccccatctccatgtcgtagtcacgggcagtagtaaattgtttcctgaaggcagattgcaactccttctaggaatgaattgatcaaggagaagcataaacatttggcgtcctcactgactctttccacttgcatcatcttgttgtacttggctaaaggagttttaggatcagtgtgcccatcatacaactcaatttgtggcattttttaagctctccaagagtggagcttctgtgatccttctaacgcatggctccaagtcttcatccttagagtcggtgaaggtcccaatttgttcacggagcaattttgtcaatttaattatctgttcttccaaccttttggtgtcactaactaggagatctcttccacaaaatttgtcgttcaagtggtttctatggtcattaccacatgcctatgccttcttgccttttactttcttgtacttggcatctagatgccatctatgatccaccatggacaaactgtcatcacattactgtccccctgtccgaccgccctggtttacttaatcactagggtagtttttccttcccttaggctttggtatttttgtaccagtctcttttggtgctacagagcctttatgggctgaagggcatttgagctcggaggcgtgggtcaccttctctgcctaagaaggcctgttggttagattcttgtttttctaaggaggtacaagagcatgtgggtccttagggtcacttaccttttccttccccttgtcttgtagaggacaagaagtttcagcattggtagggttttccctagtgtttcctctaatgcactccaccgaggggtcatcataagaatccccctcttttagatctccaaacttagctcaaaagtgggctatcattttcttcatctttcgcgaaaacttgtcttgataggctagcatttgtttggtctcgagcaactcattagacatttgaactacttcggagtcttacccataatggtagttgtctttgtacccatctttgacgttatctccaccatcttcctcctcttaatcattctcagcacccctctcatcatcgatgtggtcatactggttgtttagttcatcctctcgattattcacgttggatgtatccccacctctcgcatcgatcgggtgtgtgtgctctggcgagagggggttaatttcctccatgacgatctcgaggaagccttgaagagtcttaggaactaccaatattcgtatgaaaaccatggcaaaagtaacatcgtaagctttatgtctttcttcagctctcaatagaagcaccaaaatatttatcagaaactaaatatatgagaactaaataaataataaaatgcagttataaagagatggagattttttgcatggttcgggtgttaattaaccttagtccacaatctttcgtgtgaaaaccatggcaatagtaacaccgtaagcattatgtct

SEQ ID NO: 28685 - DNA, 963 bp, Cannabis sativa
tatcaaccgtggactctttaaattttcaataaaattttttaaaaaattaagttatggattttgctaactattataccactatctgacgacaaccttaccctattgggtatctcaacaacaataaaacctggaaaaaatttaacaccattaggcacacaatcgtaccccatcgtatcttattgggtaacacaaataataaaaattggaaaattgttatgatcctattgggtacacactcttaccccattgtaccctattgggaaacacattgaacattaaaaatggatacttcttttaatgatttgggcaaactatcaaattgtatcataccactatcaggtactcatcttcaacctcaaactctaattattaacattggactatcgagcatctatataacctatatcgtactctatcgggaaaagcaggaaaataaaagaaaaaattatagatttaacgattgtttatcgagattttcaaaaactactaaatccaagcttaagaaaggaataaaacagtaaataatagacaattgatttttacgtggttcgtgcgttaatgatccctagtccacgagttagttgtattggccctttaggcaagtgtttgaataatacaagtgtttataatataaaccctacctttgcactcctttcgtttcccttgatcaagaagaaagctagtaggaattttagcagatgttcgactagtacaaattttctcaccccctttgcacatgaaaaatgagggtatttaaagacttaaatgtgggcaagggcattccctttacccacttagggcttcgtactcaacatgctgcaagggctatcactacaacgtgacgatctgaccgttgattggtaggaagcttccccatcgtgtggtgtacgactgtagtgaaggatttcgtatggacggggacacacgtcactcaaaggtttcaccttgaaaagttgttgccta

SEQ ID NO: 28686 - DNA, 2961 bp, Cannabis sativa
agggtcaattttgtcatttaacaaaatacagagtccgattggtaatttttgcaaaacagagggtccaaaatagtatttaccctaaataaaaactcacacgtgaatttctcatatatttatatatatgagtactgttgaaagtctaataagaatttcttatcattttggtgaatagtactagtaatagtagcaaaataaagctaaaccaactatattgatattagaatgataaaagaacaaatttatttggtatttaagaggctcagttctctcccaagaactaaacctaaagctcacttaaccaaatgatttcctcgtcaaccctttccgtacattgttttatatactacctcaataccacagatccatttacctttattatttaatactttaaggactaacaatttgaagatgtatgaaagatttgtaagaaataagaaaaaactttgaaaaaggaaaagaaaagaatttggaagagaaagattagtttctacattgatttagccaaaaaaaaatgacatatataagcttaacaagctgtgtttgctgtctcaaactaacaaaaaaccatcctaacaatcatatagttgtctcaagtttaggtaaagtcattttttagcaaattaattgttaaaatattatttaatttaatttgtttatttaaagaaaattaaatattgatattattgtgtcaatttgtgattataactcatttgaatttattatgttttacataaaagagaatgaattttctttatgaaagttatttaatatagtttatatttggttataattgactggaatcaatccttgattaatatcttcggtgttgacttcgtttttagtcaacgacgcggaatcaatattaaaataataatttaagtatttgagattataaaaaactgtaaacgacacacaaaatttatagaagtttaaccccttttagcgataatagtctactctcttttttgttgtattacttttacgaaagtatataaagatcacaaggtctgcccaggtgagtgtctcaatgaaaataggaaagtatctctaaagatattttagcgaattccagtcggccattcacgcttagtggctcacatcgctgagcgcgaggtgaggtcttgagcccatccaaaggttttggtattagctagcctggtcaatacaaattggtgcccagggacattctcccttccacgtgttagcctgctagatgccatgtcatcagtgaaaattttgggataacgtttgtcccctaagtttgcgtggaaacttatagttgtacgggggctttctatgcctcacgtgttgcacaactaggtgcacgtgtttatgcccacgtacttgcactgatatgtcatcagtcttgcttgaagcgtgtgaatccttccttgtctcttcaaatctctgcagtctgcattaattgtgttgccttagaaactgcatcttagggatcgtgcacttacagttactcaaacttgcaaatattcccgctaaacttcaataaaattcttcggatctgcctccacgaaaacccccaacatagttccctattgctttaagcattatgtcaaacataaagcctgggacaaaaccccatgaatctgcacccacatgtacaatctgtttacggaaattatctccttcattaagtcgttccaatatttgttgttggttacatgttcacgggctatccttaataacccgttgaatatccatctcatggaagaattggaacaagaacaggttactcttaagttgcttcacatacatactcattcttggtttccataaagaagctaattgactctgaacaaattccaaatccatcaacttgccagacaaaaactttctcactaaacaccaccgcgcattgaaactatagtttatttcaatttcctcccccacctcgtagcatccttgtacttcctcttccaacgttagtttaacacaacattcttcaagactctgaaccaatgagttatactggatgtcgtataaaagaatacagaactacaattcttcgcagaaaaatatcaaaactatgtcattagacaaaacttataaagtgcttcactcctttggtcacacgaaaccacgccactgactttttcttttctttagtacacaacacaaaacacatttgttaactttaagtttaagatacacatgaaaagataacaaacaattttttttgttataaaataaaatataattaatactaagttgattcattttaattcttccatgtttgaaatattaaaaattattaatatatatataatttggtcaaaacatatatatttttatatcttgaaataaataaataaagtaaccatattatttcttttccctatccaaaataatggtcggttgcctaataaacttgagtttgatcaagatatatagcaaatagctataatatatattcttgatccaaaaagacaaagtaattagctataaatatcgatcgatgtatcattcaacaatattaaagctaattttctttcaatcattacttattgtatttaattttatggaccaaaacaaattattattatgaagatgcaatgtaatgttgagaacagtagccgttagattaatttctttttcttttcttctttttcctttttcgttaatatatactttacctgaaacagtggaccaagattacatatatatataaagattatatataatctgtacttataataaggatttttaggtggcctaatcatggtatatagttgaaacctgggtttgttttctcatccaaatttttcttctttatcgaaagaataatatttatatatctattctatataaagtgtgtctacaaaaagcaacttaaagcattataataattatgctgctttgtacatgctgcgacaaaaaggaatgtcaatcttattaatttctccatgttctagctattaatgcaaactagaaaaagaaaaa

SEQ ID NO: 28687 - DNA, 5781 bp, Cannabis sativa
tgtcctccaacacccttcacttaattacactactcaattcccgagtaaagtatatcagtctgtcttgtaaactaattttggacccgataactttagaattaagccatgattacggggcacacttagatccatatcgaaatcatctttccaatgcaagttgaaacaagtcatttggataaaaattgagagagttatacccgtgttactaagggtagtttgtgttgttttgtctcgagcactaacatggccaaatggtcagtgctcgaccatgcatgttcttggacccatcggggtgtgttttcacttattttttgatggtgagtcatattttgggggtctcgggacctcaaaacctcatttcaatacccaaaaccctaacgggggaccactaccaccagttggggctagaatagtggtagtggtcggccatggcttatgggaaaccatgaatggtttttcttgcttatttcagttatatggatgctagaaaaccattttggtccattagttcttggccaatttcttaggagagcactgccaccatttttgccaaaaagtggcagtggttgcataaggggtttatgaagccttgtgtaacttttctcacttgtatttgatacatggatgttggaaatacaatttggccaatgaatactcctcctcctatgtggtggccgaccactgccaccaattgtcccaaaagtctgaccgtggtcagccaagtggtttccacaccacttggtggcttctttcacttggttttgacatattattagtgaaaatgtatttttggctagaagtctcattcccctcttcatggccgaccaccgccactcattgtgccacaaagatggcagtggtcggctaggcttgtttcttggtagaaaatggtttcttttacttgtgttgcactcattggtgtcgagggaacacatttgaacaatttccccttagtgctttgtatgtggcgactactgccattctcttgtggcagtgctctccaaaaattagagagcattgatatttccatatggcagtgggcgcataggttttattccatggaggtttcatgccactttgactttatgcacaaatttaagccatttcatgcctaaatgagtcaagtccttattcgtttccctggtgattagggtctctagggtgaaaacgctcgtgcgagcccatatgaatcctagtttgggcatacttgggtgtgtgagtcctagtaccaaatggttggttaatattttcgagtcttgtaaaggtggcatggagccatcaagaaggatgtcttaactcatttgacatttataagtcttggtcaaagtcacaaggttgatttttttttttcaaaaattgggtagaagagttaatatttaggctagcatgaatggatatgtgtaagtggtattttgataaataaaagttcattaaaaataaaattgttgctcacactttatgaccctatctttaaaaatgaagtgtcaatttatattttttatatataaagataatatgattgagaaattatattttaaattattttatatggttgtacttgttataattatatttatttttttaaaaaaattttaatggtatggtgttgaaattaatatttaagtaatcaattagacatgtgtcaattttctgttatttcactgataaatctaaatataaacacaggtgaaaataaatgaattgaaaagaaaagaaactaatacgaataactcaaaataacaccattacccataaatatatacaataattaaatataaagttgcaaaatcaaacccaatgataaaaatatatataaaaaagtaatctttcaataatcatatcttctttccaataatgattcaacacataaatgaaataaaaataaaaaaaatagctataaatatatccattaaaacttattccatactatcttggatccctttagaaaagcaaaagttaaaataaacttaaaaaaataataaataaataaataaaaaaaagttggtaagaaagaagagagaaacaataaagtccacaacttgattctaataagtataagaaataaaaaacaattgtgagagaaagaggccaatatttatataatttataaaaataagtatgacaacctgttagccaaattataaatttgacatatggccctacttgtatttaattacatagaatctagcatcaactctctcataatttccatcaaccagagataggattatatttagtaccacacatcacaccaacacatatgtaacacatttaacaaaataccaaaaaaaaaaaaaaaatgaaagtaaccaacctatttattcacaaataatatcatcattatattattatgcttattattttattaaaacaagtaacataatatattgtgtggtggtaactggtaacatgttataataatttaaattaaatggtacaactcaatgacataaaaagttgagagttgtttgtgtatcttttactaatttacaaacagtacaataatataggacactattcatagtgagtaattatagaatgaaatagagttatatgatctgttttggacagagtaaatagtttgttttgaagagagagagagagagtgagagaggaagatatttgagaaaaccaatgggagaagctttagattagctttttgcagtcgaaactgtcgcagcatgtctgactagtccaccttaaatcagaaatctaagtcgagagaaagagagagaaagaaacaagggaatcccaaagaaagactcttttgtacatacacataatatatatatatatagagagagagagagtgtgagaaagagacagaaaggtaataaaaatgaacagagaagagaatagatgatgatgtgggtgggttgaagcctcgagtgagaccacgcgcaccattgcgtgcatttctacacttttttttttctctttctctctctctctttcactcactctctctccatatccttctctctttcttcatcttcttctgatatttttttttctctcttttctccaaaaacccatttgggtatggaacctttcgattcttattacgttctccttctttccttatccctctctttctcatgataattatgtaaaagtccatactttattggagaaaactagaagaagaagatgttagtctctcatcaggtaaacacatatcctctctctctttctctctgcatttgagattatatatatatttatcaatacatgggatttctatatattttccttaaatgggatttcttttccttttgatcttatattagaattataggctgttaagacgtaaagttcttattttttatcgccaagttcatcgatctcttttcttttattcttattatatatatatatatttaaaatatttcagctttattatcaaccagtagcctttttcttttctttattaggcattaattatatataaatgaacatgatagtaatagcaatatttcctttggcagtatatatgtattatgaaataatccttcttgggcagaagtttaaattgtgactcaaatgaggagattgatttttagcaatctagtattattatgattattattggagatttttaatatttttccattgggtacttttctaaactgagttaaattctcatttctagatttaatttgttcgtgctttataaaattgtgttctgtgacctcaaaattgattggagttactttattattcattaataatttgttttataagatcaaatgtaaatgtttgcaaagtgaaagtggtgataacataacttatatacacaaatgaattttaggaaaatactatgaaacatgtggaatgttgatgtttctggtctgagattgtagcttataaagacatttttgtttcaggtttattaacaaaaggacctttcctatatagtttggtagtgtattagcattgcttgaagagagaaagagagagatgtgctgatgtaccaaatgaagatttgagtgggaatattttccaagagctggtgtgctgcttaaacacaaaagctcttgttcagttttcttttccagaaaaggatgttgtttcaacgagattttgatctgaattcggttgacatgtgtactgattcgcctcgtgtgtatactgattcactagtagaagttttcagggaaactatgctcaagcaggaaattgtatttcgaaaccaggtatgaacagaacaacactctttatttggtctctaatttttgcaattcacaatgtgtgtatctaaggaggatgcctaagcccaaactactgatatgtcctcaggttcatgaactccatcgcatttatgggatgcaaaagacactgatgcaacctcttggtgaccatggacttcttcagtccaagcaatacataagtactgttggtaagtaagatcatcacctaaaatgtagaactatactgatcacttgcgaaaatcaatttggcttatgtattattctctttgtcacggtaatattacaggttcagaggatttgaagctttccctgagggtcgaagaagatatcaggagacataaaagtggcaagaacacttggtttgatgtcaatgtacatccatactctgagaattttattgatttagaagaatcgagtgcaacaacatcgaatgaggattcaggaaatgtacttcctaacggtgttaccatgactgatctaatcatcacaagtagtctgaagaaagatcaatcaaatgagactgtagagaatagtacatttctagatgaccctgaaaggagctgttttgatcaaggtatataatcgtttttacataacgaaactagctgtagtgtatgcataatatcgataccattttgaaattctgagacactagttttggcgcatctttaaacctgcttgttgatcctttatgcagatttgaacagaaaaccatcaaccaagatggagcaaataagtacacatgggaaatgggaagtggacctcaacaaaatctgttgtgatgatgatgactcttgtaactcttcaaatgatcccatgctgactgctaatccttcaacagctagctcatcacttactctcgtagtagcggtagaggagggcaattctagttctaaagcttgtcctaaagaatgtaacaattgctctgatgaaacttctggaattactcatcctgatgattctggaaattttgcattggtggatttaaatagcagtagtgaaagaacagagatgtgtgctaaacataccaaatttcatgagttgagtggcagtgaagtgatccgtggtccttgtgaagagttagagcttgactgcaacaagaatgattctcatgatgtaaatataaatgatatgttggagaactcaaagagccaaactcatacatgtatagctaccttagcagtgaaccatgaaaaggggaaatcagaaagtgatttatttacttattcagatcatagtaaggatgtgatccgagatgcacatggaaatttgtcctcaccaccatgcataccttgcctctttggcgataatgaatccagtaatgcagagactatgcaatccgaaattgaggttttgaatcccttaccaactgataggctttcgggaaacaagaacccaaggccttctgacagcagtgaactcactcatgagtgcctcctcagcaaagaagaatcagatgaagttgatgtttccatccaaatggcagctgagtcactcatccacttctcattggagagctcagctgtttatcaagattgttctgtgaaagatgcatcatcaattgacatag

SEQ ID NO: 28688 - DNA, 1253 bp, Cannabis sativa
  modified_base (1185)..(1186): a, c, t, g, unknown or other
gattagcatttgcttagaaaaaataattatgacattcaattaaagtaatttattcctggaaaaatttgggatgataagaatgacttcttgctgtgagggctaacaaatctttcccaaaaatattgcttcttgggatcatttttatgttttcacaatagtataaggatgttaatactgtgttttttagtcacctaatgtgtcaacttaatcttaatgaaatgatgtgtttttcttttcttttttttttttttttttaaaatagttgaaaaaattaaaccatgaaataagtgagtttgaaataaataaattgataaaattattacctaagtcataaaacataaaattgattaagtaaaatccttatacaattatattagctacatgtaaaccaagtggcaagtaaaatctatggtggattgttattgtgttttcgatattttaatagtacataacgtagttatttaagatattttgtaaatttttaaaaaatttataaaaatttgatgcaccgaaaataaaatttaataatagtttattgcacgcatgaaatagactatttaaaacttactttttatattacaaattttgctaaattttttaaaattttacagaatatttaagtaattatagtatactatatataaatttgacacacatttaatgtgacaaagtaattccaactaatttttatttaagtgtgcgttaaatttgtgtgtaatttatgtgtgccatgttagacactttgatactttattgacaaaaatcttcatacaataatatactctatattaaaataatgtctctgatcatatatttatgaaatattttgccgaacttagaactaattttaaatagtacgtagtaaattctacattctacattattaaattttaatttcaaattaattataataagtgaggtttattttaaattcaactactcaccataacgataataattaataagattaattaagatttttgtttcttgaatttgacatgtatcgaatcatgtctcctgaatttttcaagtcattaaaaataaaattttgaactattgagattgttggaattaagtatttttatctaatttcattcaatttcgctaatgtgacgagcgattgtccatatactaagttgtgctccctgaactttgatatatctatatgtgacagtcagtagtccnntgatccgtaaggggaaatacgggtaagctgtacaatctcacactgcttggggaaggtcaagtgggat

SEQ ID NO: 28689 - DNA, 2852 bp, Cannabis sativa
cctctccactaatgtagtctagctttacactcaagatcaaaaggactttattaggcttgtaatgtgaggcttaaattagggtaggataaacgttattatttctatggcttggaacctaacctcctcaatttatcaatggcctttctttctctctcaagctctcacccaaaatgcagttttaacccacaatgaatgatttgattcaactttaattctcttgctattgttactttccaactaacatataaacagagagagttaatacaaattaattttgaaaaggggtgatacaccttaaacttagtttcaagaaactcgctctcattgataatatatttgtttttttttttttttggtactatatatatagtttctttttcatttttttttttttttttgctaaaatctgaccgatatagtaaatgcatgtgtgtgtatatatatatatagcaagagaattatgtacacaatcttgtgagctcattcccacatactccaacttaaatcccaccattgtccccaatgttgttacacaaataacactaggaagagctcaccacaatattaccaagaggaatccactcatctaacaactcgcatctaatttgttcttgataaatttcaaagggtaagtttagttattgaaggataaaagaactcatgggcaaggactacaatcattgatggttgttaagaacatataggcaaatcagctcaaataagggtgactaagggaagttacgattcaacgggatagctcaaaaggctcaatcgtctaaaatggtctatatcatttctaagatgtaatgctagctaggatttttacttaaggaccacactaaacaattctactcgcaaaaactttctcaaagtgtcgttattctagaaaactcaaagcaaagtaggatattataagcacacacctacttagagaatcactactagcaagacatttagatatcaagaacacttaaaacaagcacataagacacaaagagatcaggcacatcacaaatagagggaaacacaacaatttccatcatcgagcgacatgttaaacaagactaaacaaacagaatcctctcaaaacaacagtgaacacacaataatagcaacaatactaattcagacaacaacaagatacagaacaatgaataaaaaaaaacaaaaaactaattaaaataaactaaaaataaaatgtcaaggcaagaaaaacccctcgagttactaagactcttcgctaggagagtcctcgtcctcctcaacagtgttactccaaacaaactagagaggagctcgaaatgatcaagaatggtggttggtgaaggtgaaagataagcgtgaggctcagggaagaagatgaaaatggtggatatgggggttaaggtgaagaagatggtgcggctaggtgtttcctggaaagggaaattgaaatgaaaagttgatagattagtgaaagggttttagggttaaagatttaggggtaatttagttaaataagtaaacatttatttcaacatttttttcgaaacccccagattagtgagaatagattttaaaaaccccccaaaaattctaacttcacatgctcccaggggctagagcattgcttagcatagcattttcttttgtgtccctacttcaaaatgctgaaataatgctaaaactttgttgtaaatcctggaaccaccttcttctaaaaataaaattctacttttcaccatatttaactaatttccatttttttgcaattttttgttttgtacgtgcaatgaatcaccataaccattgcaaagtcattagtaacaatggagaacaaaacaaaacaaaacatctcgattagtaacattgtatttctttttgttccccattgttattaatgactttgcaatggttatggtgattcactggtatacaatgtgaaaaaatgcctcagtcgtgttccccctatattttctttttgaattttctcttccgagaaacccttttcttctttggagttaaatcaaaatttggcttttaaatctttcattaggaatcgagaatctcttgccagaaactttgaaggttttctttggttttttggagggaaagactgttttggattttgaatttggtgcagattcaggtttatatagggaatgatttgccacgctggcaatgcgcgtgagttttcttttttttttttggacgaatgggattgaaggtatttctagaatgaaaaaaatagaaataaggtggtgtttggttggagtgaatgttattcatgtgtttggtttggtttttatacttttctaagaacactcacattagcactctcaatagtttatctattctatcttttaaaatacagcaatgtgtgatataaatacgtaaatttaactctcgattgcaaataaatacctaagtttaattttttgtggtaataatacctaattatatatctaaaactctgtaagtacctgaccattaaatgttaagtcattatttacatgtcattttcttattgatatatttaaactaatttttttaaaagaaaataaaaatttaatgagtttgactaatcagaatttgtcacgtggcaatttacttaacactcaacatccaggtacttatgagagtttcagaattataacttaggtattattactaccaaaaattaaacttaggtatttatttgcaactgggagtttaacttatgtatttatgccacaaattactctttaaaatatatcattcaaattctattttctttattttatgggtaaatggtggcaaaacccccaaaacttttattttggtttcacttaaccccaaaacccaaatttgggcagtaaaacccccaatactcg

SEQ ID NO: 28690 - DNA, 996 bp, Cannabis sativa
tcaagcgtaaaactgctccaaaagacaccaatagacgagatattgctaactttaaaaacccgaaacataggctaattataacctaacaaagaacaccttgagggaaacactgtggtctgggagatcaaatgttgtataagcagtgagttgtgaaggtgtgttggagtaaaagaatagtcattggcctggtgttcctttgatgtattgaaggatacggtgtgcaacttgaagatgtagaagtcgaggtgtagtcatgaattgactaagcttgtttactgcaaaagttaaatcagttcgagtgattgttaggtaaatgaacttacctaacaataagtagtggggtctcaaaggagatcgctcgaatcattgctgagtttgttgttaggctccatggggtggaggcaagtttggcactcaagaaaccagtgtcttgcaagagttgtaaaacaaagagtcgttgtgatactgagatccctttgggagatcttgcaatttctagaggaagaatttgagggggttaaggtctttgagtttgaagattgaattaaggtgtttgtaaacacaatgtttctgctttaattctctattaggccttcccctatagattcatagctcttatatatgtgtacgccaacttagtatattcatgagtacatcttatattataaatgtgtagaaagataatattataagatgtatagtaattagttctgaaatagaaccaatgcattaaacctaacacttccaaatctaattaataagattcttttctttcgatcaaaaaaaatgtattataaaaacactgtaaattctaatatatacgacaaagagttcataaaaaatgaattcggtcaagaaaaagtaaaataaacaaaggtggacaacctcgatatatgcaaaagaaaatcagactttagaattaaaaaaaataataaaaagaagatcagttcattaattgttacatttaatacttaaaaaaattagatagtgcttgat

SEQ ID NO: 28691 - DNA, 1770 bp, Cannabis sativa
tgtatatgtacgtataatatatatagatatgttctgtattaatttgttacttgtactcatgataataataagtggacctaagattattatatccacgtacgtatatatatataaatatacatatatgaagacaagttttgagtaaggatgcacactgaacgaagaattggtttatattaatcttcttaagaattttattcttcgtcctcactttattcttatatatatctcatcgaaagtaaaatggagagtctcttactagaacgaatacgcggtggaaaatctcttaatattcaaataaaatttatattaaaaatttaaatatttaaaaatattaaataatataaaaattaaatatttacattatttattatttaatatactaactataattcaataatttattttttaaaaaaaaaaattacaaaaatagcatataaataaaatataaaatactatcaaaacgataaataaaatattaaacggatccttattggagtagagaatattctgttctcctttactttaatatttgaagacaaaaaataattctcgttccctgtctattctccatttagatgagaatatctattccattatggccgaatccggtaaagccgtatttcaataaagaaaatgtacatctttaggttttaatgtaggactgatttttatttatggtatttagtaaaattataattaattaattgagttatataattatttatgcacataatttcaagaaaactgaatctcacttaaattgagcttccatttcctaaaatggtgtaaatccatatatagatgagttgttatgaacttgtgattgtataattttattttaaaatctgataaagagaacatatttaggtgttggattatatatgtaatcatctttgtaatattttgggcgattttcaatctatatatggatatatggattggatggggtcatgtcctcgtaataactatagtctatatatagtcactacttggatttaatatataaaattaatgaacttttactatatatatattgaatgtgtttttggatcagtctctctttttgattatccatttgtcatgagatatattaacatatataaatataatacatataaataagccttaaatatattttgtaaaagtattgatttagtgaaacttcaggtaatatttccttatttttgttgtgaaaggtggtggaatatagcaaagaatgtaacatgtgaaacgctgtggtttagaatttggaaatgacgttacttaaaaatttgaaaaattgcctattttgaaaagcaaaatactagattagatattcaacattaaattacacatcaattaatatctccccttaatataaattggaaacatatattgtcactattaacaactaattaattacatggttttttttttcttaatttagaaaagctttgtcgatcattaaaaactttaattacaatagtagcaatacaatcaagatatccaagatacataccaaatcttatgaacacatttgtcatcaaagttaacttagctaaggaattgagcaatgccattaatagatgccagcaaaagtaattaaaaacaaaatatcaatacaaattaaataatatctctaacaataataaataaagatgatttatcctagtgctcgcgcaccaattaatatagggaaatttacacctattactgtttttttttattttttttcgtttgtactgtgacacggtggaatttacttttgtactgttttttttttggcag

SEQ ID NO: 28692 - DNA, 1173 bp, Cannabis sativa
atgcaatgcaatgctttggaaaccctagactgggcaatactacactctcgtataaatatgaactcaggcgacctcttaaacccttgttattttagcatattcggttcgggttcgtttgtgggccatcacaacattggtcgggttgccaggcccaataaccataattcataatgggctcacgtggaaaatggccccaaatagatacattagttagataaatgtcttttttcaaaaacaatcaaaattgccaaaaataataaattacataatgaaaattataaaactacatttatttaaattttcttaaaaaaattatataatgataagctatataaatttgttgcatattactttattgtaactataataaataaatatactatatcatttgttgatctcgcttctagctaatgacattgagttttaattacaatgattaaattatataaacaataaaaagcaaagaacaataagtaaagaaaatatcaagatttataaaggttcggctccatgatagtagtaatagcctactctcctctcaaatgtattaatttaggagacaaagaatgaaatattccttcttgaaagctcttacagaagatttatgagtaattcacttttagatcataatttctctcttgagtgttctctctgattaatttcgcatctctgaatagtgagatgagaccactatttataggagctaattacataggaatggtttcccttaatccatgaaaaattaaataagaaattaacatgtttccataattacaataaagaaattggacagatctaggctaatttcctttattctttgaatgtacgaattaatcccacaaaaatagggattgcttcgtgacatgcaagtttggagataatgtcgatcactgctggaattgtcaacccacagtgcatgcgagttgatcacacgattgagctggtcggatgtccaccaatgactttacttggacatcctgctatgtatgtctgacttggatcttcatatcaatctttacgtgctgctaggagtaaaatcatctgtcaaggttgaggaatgtaagacacgtgccatccagtcaggtatcacgtcatattgtaaaaattagaataatatttacctcacaagtctgtgtaggaccttcttagtcgcacattgactttactcggcta

SEQ ID NO: 28693 - DNA, 4706 bp, Cannabis sativa
  modified_base (1019)..(1020): a, c, t, g, unknown or other
atgttgaataaaatggattacattgaaatagagttttatttagagcataaaacccaacagtaattacactgtaactaatcagattatatttaatttgaacttgccaaacaaataatttattttttctaaatatgttctctgaatttaaatttttatggagaaagaaaaaaactatatttttttttttcatatttagcatgaaagaaaaattgtataaaaaacttgatttaacaaaattttgtataccatacatgaatttttttttattctcctctccacattgtttgatcctatattattcatttttttttctttctttcatctcccaaatccaatttgcaaatataaatttttttttattaaaaaaatactaattaagatttttgccttcgaattttgacatgtaccaaattttgtctcctgaacttttttggttgttaaaaatccctcataaattattgagattattggatttaaaaatttttgtcagcatgatttgacacatgtcaaaatttaaggggcgtgatttggtagatattaaagtctgagaagcatgatttagtatataaattattactaaattaataaaattgaatgaaattagacaaaaatttttaaattcagtaattttaataattaaagaaatttttttaacagttaactttaataataattccaaaattcagggacctaaactttgattaagtggaataaatgtaggcggctggcacgtcatttattagtatacgttacagggaaaagaagaagggacataaatggtaataaagaaaaggattggaagagttggtaaagtgggaaaattttgaaatacaaaatgaaaatcaaattcccacccgaaacaaaccgccttttttgctgttggaattcaaaaaaaccctctctttaaaaccccaaaacccatctccttttccctctcattttctctttttcctctctcctcttccttcgttcgcccggctctcagcaaagtctctcaggtttctctctctctctctctnnctctctctctctctctcattcattatgtagatttttcgtgtttgttcatcttcgcaatctgaatttgtgcatatacagatccggatctactgatccggctgtgttcattgagacctaaaacaaatctcatttttaatacatcgtttcgaatcaacagatctgggttttgtttcttttttttttttttttcagttgtttgacttttcgttttatgtacctcaatgtattttcttggtgggttctacttcatattcttgtttcaccaataattatttctcgaaaacaggcaagaaatggcgggaaaaggtggcaaggggctgttggcagcaaagaccacagcagcgaacaaggataaagacaaggataaggataagaagaggcctgtttctcgttcatctcgagccggaatccaggtaaatattttttttcctacccatccatttaaagtaacaaccttttatgtgcagcttagaccttttagattgaatttcgtttttcttttaatgttgtggtcctaaagtcaacgttgcagttttaatcttatctgttgtggtgtttgaaggattcacagaccaatgaattaaaagggtttcatttaaaaggaaacatattaatctcgttattctcaaagatggttttgttatgatactctctcacttcttgttcacaaatgcaaatctttatgttttagttagatttaaaatttgtgtatcagtcaggaaatttgaaggggttttttgagctgagctatttgtagatatgttgattgattcggttttgcatggtggtatttcagtttccagtgggacgaattcataggcatctgaaaacaagaatctcagctcatggccgtgttggggctaccgctgctgtttacttggcttcaattcttgaatatctgactgcagaagtacttgagttggctggaaacgcaagcaaagatctgaaggtcaagagaattacaccaaggcatcttcagctagccattagaggggatgaggagcttgacaccctgattaaaggtaccattgctggaggtggtgtaatccctcacattcacaagtctctcatcaacaagacctccaaggactgaacagcgaaagctatttgctgtcacttaatttattccgttgtcattaacttagaaacttgtgtccactgtctatgattacaactttctctcttttttcgctttggcactaatgtttgcttttgtgatagtttcttattagttagtaggtaaagtgtaagtgggtaatgtagtttttttacccttctgcacttgtagcttccctctctagaattagtcattgttgtttgctggatagttttaaccaagttatattctgtcaccatctgtttttagtttgcgtgtgtttatattataaaagtctagtagtttacatttatctaattagcagcaaatttgtcttaatttgcatttgtatcattggatagattgatatggctgcctggttatctgattctatatgttataaccactgactttggatggtagtttatattgtttaaacacctaaagattcttaaataaaatactacaaatgtttatacttgtttattgcattacttgtagttgttgatttcatcagtcacaatgtatatagcgaatgacatcactagagtttagtctttttgctcattgaatccagcaaaaacaaaaaaaggaagaaagtttggctggcttactgtagtgtagcttaataatggctatttatttttagcatattgttaggtttggatcctcgtttgtaatgcagctcttagttatgtacgtacctagtgatttaattgttagtcctcgagatttcttatgttctaggaccatggcctacgtatatatttttttttagtgtagtgtaataatattttacaattatatattagtttaatatgatctctcccttttttccatacttctctcaccactaaactaactttagtggctttttaaaaaagcacgttggtatattatttaattgaacaaatcaatataaatcatcctaacaatccacattaatgctatctttttttttttttttttttaaagtaacttacaatagataaataatgagaatttaatacattgttatttttagaaatatgataaaggaaacatttcaaaagaaagacaaagtgttatgcactaattgaacaacatttgagagaagatttatctttctatttatgtttgattttgttgaccaaaactcgataatttatttccatcaactttgttgggaaattcacggctacacactaagatagtatagtatgcaatgtcgtggcctttgcataaataggaatagagattcttacacaagaacataatcttgcaacaatagctccattacaatcaatgacaatagatcttatatcggtttttttagccttgacatttaaggaagcacactcaatttaaatttcttagaagaaggcaaattgcaactatcattacaattttgataaacaccactattggaaggagcttaagttagaatattgatgcaacctttgactttgagcttctttataatcctgcaaaaaattaagcacaaagtcttctacttacacaaagtttaaggcagggttatttaacacagaattatttctttgattccacaccatccaacagatgcacaaaagaagggaaatttgatcatggttcaaattatcaaagcctcttaataaaagtttctcgatgtcacaatgcctattaattgtatagaaactctttaaagtagtatttctccaaaaaaaattagttcaagaacactttaatagggcatgtgaaaccgtttccttcttaccattgcaaaaggagcagaaaggatgggaaataatctttttttttgtttgaaaaggcttaaagcacaaggcaacacatgatgaaagacttttcaaacaagtgcttgatttttggggaatttcatagaccaaactagttttgaccaatccttaaaagcagacggattagaggaagatggagaaaaagaaaaagctaactcagtaaaattgctagatggatgacatccctaaatgagagtgtcatccacaagaggacaaataagaaccttcagaatttcatcaacgatgtccttaggaaaataaaggctaaatttgtcaatattccaaattctattaaaatgaataatgtacaagacaaaatgtaatgacgcatgattaaatatagattagtaagaaaattagcattagttatctttaaattataattttatatgaatatttatgttgtgggtcttatttttagaaaatgggtattggagttataattttttaaatttggagattttattaaactctaagtatgttattcttgttatatgtaaaatttacaatgtttataatttgctcgttaataatagaaaatacgatagatgacaattagagtcacatgggtgagtttagaagtgggacaaatataagtgatattttggaatatcatgtttaggcagggttatgattttggactattttactcctgaacctatagaatatttaagttggatgtatgaggtaattatgaaattttcgccgttgtttttttattaattattattattattatattttttttaagataaagattaaatttattagtaaaattatttgaaggcaacaaaaagaaaagaaaacaaaattat

SEQ ID NO: 28694 - DNA, 2245 bp, Cannabis sativa
gattgcttttattttttttacaattttagccagcgtcatattccataaggttagaggagttaacattttatcagtgtttttgccttcactatttgagcatagtgacttgtgatcttcttttcctctttacgacattagccatatttcgattctattagaaaccatttttgtgttccttggtgctggtgtcataattttaggactggtgttcttttcttattttttacaatcttggccagtgtcatattccttaaagattatactacccgaaaagagtttacaatttataacaattgttttccttcaatatataagcatatattctcctgtgacttgtgatcttccttctcctttctttccattaagagtaaaagttgactatattttgactctattagaaaccatttttcagttccttggtttgtggttatacctatactaaggatatgaataggctgcagaattcctgctagataagtttcaagattttgtttggcgctatgagggaataaaaacttaatattaaagtatttcttattgtatttgttgggttgcgtatgaggtttctgtcagcagaagattaaatcaaacaatgttttatgattaagcaaaatttgtgtagtactagtactattagtttgcccgtagagatgagtgtgccaaggtgtgatgagactaggataggtagtaaatgaaaatgaaaagaaaattccatactattactaatcaagtagaagaaggtaaggtaggaagtggagttggcggatctattccctagttgtgtaataaaacaaaaaatatcacaaaaccacatgttttagtaatcaagtagaagaaggtaaggtaggaagtggagttggcggggtgagacgagtaaggtggaaaggggtaggagccggccagccgcctttagataaggtgacctccaattccactgaggcaatccgacgaaaattaacaacatcatctcttttgactacgtccaatatttcttctaccgttccttttctaaggttgtaatgaaaaactcgtctatacacgtctgaagaggtgaacacaacgtcgccattctctggatgaaaacacacgaactctacgtccttcaccgatgttttcccttcctcttccctactgctgtaactgtaactcctctcgtgcaccaagctccaagacaaccccttcttccgctccttactttcccaaactttccacgattgttcctgcttatttctatcgtgatctaccttaactatccgtagacgaccctcactcactcccaggaagggatcgggtgtggttctggcgccaatgtctttggggaggtaaagatgttgacgtctgccgccgaggccgacatccggtacgaatacgctttagtgatgagtactgctttgatcgtctccattctccagtctccgaacggaaaatggccacaatgtagtgaaaaggttcagcttcgcttcatctgagcatatcttgaacaagcaaaaccttgaacttgaataatttgttcttcttatcttcctcgcatgacaatccatatctactacagatggatggtaatgggggcttgggaagaaggaaccattgttgggtaaacgggttgcagatatacaagtttgtaggagtactatcggttgtcacaagtaataaatcgttgaaagaagcttctacagtcattgatcctggctcaggaataaaattaaaataactcttaaacgacgacagtggttttcggtcaacaataggaggacggggcctcataattcttcgtgtaatcatggacgaatccacctgaatcaagagcgttgtagcagaacgtattctgcgaacaaattcatcactcagtatcagaccacgccagcgtttgcagacgaggctgcattggatagtggttaaccgctgatcggagaatcgtatcagtatttcgaagagtaaatcatcacttatgccgcccataatttcaaaattagatgcaccaccatcattctcctcctcaatcatcttaagtttccgatttggtggggagctagagtcgccgcccatgatgagggtaatatcaaatactcatgacctaactcctttatttatatttatattttttaaaaaataaaaatatcaaataacgaatctatacgcttttggtattttcaaataaagatattgttattatttgttttttatttttctttagtacacgtagacacgtagttatccatagtatcaaccaattccaatgacattt

SEQ ID NO: 28695 - DNA, 2172 bp, Cannabis sativa
attcagttcttggtgttcctcttgtaccatttgccatgaaggttggtgttgattttgtaagggaacctaatgcatttctatggaggcctacttcaggattcacttgtattgaagaaagcatttgaaatgttattgcttggccagctgacaaagttataatgaggtaaattacttaaactgcttgtacttgggaacctaatattattgcttcttatgtttctgttgctgttccctatctgcataaatctatttaccccttcatagtagtgtcttctattaatactatgtacgcacaataatgctctatgattacacttttgatcactcttattttctgttgttgttattttattagatttggtgatttgggggtgtagatttgtgtttaataaactgttgagtttagcttgaattttactctggggattgtctgttgtatgggatatttggttgtagtggtatttgggggtttggttctttttattttttgcttgctttagttgtttagtttttctttttttttcttacaagaattcaactggttttagatactaattattcttgtatttttttttatttatttatgtatgattggagctgtatagttgtttttgttgtgtttcttctacttaccataattcatgcctgttttctttcttttcaatgaagtgtcttaaaaaataaaaattatagctttattttatttttatatttggtgttctaatcaaagaaacaactacctatatgcaactgttaatttattgctcaatttgatttaaaaggctttatgagcagagtcccctgctttatgctctaaataatcatgagtgtttacagtttgcaatttatatttgaagtatgaaatagtttcaatactctttaaattttttttcttttaaacattagtatttagaccatttttttcagttaaagctttgtattaacttccaatcattgacacatatttttacacagacacatctaattatgtgtgaaaagctcttgttgatcactaaatttacgcaagaatttataaattttcctaattacccaatgataaatacaatcttttataattaatcactatggcaatttcgcaatcattgttgaccacttgtgccagatcatgcttttcaatcgatctctaatgaaggaaggaggtagcttccctatttctcttcatttactactgttttgttgatattctattgctgtctgggaattctgatatctttatggggtttagatactggttttatgaataacttatattgttctgttgatagcttccctaatgcaagaaggaggtagcttcctatttctcttcatttactaccgttctgttgatattcttttgctgtgtgggaattctgatatctttatggggtttaaatattggtttatgatatctatattattattatatgatattagtcctcaaaatggttttacaagaattattttattattataaggaagatacacttgccagttgccaccctaggtttcccacattgtttctattaacactagatcttccattccaccatttgtctttttttttcctctcttttactgccttatatttgcatgtttagtttattttggaaatgatgatgctcttcttttaagttttgtattttataagtttttttccctttagctggtttactcttgttgatatgcagagtttgttgtttattgttgtaccttgaacttgggttcctgtttcgttttctaatgcatcagggtgtctttggtttggaaacccaattctccataagagaaaaatgaattatttcaagtcttaaatttagagtatcatgtattaaatgtttacattttatttatttgggtttcagaacttgaattggtctcttatgttgatgaggtgtaaacaagcagtttggaaaggattttacattgtcaagataatgaacgatgggattccgcaacaatggtgcaatttaacttcaagaagattaatgtggtgtttgcttggaagaacctaatagacattacataataagtttttattatatttttttagtaaggagtttttattatgttattagaacaatttcatttgtgacatagatatttttgttaatataagaattatattagattttatcaaattctaattacattagattttatttgtaaaataat

SEQ ID NO: 28696 - DNA, 1169 bp, Cannabis sativa
cttgtattggctattcttgaggaaaccttatgtccttatctttattgtaatttttgttagtcaatctttattctttaagaaaagaaataaataaaatggcggaatgctactaaaaaatcgcattctgagactgagacgggtgccatattttttggttgagttctatgtggatgtcaaagctccaataaaatgcaactgacgattttcctttttctgctgaatgctcaaggtaattgatattcggaattgtttattttgcttcagataactcggtaaaaaaccatcactttgcatcaccttgtggaagcgaatcagtccctacagtagcaacaaaaacttaccaagcggagttgactcttttagatctttatagtggttgtggtggaatgtcgactggattgtgccttggtgccaaagcttctaatgttaacattgtgacggtatttcaataattatgtatttacacaataccgtctcaattcatcatatttcattatatccaggatgtgatattgttctggatgatgaactagatataagatttcattgttgaacaaaaatctattttttttaacaacttagacttttgtacacattcactgcctcaaatattataccttagatttttttctttctataatttgtaacagaggtgggctgtcgactgtcataagcctgcatgtgaaagcatagagttaaaccatccggagacaaatgtgtgtataccttatttccaatttgatcaatcgtgaagttccaaaactttgaagattctactaagcacctctagaaaaaaaaaattgtaggtcagaaatgaagctgcggaggatttccttgacttattgagggaatgggacaagttgtgcaaacgatataggtcccataatgttggaagaacacattcatcaaggtcaaaggcctcaacagaagttgaggatgatcatgagagttcaactgaggaatttgaagtttcaaattttgttgatatttgttatggtgatcccaataaaacaggcaagcgtggtctgaactttaaggtaaagaataaactttttatctttcatttggaatggtattgtgcatgatatctctgatataaatctatgtgttgtagtcttagtaataataataaaataaaaaacactactgcatgtggctattctttcact

SEQ ID NO: 28697 - DNA, 5894 bp, Cannabis sativa
aaagcataatagtgatttaaataaaaacaaaaattactattatattttgtaatagtaattaaaaaaaatattattcgtcgtaaatttatcttcgaataatttacgtggaaacatctaaaattttattatttttttttacttacaaaaaaggggtattttttattttcacacttttaaatattttttttttttgcatttttacgaaatttcatataaaaactcttattgcaactagcgctacaaccactttagaaatctaaacagtaaatttgaaaaaaaaaattaaaaaaaataatatttagagtaattcctaaaaaataatcacccaataatttttaattttatatagccacattttatatagatcatagatataaatatatgtacgattttctcaaaaaaaaaaaaatatgtacgtagatattacgtattacaatactaagatacgcaaataaccatatacgtatgtgagacacgtggatttgcgtttaagatacacgtacgttaaattctcgttcatgcatgcatgcatgcatgtataatttcatgatcgatctccatatatatactccaatgtattgggagagtttaatattatatatttacatgtactacatatataatatacatgtatacatattagttaaagagataattatattatatatatttgaatgatcatgagatctgatgagaatagtttgtgcagagagggtgcaaaccgcgtaacttactgcctcgtgaattattaagtcataatatctctctctacatactacattattatttatatttctatatatatgtcataattatataaatctattatgtttttttttttttgtgtaaattaactaatatatatgtttatttatttcggcttgtcgactgatgatatgtatatatataataatgatatatatatatatgtatacgcggtgaatacatgggaactagctagcttatttcaattaaaaatacatatagtttatgtatataattatgaatatgtataaatatatagtaaatatattgtacagttgaagggtaatgtaagatatggggacccttattatatggttgtctactcgaataataattacaccaaatgtaccaatttggattgattaataagaaaaagttgtagatatatatctaagacaattcaccaattggtcttgatgatataataattatatctccatttccaagttttgaatccccttttctctttattaatgtcaaaagttaataataacattgtctaaggacccgtttggtacgcaggactggattggattatttatcccaccttgctagatgggataaataatcctagacagatgaggttagctggattagttatctagacttctaacatgcccaaacactggattggacaaattaacctgtctaatccaatccaatcctgcgtaccaaacggtcatatttactaatttattttatacttttatatagtaattagtactatcaggtgtgttcatcaaactgtcatatctactaatttattttgtacttttatatagtaattagtcacatatttatatatattaaggtagcctttagttaaaaatagtgaaaatgagtggaatacaaaaatatattttaaggaattaaaatattttcattctaatattattaggcactatatcaactagatatcatgtacatatatataatggacacatgaaattcacatgtacaacaaattcacatgtaccttcgtaattagttacaatcaatattagttcttgagttatatattttactaaaataaaaaagaaaagaaaagaaaatactaactgaaatctgtatggaaatagagatagatcgaattcgatcatgctcactatctactcatcacttaggtggatctctacatatatttatatttttatatatatttatcttgaaacctatagctgtagatgatcaatacatgcacgggataatatatacatatatacacgtatatatatatatatatatatatatatatttatgtcgactgaaatctttacgtggaatcatatctaatgtcagaatgtatgtaagcgattcagttttcacatactggaaaatctagcatatgcaactaataatatttgtgtatataatgtaaatatatatttatggctgcagaattgatcaatttgaaaagagttctataatattatcctgtgaaacatataatattatatacttttttaattgttaattaattttgaaataaatttacttttaatatacactataattaatacattcttatttttttatcatttttatttatctctttccttggatagttgattaaattattcttgctcatttaattagttataatttttaaaattcatataatctataatttatattaatattttttttgacaataatttattatattaatatttatttgcctacaattaaggaattgattatgctttctaaaataataaaatatttatttatagaaattgttatccctccaaaaattaaaagttgatggcatgaatttttcttttagatatgaaggagttcatatcatctcaacactatcttgagaacctcagccaagcctcgttagatcgtcattttggcccctcctactttgaaacattatggcatcagttcccaaggcaccatcttggcctaagccgagatcacaactacaccaaagcattatcttggtccaagttgagatcacaacatcatcaccatctcagagcttcttaccaagtaccatctcggccctagtccagatgcacaccattaatgcatcattttagccctagctgagatgctcctcacctcgacctcttcttttcctgagcattgccactttggcccatgccaaagtgatatgctctagcacctgttattatcatcttttttagatatttattttgaaaaataattttgttgtcatttcgtattttaaaattaacccaactatagtaaggagaatgtttgtcttgggttaagagattttaaaccctaagagagtcctagatgaaaacctacataaatgtgatatcaattttaaagaactctactttattctcacgaactctcaccccctcattctataaactcacttatttaatcttaatttattattcaactatttgattattgctaatataatatccattcctaaaacaataatataaacacataaagggtagagattcttacattcgttctagcagaattaattgacaccttccgttttactctctaacccttgatcatttttgttacagagtatgatcaagaattgaccttggattctccttcaattgacaaaattgactacacaatcttccttgctagcatgagtaatttcttgatatatgtgagtaatcactcaatactaagtccctcagaattttgagaagaagaataagagaattttgaaattcactatataaaatataatctctctcttttttattctattttgttgtctgacaaaattgagtcaaagtattatggaaatcaaaggctatcatatatattcatagtgtatcactagggttatgtttagaattgaaatagatttaaaaaatgataaaatgagttaattagaacttatggccgaaaactataataagtctcatgggtttcaattaattttatcattttatttaaaatgatcttttcttcaaaaatactatttttcaattctaattgtttaaatgctaattttatctatttaatgatgataattaattattaaacaaaattatcatttaacttatttattaattagactttctaatgtctcttaattaataaataaatcctaaattctctttttttttttctcaaattttcccttatttagtaaaattcaaaaataagacataatttcacttagaatcctaattgattgatttaatcaattaattgagtctacaagacaatattatctcagatagtgtggagaccatgagtctatataatcaagctcccaataagtagttttagaatttacttagtaaattctctatcttattaatttctcctgactccactatatattcaaaattgcacttgttgccctaagttttccccaatatacgtggcagtctcaatgtaagacacgtggtagaagtaggcccatcatctggagatgaacaaaacacaacttaatcccctctagaagaaccaatagctatgatccaagggtaggctcccagacatgaggaaatagctccacttcctcttctgaaggtgaagggcaaatgaactcctccggactagcgaagctagaggtgaatggtcactttgcatttaatgcaacatggggaaaatgtctgagaatacccataaaaggatgtgtcagacgtcataaacctatttttgggcgattacatgataatcaagggtgcaagtgacgaccccattatgaagaatcacatcaatcaagaagggatgaagactaggcagcctactacgtaggttatgcatgccctattttgtaccttttaggaatttatgcatgccctcagatggtactttaagacaagtaaaacctttcttcttcccaccaattgctataaatacccctcaataaaattagtgaggggatcagaaagaatacacaaaaaatagtttttgtaagaaacacccactcattaataacagagactcgtggactatagctcattaatatcttaaccacgtaaaaacatccacattaattatccataagctatcattattacattaaacatatggttgttgaaaacctcgatcaacaacactctttattatatagaatgctctatttacaaagaataaattgctaaattatccattgtttcaatttaaacaataaacactctattgccgttttacccctcaaagtattttgtcctttatacacttagctacttataaatgatattttgagaaaataatataattatcaaaataagtactccaccatttaaactcgtttagccaagctctaagaaaactatcatttcacttttaagtatttatagaagctatagatttcatatctatgattagccctctcacttagttgtactaccatgttctcaagatgtaagtatggaataatccttcaggtacgcttgtaacaaacaagtcaaagaacacgtgcaatacagttaagccagaacctaaccatcttaggattgagatcattgatctaagatcaatatagtgatattttgacgtagaaaaaaatattacggtaagtttacgatatcttttccactgtaagtattggtccagcccgatgtatagccaatacatctcatacaagcttagtataattatatgcatatgtgattacatgtttagtatgcatgtttatgattgcctgttagattacattgaaatagcggtaccgctatacatagagttatattggatcccgataaatgtatgtttgacttaagtattgattgacgatatcacattggtacgactagagtatcgagtataggctaacattatggtcaatagtactgtcgtatgaacgttctagaaacagtatcgcgtgagacgcgaggatagggttatgattaagtgtatgggcgcctaattgtaatccgctttatgtctatgttatgattatatatacttttctactgagttttgagtttgtcgtttgtcgactcacagttactatttactatttgtaggtaagggcaagactaaggctgaatagcagtgagtgcgaacagatgagggttattgtacatgtcggggcgattagacctagagcgtacaatttttggaacagcaggctgtattttgtgtggtcgctaggcaataacttttgtatcgaatattttgtattacagaaaaaccgtgtttttgcaaatgtc

SEQ ID NO: 28698 - DNA, 2193 bp, Cannabis sativa
  modified_base (151)..(152): a, c, t, g, unknown or other
  modified_base (668)..(670): a, c, t, g, unknown or other
gtataaaaatacaccgacacatataagaaagaaaattccttatacacaagcttctcatttataatatctattatcagaaatgttaaagggcacctaacacttacttatatgttaatatcgatattagtctaattaagtatcgagtctcatnnaatttaatataataatttttagtgagtattgttagtcaatcgcaacacaacatgtagaaaaagtactaatcaccagtgatacctaatgacaatgctcatcttttatatatgttacttcttgatttctattacactgatttatgttaattaccttgaacaaaggcacagctaattatcatgtcattgtgaatcttttgtttatttttaaattttacttttttattttaaattcaaacaaaatatgaatttacttctattttcgtgtttgtaaattatgttgagtaataatatattattctccaacgttttttttttttatctttactgatatatgtcaacgacaaacaaactaaggtagaacatgtgttttcctttttttttttctctttctattttttttcttaaaaaacgtgcctttttaataatattgagaaataataaaagtcatcaataatatctagcactcttatgtgttattatcgttattggttcaattaagtatcgggtctcatatannntaatataataatttttagaaagtatcgttagctaatcacaaaacgacatatgtaggggtgctagacattactgatgcctagcaatactctaataataataataatgctttaaaattaaccgcatattgtgtagtgtagtaatatgaatgcttttactatcatctttttttgtttgggctaagggttcgaaccccaccatagtctctcatgagaaggattatgcttggccttttgagagactagcttactgtagcggtgacatccttaatgggatgagaatactctccaagtgcataccgattagggttgggtatctaatctagtccaacattttttttctcatccaattcaattcaattagatattgaatttgaaaaattatcatccgatccaatctaatttgacctcaaaattcaatccaattgctaatttgattgaatcagttttttaattacatatctaattacacacctaaattttaatattaacttaaaaatatgaagaaaacaaaaacataaaaattaaatatcacattttatttaagtttaatactccataaaaatatcactgttacaagtgtaaggcaactaaaagtttgaaataactaaaacaataatattgttaagaaataaaatagaatacaatatcatgaaaataaatacataaaataacctagtgttacatattcaacacaaaaaaaaaaaatcactaaaaatataattaaaatatttttattatataaataattttttaatatacataaacgtaattggaatgggttggtttttaattggattttgatattgacatccaataatcgatccaatccaattgtaagtggatatacaatattcaatttttcgtaattggattaaattacatgttgttcaaccctaatactgatgatccaattaagagagaatgaggtataaagttcatataacgggcatgtggtataaatatagaatggattataataattatgcaaacaacataatatatatatataaatatatatatgtgaaatatatatatatatactcaggggcgaacccaaattgtagcgaggggggcagtcgctcctgaaaagaaaaatcggaaaataaatgtatatgtattttagttagttacaacatatatttgtaataaaagataatattcatacacataataataggctgggtgtaatggttaagccagattacatatgtgttagaggtcaagggttcaaatcctaatataacatttatattttttctttttgagattatttttgtcctcctgctcccttcactttaaattccgagtccgccaatatattatatatataaatatgaatatacatgtatatatatgtaaaaataattattttgatatatataaaatattaatatataataaaattaacaactacatgaatcaaaagatcaaaaaaataaaaagaattcacaatcggccataaataaaaataaactgatcgtatatactgtgacagccagtagtctcgtgatccgtaaggggaa

SEQ ID NO: 28699 - DNA, 5633 bp, Cannabis sativa
gggcataaaacccaacaatttatgcctaagaaatatttgtcaaatcctccctgatccctccagggcatgcaactcagactgggggtacggaggatgcaaaagtgcctattacctcttcccaaagtactggcacccagagtccccacattgagataggcagcggtaaatctctttgagatctcttcttcctaggatagaggatcaggatggcgtaacacccaataaaagttaagggttttatcatttttggccgcattggtgattataactgccaaggtagtggaaattgcctccttcacttccttggttagtcagattatagaaattagtgaaatttaaaaagtagacaaaactcaaggtaaatcattagatacctagaagatgaaagcttaaccgaagagacgacaccctgctagtaggaaatcaagaggaaaagaaccagtattctcaaaggtcaggagtgcgatctgtgtggcaaacagggcagtaagaatctggaaacttatctagtcggaagaaccccaaccttttcctatctatcctcatgggattagcctttacgctatagaagtaaaggatctccttctgggaagggacctctagcttgttaatctacaaaacacgtaccacccatccaaaagcctatatgatgaagggatcagctggaaagggcaatcccaatttttgcaatcagattcgcaaaataagttctcatagggaggtgagcgtcactggaaatttgggaccaactccatgcactgaatccctcaatactaatggaagcagattctcccattatagaaagtttgtgccacattagtccagggacattgtaaagaccaacaactttagaataagcttgtaacatcccataagatcgaaagcagttggctttctgatccattttctagatgaactcattacgggcctttgctggcagaggagttttgaccccttttttctcttttccacagagaggtctttctcaacagtgggttcatttttttttggaatagtttccaaggcccccccaggttgaaatgttaccgcatgagcctcagtttgatcctgtcccaccaaaatcctttcgacaggtggaataagcacaccctcgataggtgtagccgtgtttgcgagaaggtcttgattcaagttcattgctaccaacacaaaaaatgaaggaaaaaagaaaaccttttgaaacgaccgatggatggaaggaaaacaactaccagactaaggctctgggtaatctagtatctcgggacacaaatgtaaggacaaagtttctttcgtacacactaccctgctatttgacacatgaacagtcctagccctaacctaaacaaaaaccttttgctctagacacgaaataccaaaagttcagacatggggttaatacacttacttgtcgaatcaggaggtatgagtgtcgtgtcaagaaagcttgcttgaaagctccaaagctagtcaatgtagcagtcgtagtaaacctgaaaatcaaacacttcccttaatgaagaactttactggtccagtcgaaggggtgcgatgtctggaaaaagttccgtgtggatgacgagtaatcgctgaatcaaaccctctaacacttcttgcatccagaggttggctggaaaagaaaaaaggttgtagagaaaaatatggagctttaaatgaagaaggtaaaaagaacaccaccagaggcaatttatatttcaaaaagaaaataggcctatgaaagatcaacggtttagattcttgcaataaatccaacggctagggagatgagaagtcacgtacgatcgacctagggcccatgaaaacgtcaaggtgattctctacacgtcattcagtcgccagttgcattccactttttttgttaaacacgccttgccacgcgcggaaagggacaagcaagacttttagaaatgtcgcgtgattactacgcaagagaaagtgaatgtcgtatgtaccctcggtagaatatagttcatgtgggggtgtgtccgcaacttaaatcattagcgcgtgttaatggtcagcaccgagaaagatagcaagctcatttgattcaaagaatctcaaaagcttgggggtaaatgttatccaagttttcgcgaatgagacacatggcgcaatcggattgaagaatacaacagcgactagaattagtcaaagttaccaagaaaatgaaagtcccccggacctgggaggtaatgggagcatatgacctctgggtaacttcctttagtaaaggacccggagcgcgatagaggtctcgtagacgttggccacatcagcgtcatgcaaaggtcgctccatagataattacacctttttctgacacatggtcagattttgtcctccatgccaggccatggtagtgcgcgcacgcacctttaaatatactttttgcccaacagcctggttaaagagaatttcgtaaaggagagacctttgcgcgacacgtgtcttagttcatacaaaaatcctcacagcactgtacgccacacgatgaagaaggttcttactaactaatggtcaaatcgtcttttagcagtactagccttagtagcgtgtgaagtacgaaatcctaggtaggtaaagggtatgccctttaccccctgtgagcctataaatacttccattcttcttcaagcaaggagagaacattttttcatctatagacactctgctaaaatttctagaaaactttctctcaagaggaacagagaaactcttattgaaaatacttgtattacataaaatatctacccaaagaggccaatataatggactcgtgaactaaggattatcaacgtttgaactatgtaaaaaatctgtttgtttatttcttattttcttgagctctaattatatttggttttcgtaaaattcgatcaataaatactataaaaaagtttaaatttgaaaaaatgcgataaaaaacgacaaacttataagtgctatatttttataattttcttttaaaatctcatatattatggaatattcacaaaaagtaaaatgcaacagaaagccaatttaggaggtttttatggtcaaatatgagaattgagggttaattgtttgtgagatgacatttgagttttggttttcgatcaaggcaaatacgtcgtcgttacatcttgttggaaagagagaaaaaaagagttgaagataatattggtctgtatctccctcgctacttctggcctgtttctccaaaaccctcaacgcactaaacacataacaacatagtgtgcctttctctctctaaaagctcaacactcttctctctctctctcatagactgtaagtaaaacaaacctttgtactgatcttccccctttgcctgagtattcaatatgtgtagtatttgtctaagtatgactgactctattcaattttcgctcagcgctagaagaagacaacaatcccaactcctccaatgtccgatccctccgacgacgcttcccacatcgagaagctctacgaatttggcgagcgtctcaacgaatccaaggacaagtcccaggtccgcattaatatatatttattatatcttgtggttccattgttttgtgtaatctggtttcaatgagccctgagcgtctttgctcttgtttgggtttttctagaatgtcaaggactaccaagggattattgatgcggccaagacgagtatcaaggctaagcaattggctgcccagctcattcctaggtttttcaagtttttcccggacctgtccggtcccgccatcgatactcaccttgatttgatcgaggaggaggaacttggggtcagtatatcattttctattaagggtcgggaaaaaaaatactagaaactaaaaattcccccttttaaatgttggggcagtatagagagttgtttgaatccctattacttgagacgatttgtgtgatatcaaatatttagaatcagagagcattaaatttgtttgaacgatgcattctctgctgtttcatatgggccttgcttgttatttcaaaggtagtatttcgttattataggttcgggtacaagcgattcggggactaccccttttctgcaaggatacgcctgaacatattgccaagatagtggacattcttgtgcaacttcttgcagctggtaaattctagtgttttgaattgtgttattatctatgagaatattgtgctaattttgtataattctgagcttctctgtcttgaatgctgtagaagaatttgtggagcgtgatgctgtccataaagctcttatggcccttttgaggcaggatgtgaaaggtaattttgtgttgtgcttatgttatggaaataatctgttcttgtatattgcaaccatgttgacatcttgatcttttgagatgaaaagcaatgcttgcataaaaattccataaaagatttggattttctcatgcccgatgttgatgttgtacaagttttttgtcttcagtttctattttaagtggttggatgttgttggatattgacttcttagaaataagtgacttttttaattttatggttggatgttatcgcataagccgcagtcaacaatgatttacattcctttatagttctttctggggttagtacaccactgattgattttcatagtcttccctgtagcactaattaggacttttctacaaaattctattattttactatccattggattgaatgcatattatttagaatgccttcttttcattgtgttttcattttgtttgtgtagcttctttgacagccttatttaagcatattggtagtgttgatgaaccaagcacagatgaatttattcgggagaaggtgttaagctttataagagataaggtatcttgtcagaaccacttcctgtgatttttattgcccttagtgtggtggatcacgatctactaattaattggaggattgagactaagtaattgtacttgcaggtatttcctattaaaggagaactgttgaagccacaggaagaaatggagaggcatattactgacttaataaaaaaggcacgttctcagatctgtacactaatttattttatatgcatcgaatttgtgaaatcttttatacttttgaaacctggtattactattaaagttgcaggactgatctgagtttaattgcagagtttagaagatgtaacaggagcagaatttagaatgttcatggacttcttaaaaagtttgagcatatttggagagaaagctcctccagaacgcatgaaagaattaattggaattattgaaggccaagctgatttagatgcacagttcaatgtgagttcatttttcactggtttgagctaagtatccggcttatttaatgacacaagtatacatcccatctgtaatatgtatctgaaaacttaggatttattttgatggctgcacgtaacattgttagaatcgttacacattgaatattctcggggtaggatttacaggacatgcatttcgtaggactttcaattgtaatcacaacagagcctggtttctagtatggtttgtctagttttagttgtgggtgaaattgaagctggtcaaatttggattgtatcattctcagctgatcataactagttctaatagcggtagtagtttcaatatgtattg

SEQ ID NO: 28700 - DNA, 2281 bp, Cannabis sativa
tgcttctattgtttacaagtgtacaacttccttctcctttattgctttactctacttttttgacaaagattgtaaccatacacacgcgcaagcatatcgagttcgtacaatttcccttacttagatatataattcatcttaaatctttaattaataattaattattttccacccctttatatacctcttggcacctctctcttcttctcattccattgatcaaaaaccataagaagctctaattatcctctctctctctctctctctctctctctctctctctacacaaacaaataaacaatcttattgaaaataaagaaagaagagtgatcagaaatggatcaaatagaagcaagtacttcagtggtggcaaagaagctatggaacatagtaagagtagtgtttataatgatgaggaaaggattatcaaagagcaaaatcatggttgagtttcacatgctcatgaagagaggtaagctagccggaaaggccttagctcacaacttcatcctcaaccacggcgccttcacatcctcctccgcctcttctattggcggaggtggaggattcgggtgccgctcgagcgacgccgtttcattcgtgtctccaagagagtacgaattcagctgcagcaacagcccagctgccccagcctttaacaacttgtacaaaagtctcggtcacttcaacaagcgtagtagcaacaaacactacttcgccaagtcatcatcttcgtctgccagtacaaaattcgattacgacgacgtttcgaacaccgttaacgccgtccaaaaggttctacttgagatgtacaacatgaatcataataataataatattgatcaggcgtcgccgttagtgacgttacccgggtttggaaagagtcctttggggatgaggcagttgagaataacggactcgccttttccgttaaattacgagggaggtgacactcaggtggattctaaggctgacgatttcattaaaaggttttataagaatcttaagatgcagagcaccccggctcgatctcatgtctacggttgatatatatatatattaattaatacgtacatgtacgtttttgcaaaggaaaaaaaaagaacatgagtagtgtgaattaatttgaccaatggtggctttttgattttctccttcaacttttttttagtctcttctttttttccagaagggttgtgatatataaatgaattagtttgttacacttagtatatagctaaaaaggcgtccatcgacctggagtgagatccatacatggttttgatgatgatgatgatgatgatgatgatgatgatgaatatgttatattatatgtagtttgcttttttgggggccatataaaacttcttaatttcactacatatgtatatgtatttatatatatatggtcatgtaaatttcctaattattaattacatatatatatgtcacttttgttttactggttttatggtgttgccgactatttttttaaatgctagctagaaaattacagcgattaataatagtccaactatattttgaacaaattattaggatataaatatatatttcacttttttctaatgcccatataatattgtcccaaaaaaaataaaaaagaaaaagagaaagaggccgtgttataaatgaaacgttctcttctttcaataaagctgaaaaagctcatacattattctgtatagcataatatagttgaagtagcgcagtagtagtaggactaattccatatgggtttaattaaagagagcgttgtacatgttaattggttcgtgttcgtgtgtgtatagtttttaattaaagagagcgttgtgtttggttcgtgtgtgtgtatagtttttaattatgagagagttgccagtttgaggcaagggttggtgggtttaggggtttggatttattaggtttgagaggtttgtctctatagtggtgtctctttttgaaagtgaaatatgttggcctggactatacgtatatatatatatgttatattaattagtggttcttcttcattattttcttcgtattaaagatgaaaaacgaccgatcctgccccaagagacagatgaaccaaaaagcaagttagagacccttcttttcttcaatattaattataacaccacgctagctagctatacacaatacatattaatattattttcttattttacaccatattgttattgggcactaatgacacttaatatatcttctaaatgtatcatcttgtaattaattatcttcttgtaaaactactatg

SEQ ID NO: 28701 - DNA, 5519 bp, Cannabis sativa
gaagagaaggcaaaacttgatcattggcttgtgtaactcttgattatttgtgtaaggctcggaataaaatttgtttatcatccttgtcttttgaaaacaatggtgatggcaagtattgaatttaaccaactaactatatcgagattaatgttaatgcaactttatttgaaaaagaaaattcgtatagctttagaattatggcacaagacagttcaagtaaacttattgaagtcaaaacatgttataaggaggtgtttacactcctgagattgtaaaagctatgggtatcaaacaaagaggcactcacttgactaatcatataaattgtgtttttagtttgattattcattgctgtcaatttttacttttctctttatataacgattttataatcgagtaactcatgttatagctaaataattctgatatcgctttagttgtagcatttttaaacataatatttggacagatttacatctaatattttattaaagttgttattttattttcaaaaaataaaataaataaagaaaataaatatgaaagaaagagagaaggcaaaaatataataaattaataatagtagttggtggtgtcaattggcaaagctgacacttgtgttctgccctgggtttaacatgatcacttcaacattcacttttatcaactttttccttttctcttaaaaaaacaatcataaacaacaaaatgtgtggtctttattattatacacctgcctcaaatctccacaacaatgtaaccaaataaaagaggttatcatcaaattcattcaatcaaatatattccggttctataagcatcaacaaatatgatacatgacttgaaaatcaaccagatttaatgctaaatctatgatacttacatgatcaaatataatcataataattatgcccataagtatgagtaaatgaatattaaccattcctttacaggtgaattgccaatatcattatgaaaataattcaacctgagaagttcatgaaaagtgaggactaaagaacatattattccatttgggaaatgcaagtaaaagatcacaacagagtccacaatttgtttctttaaacttttttttcttatctgtgttttttctttacacactaactcgtcgacattaacgcttgcatcacttcaggcatccaagttttccatctgaatgctgcttttcagaggcacgtactctccaaggtagccaccaaggtgatcatgcaaagcactcttatcaatcccttgatgatggtagctcttgcatacatagtaaaacacactctgtaccagtaatcccaccaaattcacaatcaccaaaacgcccactaagaacccccccaccacaatccggaaaaagacaccatttttctctcccccgtgcactacaacggctccaaatattcctgcaataaccatgcaaattgccaagtagacaaaaacaagcattgctgcaacgcgggtctttcccttcagtagctcgtagctcttcttcattgcggcaaagccataaatgggctccaaaactgaaaccacactggccaggtgccacagtgcagtgatatagatatggaccaccaagaagagcaagactatgactataagtgaaaaaacaaccaaaaatgggttctggatatcgatagctgcaatcagcagaatcaagaaaccaacaaagagaaggttgtagacaaccatcaagagagagacccacaagtaggtgacgaagagacgcttgaagacctttggaatggcagacacagtagaagagaaggagacagacttagaggtatagagagaggctacagtgaagacgacagcagcggtggagaggagagagaaggcaaagaggaatatgaggtagcagaactgaaagacaaggagaagtttccatctgtgaccagtctcttctgggtcagcataagggttctggagctgggcaaggagtgggtgggtgaagagcgagtgggccaagatggcaaaagaaagtgggaaaattagagttaaggtgatgaggtagaaggtctttggggactgcttggggattgagattgattctctcagaatatttggtattgtcaaaaattggagctcttcagtggatagatccatggatgaataatctgatagggaaaaaggtaaaaaattgaagagagaagttgtagttgtttattagaaagaggtaaaatgaacagatttctctcagatttagtttctttcaagacaaccaagagagagtgtgcattagaagaaccacaagtgttaattcttgctaaattgtatctttgaagctaaatttgatataaacacctcttctatacagaaaaccctgaaaagtgaaacttgtcaaagtttgttcaatatttgatacaacacattaactatgctaaagaaagataaaatactcattcccaaataaaggtcaaacaacacagaacagaaataaaacttaattaattagccaaaatacaccttcacaatagcaaaaatgaccacactaacgttgtaaagagaaaatctatatagatagcatagagtaaatgataagataccatttaaaatgaaaaccagaggtgccaaacattcagtagcacagaaaaggattcatcagccacacttattaacaattctacacccttttttttgcccacaagtacgccttcaaaacaacatgattaaggtccacagaaatccaagtccaaaatcaaccttgaaagatctttcagtagaatcaaatcattgattccattagtgcccactttgcagtcagtcctacacctaatatataacacacatgtacctatcacatattcccatctaaatacttatgtctatgatctttgatcataagatctatctctacacagaggtaacacaattggttgcctgtgaaagaaagagagtcacaaactacaattgaaagagaacagctccaattttagaattgtggaatgtgccccgtgagagagccatgtgggtagatggacaattgtacaaaatgggtttcaattcatctaaactcaactcaaacaagctagtgtaacttacggcctagataaaagagaaaaaaaacagttaaaaccagtcacttatacaccaaaaaattacattccattctatatccagaagactataattactccaattatctgtgcaagagcatcactagcaaaattacaaagcataactaacatgtagagttacaatgcctttatacttctcacacatattccaaccttcaagagttggaatccattctaagtggttccagaggatctagccacaaacttcataatagcaaatgagaaggggatcatttgtacatagataagtgcttcaaagctaaagttaggcagaatgctgtcaattacactgatgtttactaagccatgactgtagcaacaaattcaatgcccatatatcttttctacatgttatacactctggctatagtaacccccaaaatgtgtccactcaaaatccatttctcaaataaattactcagccccttagcctaggcaacaaaaattacacaggaacagaaaaaaagataagtggtcatggttctttgttagcttaattatgacgttacatccccatctccaaaagcttttgaatctttaagacacttattgcatcatttctagagcttcatctcttataattgaaaaaaaaaatgatagaacaaaacctgccaaatttacaaaagaaagagaagaaaagataaaaagctatgatccaatcactttcgggtggttttccctgaatccattgactccagctactttatgacaagataatcaaagacttaggttataaaacctaattaatcatttgaagctggatatgaaaatgaatacctaataaatgtatatattgaaggcatgaaaaaagaaaagcctaacaaaaatatgcagctacggatacaagagagcggtacctgaggaactcagacggtgataacggagcgatttggagaagaaggcgaagacgaagacccagatagggagctgatgatgatgataatttgagatttgggggaaaatgttctaaacttgaaaaaaaaatcgtgaccgtttatcagttaatctgacggttaaaatcggagtttcattgtcggtgtagtttgacttctttgagatgttgcttaagagaagaaatataatacatattaattactatactttatttggtacaccgtattctaattgtgttgattgtaaaatattatattatttttacttatattaatatgttgtgtaaaattgtactatttttactataaactctaccctaatctcgtacctagatctaactcctgactctgaccaagatctcggactctgaagaccttcaactcgaaatcctgattcagactctgatctaaacctagaccctagacactaaattcgagaacccgaatccaacttttttttttaaatattataatacaaaaataatataaaataattgttatgtattaaataatacgattcacattattttatagtcataataattaatacaattccaaatccaaactttttccaaatgttataatataaactaatacagagtatttcttatgtattaaataatataatacattttacactatattttatagtcctaataattaatacaatataaaattttatccatagtattctttattattaaatacaatacaacttttatacaacctacctaacgaatcgttaattattatcattattatatttagcaaagaaaaacaataaaaatatagataagacactaactttgaatcttcttttaaaaaaatacaaatgaaaatcgaataaggagtatctttaatgatacatttatttggtacaacatgttgtgttgtattgtattgtatagtattatattgggatatattgtattgtacaatattatacaatataatataatatttggtattgacttgtattaatagagtgtagatttgcgaagggttatcttaatcaatggaaaaatgctcaactctcttttatagtcaacatgatctggctttttagacaggtgatggagctgagtgttgggttttaccacacaaaaaatagtatcaaaatcaatgtatacgcgactctttttaaagaggtacgcaagtttggtgtgggaatgattgctcgtgatgataaagtctcatgttggaaggagttacgaagtttttccaagggacagtagatcctgctcttgttgaagccatgggtgtatgggaggctttgagttggttgaagttgaaactatggcaacatgtgttagtggagaccgactgtcttattgggatacaagcaattcgaagttcaattggtataatctctttatttggttttgttattgaggattgtaaaatgttgctttatatacaaataacaacaacaaaacatcatcaaaataacataaaaaataatatacaaataacaaataattaacaataaaataataaaagtataacataatatatcaaaaaactatattttttataaata

SEQ ID NO: 28702 - DNA, 1673 bp, Cannabis sativa
gtgctaagtgaattgcatgtgaacttagtctatctctgggtaaacaggttgtgattcaaccacggtctaataagaatgtgttgagcttgatatatatgattcacaagttgactatgatttggcttaaatctcttgctctcgaacctttatctctatgcttctttgagaaattttacattattgaagttcattttgtatagttttaatagggatgactcgcgggttcgggtacccgcccttaatgaagcggggatgggggttgactttcggggacagggtcagatatgggtttaaatattcatacccaagtcgaaaacggggcggggcaggggaatagatacccgtcctaatatgatatatgtatgtatttaagttttcaaatcataactactacaattaaaataacttcataatttaggctttttattaattatactccatttttttttactataaatactattccacttaagtttattgttttaatgagtttttatgattatttttttttaattctctttgagatatcatttttttaaaaaaaaaaatatatatgtaatgggtacccgatgaaaatctttcctccgtcgagtaattctcgtcccgcctccgctttaacttaaatggttattggggcaggtgtaggagtgaatttaggaagctggtatgggggtgggggagcaatccctgcacctgccccatcccgtttacatccctaagttttaatgagtgtcagtcataaaggtaggactgaagagaagaagagaaactcctcaacaacaggtgtacaagatgatgagttcatttcacattttaatatgccaaatgttaatgaccactttgatgaatattttgacgtagttaggctaacaatattttgagactattagttggattgctaatttaaagtttgaatgttttaatactattttgttgtttgagcatcaagttgactgtccaattttataaatgtgttatgaatttatttctacaatttttgtgcatgataattatatttaattgagcaaattttaataacagtagtaaataataagcacattctaaaattgtgttaggaaaactattttatataatgaaaaaaaaatatattattataaagtatactataatactaaaaaaatcttatataatctagtaatctactatgaataacaaaaataaattatttatctatttattaaaataagatcaaaaacgtgttattattaattatacaataatatatctgcatacatagaaaaagaaaatgtgtttcatgttgattctctcctggaggctgaagcttatagtcccctctcggccgtggaattctgtagttcctcgggatggaatgatgcatggttctactctgactgtcaagttttggtgaaggctagtggggacagaagttgcccatcctggagactcaagcctcttttccctaagctttttaatctgttttgttgtggttctggggttaatgtgacttgggttcctagaaactgggctgcatcccttggatttgccattctctgtctactgaggagtgttgcccctgttcttgggcgtttgaacgttgtattgtaagttggttttgtgttttaaataaaggtctccttcctaaaaaaaaattatgtgacctacataattcaccactttcatttaaaaaagta

SEQ ID NO: 28703 - DNA, 3413 bp, Cannabis sativa
  modified_base (1358)..(1359): a, c, t, g, unknown or other
aaaaaaaaaaaaaaaaaccagatctcgacggtggtggagaggaacgacagggatggtggcgctgattgtaaagcttctcacaaattgaaatattcttctcacagattgtaaagcttctccatttttgactggtttgattttctctatagctcgatggatgattgttggtggtacttcgtagacgcttggttggcggttcgtggcggtttgtagttgccctcggttggtagttcgtggactgtaaagatttagggattatagttttattttgaatgtatgtaaattctcttttttttttaattattctgagatttgttttatgttgaaggaagttatggaacaatattggtcattatttgagatttacagaagcaatctggaaaaaatatttaaacatgtggaggaacttgcatatgcgtatactataaaaatcaaaattatcatctttggacattgcttcaacattcaaaaacttgcttttgtgaaatggtgtgggaagatataattaatataattaattaaattattttgataaatttataatatataaatagaattttaaaatattaatatttatttttttttataaaaatagatatagtgacactcttaaagagtagccgattctgacaaagtatgactctaaacgcctatagtgacgcacttagagtgactgtaaaaggggtcagtgacacatgtgaagtgtcactaaaattgtttttccagtcaccctcatattagtgacgcgcagtgaagtgtcactaaagagttttagagttactcaatgtgggtcactaaaacctatttttctagtagtgtttcttttttatgtataaggtccttaaagtctccaagagttaaccaaaaatattgagtattacaatccgctaagtccttcgataaaattcatctaccttcccaatcattcaatccatacagaaggccggtatgaaaaaattatcttttttatactaatgtgtttaattatcaaataaatataagtgtttgtcttcgcggctacaacaacctacataggtccgtctttgggtatatataggtctattgttgtgtttcgctaaaataaagatatagtaatgattaaaattatttttggtcatcgtttcttcatgaacgatatttttctaaagatactaggttattgttaggcgcattgcacatatacttagttatatttttagtttctaattttattgtgtgtttttttaaaaatttataaattaaaggaaactaattaattttttaatttcaatattaaaattgaacatacctaatattaaaagtaacaataataaaatagtaatgttacaaatagtatattaatatttatatatatattnnaattaatttaaaattagtataaatacaattaatttaaaacaaataatattaatatttatatataaatttaaattaatttaaaataaataatatttacatttatatatttattaaactaaccttactaataccgttaaactaaacataatattcttatcttcttaaaatattctgttaaactaacgaaaactgttagctagctacattttatatataaaggtatgaccattttgtttgtctaatgaaaccaggcaaacctttagtagattgaaactcaaaaatatttaaattatggggttttttcataaatatagacaaatatagtagggtttatttttatatagcataaataaataatgcaaaaaaatatgggattgaaaaattattaaagtttaaaatataggaaaaaactaataaataaatttgataaaacttgttataataagtttctccggaaaaatcactagaaaagttattgtcatcgggaaagtcactggaaaagtcaccgccggaaaaggcgcatcatcaccgaaaaaggcattgtcgtcggaaaagtcgctggaaaagtctttgtcaccaaaaatgtcactagaagtagatgtctcagatataaataaaaataaaactagttctataacataataatgaataaaaataaataactcaaaccagttataattgaaatataaccaattctgtaacataatgaataaaaacaaataacaaaaaataactcaaacaagttataattaaaacagaaccggttctataacagtgttataatgaataaaaacaaataacacggaataactcaaatccgttataactaaaatagaattggttatacaacataatgaatacaaacaagtaacacgcaataactcaagacaattacaattaaaaacaaggaaattagtttctaaaacactgaaatataaattaaaaacaaaactagttccacaccaagatacctcataacacataatacctcataaaatcgattataattatttttttttaaaaaaaaaagtggggatcaattccaaaaaaatattgaggcataaatataaaaagaaccatttccataacaaaataaataaacccaaataataacacacaataagtcaaatataataaaagaaaccagttatctttgtcgactagttaaaaatttgagacaaaaaaaatgattccataaagtaactaagataaaaactcacacataaaaatcagttcaataaaataactcaacaaaaatatccattcaatatgctccaactcacaaataatcatactcatatcatatctaccccaaaaatactcattcattatattatataaccggttctattttagttataacttgtttgagttatttcgtgttatttattttgatttattataacacttttatagaaccggttctattttaactataattggtttaagttattttgtattatttgtttttattcattatgttacagtttcaactataatcggtttgagttattttgtgttatttttttttattcattatgttaaaaaataagttctaattattatatctgagacatctacttatgatgacttttctagtgattttttcggcgacgatgaatttttggtgactttttcggcgatgatgacttttccaacgacaataatttttctgccaatatttccgacaccagcgacttttccggtaacttttttggcgccggtttctggtgaaattttttattgttttacaaatatgagatttctatttttttcacaaaaatataacataaaaaagtccatataaatgtaaaaaaaaaaaaaatccataactctattgaattatttaattatgccataaaaaagtaaattctaataattttatcattatatgtaatttctaaattattatacttaactatttaatttgtattttggccacgaaattacctaattattagcctaattatatttgacacatcttctgccatatatttatatactagatagatgttacgtgctaagtcacatatgataattttattttagttttt

SEQ ID NO: 28704 - DNA, 1739 bp, Cannabis sativa
  modified_base (1374)..(1385): a, c, t, g, unknown or other
tctctctctctcttattattttgattttatttattttattttctttaaatataaccacattcgtttcatccttgactttatatactcatcgttgaagaagtgatggaaaaacgtgcacctcacgtgactttatatattttgtttatggcatatataagtttaattttcgattgtaagtacctattacatgcaagttgacacaagttgagaaaataaattgaattgcagctgattttttcgagttttggtataagctttggactttaaaagtaccactgaaagctctcgacttgatatggcgggttgcttcaaattgtttgtccatcttaactcaattaagtggtaagagaattctagttcaaattatatgtccagtttgtcaaagaggtgaggaaattatttttcatgtgcttatttcttgttcattcgttgctcaatgttgttagaggtttttggctggggttagaccaattattgttgttgagttttgcagctggtttgatcaaattttgcaaaggtacagtaaggacaagtgtgggaaggttgttatgttgtgttaggggttatagaatgctcgaaacgagttagtttggaattaaaagtatgttgtggtagatggtgttcttatctcatctatgagttatcttctgcaatagaaatcaatccaaaatagatgtacaaaggcttcatttttagtttttgaagatggtgatgtagctaaatttcgggttaagctgaaagagaatacaattaaggtaactgttgatgctgctattttttgtgatcgagctgtgtttggttatggcatagttgctcgagactctcaagaggaattagtaatggctaagtcgagcagttttgttggtataggcgttccgaatttggctgaagcaagtagtataaaggaagcgctaagctggattaaaactcaaccatggcataaagtagagctggagttagattgcttgatagtagtccaagttattcgaaattcattacttataccttcttcttttggggttattatagaagattgtcataaacttcttgcatctataaataaagtttctttgttttttattaaacgatttgctaacataattgctcatagtcttgctaaagcatctcttgctctttttcagatcgagtattcaatatgggtgatgttcttattgaggtacagtcttgtcttttggttgatttgacaaattaataaaaattttatatttgtttacaaaaaaacttcaaattgtaaataaatatttaagtttaatttttaactgtaaattatatttttagaagttttgtaggtaccagtcaatggtcacgtagcattgatccaagtcattaatttttttatttttatttaaaaannnnnnnnnnnntaccaataagaaaatgacatgtggtaatgacttatacttttagctaggtacctatgaaagttcgaggaatataatttaggtattattaccgtcaaaaattaaacttaagtatttatctacaaccgatagttaaacttaaatatttatactgtaaattacataaaaataaatcacaatgtcatagctcatcaaaccatacaagttaagagcatggagagttaactcacgtgcaacttcattggttgatatggattagggacatttatagaaaactagatatcaaacttggtaaatgtcgatggtgcaatctttgcaagtgatggtcgatttggagcggcaggggtggcccgggat

SEQ ID NO: 28705 - DNA, 5821 bp, Cannabis sativa
ttaccattttccttcaaaaaaaaacatgttagaatttttttattaaaattgaacaaaagtcattaaatctaatttagtacataatttttaaattacgaaagcaaacgatacttaaaaatgaaaaaatcttcggtaactgaagcaccacagtcagagtcccctttcctccaaccgctgacccaattgcgtctgctctgcttctctctctcacttccattcgccataaccaaaaccttcctgcctttacctattcttgtgtttcatttcttctctaaccctgtccactcaattctcccactacattcttacccacgaccgccctttttgcctccataacctctaaatttctcttgtgttcactgccatcacccaggtattcccccactactaattactcacttattcattctgttttctaatatctaagctatgactttgaagttccaatctattatctttgaatatgacttcaaactcagttgttgttatttattttacttttgatttttttgatcttgtttcacaaggaatgtttggattgcatagcaaaattactcacttggatgtgaataggttttttcatatcaaagttaatctttcattagagcttttcagcttgtttaattaatggcagagtaaaggcaatgacttttgagttgggcattttcgaaaaaatgttctcttttgagttgggcaatggtttaaatcatttgtcaaatggtactttttgtttggattgcccaaatcaacttaaattaaatgaatggtctttaatatgtactcaaatttttgcttcctatacttgaattcttatttctgtcactgcagaatgaaaatgttaggctattgtttgcaatattcttttgtcattttcttcggttttagttcttgacatcatttgtaatgacttaaatttatagtttcttttaatttaatgtgataattactttgttgggtctgttaacaggttgttcttcgagtatgtattgtattggttttggttatacttgtgcctttacagagactgtaatagctgcttggactcatagagattcaatacaaggaagaaactttggaaatttaaatgtttgtgcatatgggtacttgggaaacaggtttgcattgagaagaaaacaaatgggtttatgtgggtttgttatgaaaatccggaaagaaggagagaaactggccaagaagaagaagaatgaagttgtgatatcttcagaagaagtaataagggctcttaagtctacaacagacccaaattctgctttgctctattttaagtttgttgctaagttaccttatgttgttcacaccactgaaacatgcaattatatgcttgaaatcttgatgagtcttaagagggtggaggatatggttgttgtttttgatttcatgcaaaagaaagtcgtttaccgaaatttgaatacttatctagccatttttaaaggtctttacattaggggtggaattcgacaagcaccaactgcgcttgaggtgatgagaaaggctgggtttgttttgaatgctttttcgtataacgggttgatctatttgcttctccagtcaacgttttgtaaggaggctttagaggtttacaacagaatgatcatagaggggatgaagccgaatttaaagacttatgcatcacttatggtagagcatttggtaagaaccgggggagatactcaaactgtaatgggtttgttagaagagattgaacatttgggattgaagcctaatgtttatatatttagcatatgcattacagttcttggaaaggaggggaaaattgatgaggcttatgatatattgaagagaatggaagaagagggatgcgagccaaatgttattacttatagcattcttattgatgctctctgtaaagcaggtaaacttgataatgcaaaggagttgattgtgaagatgaaagccatcaacagtctcaaacctaatcgtacaacttacactattctgttggacaagttaagagactgtggagaattggaaactttaaaagaaatttgggatgaaatggaggctgatggttttgatcatgatgtagttacgttcaccactcttattgatgctttatgcaaagctggcaatgttgataaagcatttgatactctgggtgtcatgatggagaaagggatcttaccaaatctttatacttacaacatcttgattgggggactatcaagatcatgtagattggatgaggcttttaaacttttcagtaagatgaaatccttgcatatcatacccgatgcaattacatataatacactcatttcgggtttagtgaaatctaatagtgtcgatgaggctatcgatttttactatgatcatgtaggtcgggacttttcccccgttcatcgtacatactacccacttattgatggtctttttgaggcaggaagacatgaagaagtaatgcttttgtttgaagagatggcattatatggatgcaaaccgaattatgtgactttcaccatacttatagatgggttcggaaaagcaggagatgtagaaactgcctgtcaattgtttaagagaatggttaaagatggaatgagaccagacttgtatacttataggtctctactggtacctttatgccatttaggaaaaactgatgatgctctgtattactttgaagtactaaagcagactgaccttagtcctgatatagttttgtataacaatttgatttacgcacttggaagatcgcggagagtagaagaagctctatctctctacaatgaaatgcagagcagaggaattttccctgatattttcacatacaacaatctaatacacagtcttgggatcgtgggaatggtgaagcaagcagtgagtttgtatgaagaattacaacataagggtcttgaacctaatgtttccacctacaatgctctcattcgagctcactcctgggcagggaatccagaccttgcttatgcaatttacgagaaaatgatagctgatggctgcaacccgaatgaaaaaacattgcaattactacctaaccaaacttgagtagacatttccttgaactgtgtatgaggtataaacccttagaataactttatttacaacactatgatttcagcatgttctactcaatgaacattttattttcagaaactttgtttagatggagattttccttattttaggatattctatgaactcaccgttttcaggacccaatggttggagggatgaacttaagaagcaacttcagcaaatcagacctagcaataacgtcttatttgtcatgttaaggcaaatacaaggtataaatccttctaataactttatctacagcacctgatttagagatttttgcctatgatttcagtttgttctactaaatgaacatttttcttcttcaactctgtgttgggatggagttttacctttaagaaagatcttatttcagattgtcctatgaacttaccatttactggaccaattggttggagagattaccaagtgactatttgttcaagtgcaattggatttctgacaagctctgtggtgagaaatttacatatgtgatttctagtatttttgcatcaattttagagtgggaacatagtatgttgtatattcagtctcctaatattacattttcctccacaactctgaaatgagtacaggcttcactgagtttgtagtcaagttatagtcttgaccaatcaaatgtcatagagaaatgtatgaaaaaaaaaaaaccgaaataaatcaaaatgataacacaccaattaatcagaaagagacattctaatattattgttcattgaaatccctttggcagtttgctgtaatattttattcccactgaggaaatacatatccatgacgttttactatgtaaattgtttaatttatttttttaagtatgtgaatcttgcattgctttattagatatcagccaaacatcttcaagctattctaactcaattacttttacttatacacagcaaagtcttcaccagggtaaatcagctggtaatctgcaagcaaaaggttcctcaaatcttcatttggtccaatcttcacaataacctttttatcaattttagcccatataaaatcagcttctgcagctaatatgttcccattgcttctgctattaatgtcatttctcttcctaattgcagtcacattggaaagctgtacttactattgttggggttcctgggtgagtgagaatataaacataaccaagcatgagtttttcttcaggaaaaggccaagtcttttgaaatcaagtatcttgattgtcaataaaggtcactgaactctcatgccttattccgatcatacctggaggcttcttgtttttgtccttcaaacgccacaacacaccgaaaactgcagcctgaagaacaccctttgtggtgaaatcaaaggcagtgatttggctaccagcagcctcaacccaatcaactagcattcgacgtggttttctttgtcatcccataaggtaaacttgtctcaactgcgaactatggttggtttgttccatgtaaatcttagtgatattggcagcgccccactaagcccatttcggttttcaattcgtccatccattctaataactctttttgtacttgtggattaaggtggtcgatctcaggtactcctccccagctatccctaggatccgagttctgaactcggtgtcatcttcgtagatgaatgatggcccccagtcaaggcaggcaagcatctggtgcgtagttgcaatttgagattttacaacactttaagttagattttactcttctaatgatttttttttttttttttttcattttttagttgtaatttgattatgggtcttattaatatggggatataatcatgcttcttgaaaaaaaatttcgaagaggtcacacatagtaagattactactagttaagaacacttaattttagaatttttaagtgatagactatcagaaaacaagatgaatctcattgatataaatattatcaatcattctatttaagtactcttcaaatacttttcaattatgtggttacttacttacacagtttcagaatcacacttgaccttccttggttgacgtgggcattacttgatatttcccttatagattatgaaattatttactgtcacaccataatatttctcatcttattacttttggttttgctaaatttataaatagtcaaaattttgatttaaaataaaatgtttggcaaaagagttaagtatatcctattaatatatttttatataatgttaaaaaaaattatatacatattatcaaatatttcaatgtataattgtatcaaacatttatagtacatttttttttttcaaaagtagcttttaggtttttcgaaactatactaaacggaccctaaaatgtattatagaatttgtgatttaaatcttttttttaaacagagaaagatattaaaacaattagtgttagttatttttagttagacagttatgttgagtcagttggaccttgtgaactctgtacactgtatatatattgtcctatgccattgtattagaattcaattcaattaataatatttttactctgttttttcattgcaaatgttctaatatggtattagatgaaacaaagtgaagctccaagaactcccttgaagcttccaagaactcaatggtgagaatcagagccactgcttcaggtaccaccaccagtaccgtggttgatgccaccatagctcagccaccatcccacacttctgcgcaaacacatactgatccatcttaggcttctaccgatcttcctcct

SEQ ID NO: 28706 - DNA, 2091 bp, Cannabis sativa
agtttaatgattttaacattgtaattttcattatataagatatttaaaaatttatagaatgtacatcaacaacttattttaatggtgagggatgaaaaataaaagttgcagcaaagcaatattattattattgttgttattattaaataaaaataattaaaaacaaataaatgtaaaatgtgaaaagtttaagaaagcaatgaatgagattgaaaaagtcatagaagcatttattttcctttcttgatgctttcttttgactgttacaaatttgtttcatttaatataataataataaaataaaactattattattagattattataagttaatgtttgtattgaatataaaaaaatattaacaaaagtttaaaaattaagaaaaatgagaaatcaaagaatagagaaagaagattattggtgctgccacatcaccatccctaacaacaggattatatatatatatagatgcttgatgagcaaggccatttacttggtaatgaaatgaaagtgttgaccaatatataacagatagtatatttgatattaattaaagatggaaacttctttgtaacatttggtatctttagaactctattttatattttaattaatgtttaacttgtttaattctatttagtcaactattaacccacttgaatattagaacaagttcaataaaagctaccaatatcattaattaatactgggcacccacttcacatttctaattaatataagtgttttcttttaagtaaaaagagaaaaattactagagacatcgttgctaaataaaagtttttgagttttagatgtaggcacagacttaacccgtttatatctaaatttttttgtaatttctaattagaaaaaaaaaaaaaaaaaaaagtttggaccctgttaaattgatttttatcatacacaaattttgtaaagataaaatttaattttaacaaaacaagaaaataatttggacattactttctcgtagacaatgcaaagagcttcataactctaactctcattttagttttaattcataactctgtttagagatttacagaaaaaatgtatgtcacaaacacctgaattgcttcaaattaatatacctactaaataaatacgtataagatattgatacttttctttaactttcaaatttccaaagcttcaatatgtataaaaagtgagagcaaatcctaaggagttggattgatttttacatgggaatcagagtgttttcatgtcctttgagcttcttcatacattttcttcagaatcttttgccttaacaagtggctctttctccttggtgattttggaagggatcagtactggtctctgatcaggatagagcaggaaatgttgacacatgaatagaatatcaaagaatacagatatctgcaaaaggagatcatccatttccgatcgaaaaaatttcgtgtcagctaaaatggttagagcacagaacaaatatgaaaaactgaagggactcataataatggagtactaaaaagaagcaaaaataacttgtatgatctgtgctttcttatgcctatatgaaacttattcaagtatttcaaatttagaagtaaatattattttgaacactgtgtttaagaaaaattatctataagagtttctattttattaaataacaattcagactctttattttttaaaatggaacataaactggagatgttatgaccagattagctatattttctatgctagaaattggttgcggcatgcaggttggttaagctcagtgtattattatgtaccattttgaaagataaagagcttgaattttcatataataaaataaaggatctgatcgataatttttttgtaaaatatagagtccaaaataacatttatcctgtatcaaaagtaaaaatggaactaacagaagtatgaggagtaattatagagactactaattcaagaaatggatagagttagttccataccaaagatagcagtgtcttccctatatttccataaaagttcacccaagaatctgaaaaggacaatgacaatttaaaatgcatcattatcactttaactgaaagtatatatacatat

SEQ ID NO: 28707 - DNA, 3112 bp, Cannabis sativa
taaaattgggaaaaattaattttgtagtagtgatttgttccattttgcaatatatgtgaagttcgaatgtttatttgacaaaatacgaaaacttttagagtatttttactaaacataagagtcaaattaatattttcccgattctgaccaaaaacaaaattaatattttctcatttcatttataacttttgtggttcttatttgttattatataaaatattttaatagatagtttttgctaatttaaatgttttaatttaaatatatcttcaaaatataaacaactttgagtgaaattagagaaacttcgaaaataaacatggtcaaactaattggtcaagtcacataccatctttttcatagaatagtcaagtcatgttgtctaaaaacatccaatgaaacattcttttctgttctgtctgccttctccttcctagttctgaacaaagctaacaaagcataatcctcgacagtacttagctaaaaaaggaatcatgtatgtagtaatttttttttttgaacaatggatatgtataatattatttacataactgaaaccaatagtaaattgatttcgaaaaaaaaaataggccttgttaaaatctcaagaatgagttttagaaaaaaaaaaaataaaaaaaaataaataccattttggaccctatattttacaaaagttatagattggacactatgttttgttgaatgacaaaatgtaccctgtattttccaaaatggtaaaaataggaccctgagcataattttcgacaactttcttttttaatataaccaacttgaagacagtttctaacacgaacaaatacagaaaatgtaaacagttttgtcataacacatttagatcggattattattaaattttttttgacaaaaaattcttatagggtcttatttgtactattttggaaaacacatggtctattttatcatttaccataacagatgatctaattaataatttttacaaaatataaaatctaaaatgatatttagccaaaacaaaaaatatatcaaagagatgttattaatagttattatcggccattactaatacaatacgttttttttaattaactctaaataatgacaattaattttaatttgtatatcttaatagttaatatatatggaatactttttaattggtattatccattgatgattactaaataaatttaactataaattttaattttaaaaatatcaaacaattagattttgatctactgacaaataataaaagtaaaatttctacacttaatttagctacttaattaaaaaaaatatatctttttatactatatcaaaaatatatttatatacaaattcaactttctttttttaatttttttttcttcaaccaatggaacaactccaacacatatagtataaaaatgagagattttttaactagataagaaaattaagcatagaaacttaaattttcttaatactacctattcatgggtaatgcccgttaaaattttagaatatgtagttgtttcctatgttttagccaaaaatatgtaataacccttgaggaagccatgtggcagtgggacccctcactataggacccgacaaaaataaaatgtgtccccatgatataaaaggaagaaaaaagataaggacttcgggagttttagtcatctccgagaggaatctctgggactaagagtatgttggacttttctcctctgggggaagaggttccccctaaagcagtacaacctcgtggtatgacattggcacttcaccaaggattgggaactatacataattaatgcgacatgacaaaggtcaacctactctctgccagagaaagtatgtttaagggtttcaacccatagttctctgacttcataacatctcatgcatcacttgacgactgccttgtgaattgtcaagtcatcaatatgagaagaagtcttatctcaccaaacactactttgggcccaagcgctttcttatagaatatgaaatcatgccctaaggccatgcatgggaaattgtgtgaaatagaatcaaacaagcaagacaaaggtacccttttaaccaccattatgaacctatatataccccaagaatgtagaggaaaggggatcagaaaaatcattctccgtaagaaaatatagaaataaaaatgactcatggactaaggctctttaatgccctaaccacgtaaaaatactcttcttaaattcacattaaatactcaaataaccttaattaattgttgccgaaaatcttggtgaatattttggtgatttcattgagagttgcatgaagctttctaaaaagaaaacaataatcaatcctataccacaatggtgctaacaagaaatactttgcgtcctctaaaccaacttgaagccccaaagcatccagatgaggatgttgttggaaacttgttttgccaggatcttattcactattcaagtatgttaaattatgactaatctaacatcctaacatgaattctttaaacaaaaaattaaacacataagagttatagaaaaccttcaagtggttgcagtataatattatgactcctttcgtttagatctctaaccctttcttcttgtctgtagcaaagtataatcaagatctgaacctaaattatccttcaggatgtgaaagactacatagtcttccacactatcctgagtattaccttgaattgtgtggacaatctctcaacactaaggagaacaaaattttacaaagaaaaccaagagaatttttgaaaatataaatagaataataataactttcttttgattcagttttttcagacatttgagagtcttgagttgttatgaatcaaaggtcattatgttctatttatagggagatactagggttaggttttagaatgaatgggctaattaaaaatgatatatatatatatataatgacactaaattacaagcccatggctaaaatcgagtttgaattttgtcattattttatttccttaaatgaaacagccttttctatcttcaaaaatgtcatttatctattataattatttaaatactaactttatctatttaataattataattagttattaaataaaattattatttaa

SEQ ID NO: 28708 - DNA, 1859 bp, Cannabis sativa
tataaatataaatggtcattatcaatctaactaattattactgttgagaacttgagatatagtcactcccactcatcatatatagtatacatagatttgacaatcctaccaaactaacctatctttttttaattatcattttgattaattgaagtacaccagtacaatattaggttaaatcaagttgtgttatttatttatttatttttggaaatggagcttaaatctagtattgagtaaaaaagtaccatgacttggaaactttttgtaaatatttttgataaattactaaattaatcacatgcattaaataactattaaaatttatgttaattaatatatatatataaatagatatataaaaaataataataataaaaaaaagatctcatgcctctatatctagtaacatcaaattactacacttgctctacatgcatgtaacatatcttgaaggatcttaattaatttttaaataaaaattttaattgaaaatgaattagagaaaaggagtaattaataagaagttccaactattattagaaaatcctaattagatccaacattaattaagggatcacaaatggtagcccatcatcaggtcccagcaaatattccctaaatcttcaactcttttctattttaatctttatcactgtgtaaaaagagatttttaggagacataagatcatgagatttggtgaaaaaacacaaaaagaaatatgtttttttttctctaaaatttatatatatattgttattttgtgatacctttttatcttcaaaatcttttctcaacatatactgcagttgcacatgaagtaaagatagaaaaaattgataattaaacactatattatggaccctcataactattcaagataaataacttttttttcttcttttctactcctaaggaaaaaaggtacttttaaatatgattagtaagactagtggtcatggtataaagagcaatcattttcaatactatttttgagtaaattcattatgggaataatagtaaatcattacacacatacctttcttttcaagtaaaaataattttctttcaaaaatatttcacaaatttgataccatgccaagaaaaaatgtatatttttttttggatatatactcaattcatatatattgcaattaggttagttaattaatatatttggaagggtatcaataattgattataattaatattttacaatatgaattgatttgttattgaatattttattaaaaatttaattaaaaataaaaatttgccctttttgactgaaaatggtaaaggaaatgaggaagaagaaaacatactttttgctttattactatattttttcattgagatctacaaagatgcaaatgggtatagttttcaagtatatagacaatctcatggagaaaggttgtagaaataatatatgtaatgttttggttatgcctaacactaatatcacatttactcactttgtcattaaaatctaaactattaggtagtgcaatgagtacttcatgggatttttggagtagtaataatatatgaggaatatttttgtgtggtactttttgaaatgtcaaaatatgattttatttttcaaaaagttattttatggaaaaattgaagaaaaagttgaaaaatatggaaaaatcagataaagagtgtaaccagagattcttatgaaaaatatgatattttaaaaaatattatttcatgaaaaaattgaagaaaaaaattaaaaagtaggaaaatcataaaatttgtaatttctttacaataagtgatcaataaaaaaaggattaaaagataaaagagattaaatatctatttttatatctttatatattaa

SEQ ID NO: 28709 - DNA, 2885 bp, Cannabis sativa
acaaagacaaattaatagctaggtatgtaataaggtagctatatagcatatatatatatagctacataaacaaacttaaccaaatatatatgccaacattttggaaccccaaataactataaagagaaaaaaaaaacattacttagagatgatgtatagcttgataaagacctcgctcgtgaagtaaatcatcgtacttaccatccaaccaattaagagagaatgatcaatacattgcgattcatccttgaaagagagagtgatacaattaattaattggctgggcgtgggggagatttgtaaaaagtaggatgattggtgttggtgttggtgttggtagcagcttgagtagtagtcttacggtttccgggtgtcaggggtctgtatggggttccataatctccgtaagggtcttgagcaaggcacaaacatctactattattacttgatacaccaatattaataataagcaccaacaaaaccaagtacctaatacacaacatcatttacccttaataataatagtactctggttttgatattgagttaaatgtacaaattgaaggagggaggaggttagagttttatagtctacaaaaaccaatctaatcttgacacttgtcgattcttaattcggtggggttggtattttaattagtaatctcaagtctctataatttatcttgttgactaggtcaatttcaataacctagataagtactactattctttgtgtgacaatttaatatcagtataaattgtaatttttatatattatatttttagttataaattttcttagtgataatgtaagtttaataaaagaaattagttacacttttttaactttattaacattatgtttagtatcgaggagattggtggatagagcacggaggaagaatgttgaaagaggaggtacaatttattgatcttttaaaatctcaaaaatctaattcttttatatttttgtaaagatttatgaaaagactaattatgatttttgcctcctaaactttaatatgtactattcattgaacattttttattgttaaaaattgattttgaatgaactattgagattgttagatttaaggatttttgttcaattttatacaattttactgatccagtgattatttatgtactaaatcatactctttagactttaatcaaccaaattatgtacattagtcttgtattttggtgtgagtttactttaggttgacttggtagtcaacttcaacctatccttataatgtaatatgtgtggtgttcattaattcctacaaatactacaacatcaataaaaaaatagatctaggacagtaaaggagctaggtttgaaaagtctcttgttattagttgttactattacttgtcatctttctcaaattgatcattacctagtaaatcaaatggtgaataatttgaaaatagtttcataagcctgaacgttaactattttaaataatttcatatctaatttgacctataaaaaaatacaacaagacgaatgaagactactcaagctaccccatgtggtacatatagtgtgtttagtacagtaactgaacttctaatcttgccacgaaactaaaagaaaaaaaaacatctacatcttactctccaaattaaatgtggctatgcaacaagggctattcgacgagagttagagatcactagggttttgcgctcattcgttaagttcacttgacctaatgttaggtgattgattaactatgcttctacgcagggttggtcttaacaaaaagtgggcctaaatttttctatgtttttttttttttggttgtatctaatgggtagaggtaattggtaggttatgacctatatttactaaaactttatgaaatcaccattttttcctccacatataaattttgggccttaagtttgggtgggctaggcacgagcctagcctgccttagcctagggtcaggcctagcttctaaagtcaattatcgttggcaaaacatgactcttgctttccaattggttctttttgcgtaaattgccatttcaacgaccttattctcccttacaggcttcctttatattgccctattgatgacttaaatgactattttattactagtcgacataatttcaatgaattagattcataaagttgtgtttgttcttcatacctataagtatagacaaactagagggataagttgagaaatacttttttttatattcattaatcaaaaatatattatatttcataaaatattcacttttatgagtaggttgtctaatatacattcacccttcacttatgtctagcatataatttatactaaactaaaaggtataatgggggcatcatctataaaagtgagtatatcttagaatatgaaaataaaagttaaaattaaaacaagtaaagtaaagtgagtatacaatataatttctccaaactagaccttaagtcccctaatttagagaatatcaaaatttagaaaaatgccatttttttctatatacaaattacagaaagttctgatttcataattatcatcattttataaatagaaagtagaaaaataccgtattttgattatacctccacatctcaagtctcatactaattaaattaggtaagggtttatatatttagatacatatgttttgtttttatttttgaaaatgtaaagctagtattatatagtttctcttcttactctctcaatatattttgtagagaattgatatatgtaatgtctctacttcaagtttttattgagtttttatatttatggaagggaaatttgattttctatacttatatatagttaatattaatttatccctaaactaatacatatcaccattaaaatatatgatcactttatctaaaa

SEQ ID NO: 28710 - DNA, 5612 bp, Cannabis sativa
  modified_base (1320)..(1320): a, c, t, g, unknown or other
tttttttttgtgaataacttattttcttcatttgttttaaattatatagaaaaaataagtataaaaacttttttgatgtaatacatagtgcacttctatatatatattttaataattcatttatgtatatagatatataaatataaaagaggtgttcataaaataatcaatccaattcaattcgcacgatttaattcaattcaatctgcaaagtgcggatatctacacttgtgcaaattgtattggataagaaaatctgaaatccgcaattgtatagattaatattcattgacatgtaaaaataactgatccaatccaatctacatatttatatatatttttttaaaaaataacaatatatatatatacaattaatattttaatatgtagcaaatactaatttaaaattttaatatttataaacataaatcaaatgtatattccattactatttataagaaatatgtaatctaaatcaaaattaaccattttgttatgcatacaatttgtttttctttttccgtttgttattgttttatcgtatttagtttaatttattgttggatacataaaacaatataattttttttattttatagttagttatgtgaagaaaaaaaaatattttcaataaatattaaataattcaatattaaaaaataatcaatgcaaaataatagatccaatctgtactttgacgaatttaatttgagttattatatgtggattaaattagataaaaaaaatttaaatctacacttaatgtgaatcgaaggcactataaataaaatggcatgcgtattaaatttgaatgaccatccctaaattatatagatgatattttagttgtaaagttttttgatgatggaaagtgattgtgatttttttcttctttctctataattagaccccatccctaatatagatgatattttagctatctaaaattttaattgtaaagttttctggtgatggaaagtgattgtggttttttttttcttctttctctatataattagaccctttgaatggacatttttttgggtatacggaaaataactttaaacaacaaatgcatatatatgatatggatggatcgatctataccaataaattgtagtagaacaatatcatgagcaacacaaaagttatattgattagtcaccaaaagataaagtagtatagtcacataggtactctatctcactcgttttaaatgattcttgtttagtaaaacgttgttaaacataaatcagtgctcaatttatgtagagtattgttcagtataaatatataaatttaatttttaattataaatanatatttaagtttaatttttggcgataaaatttttgtatatatatgactgttaagtattaagtaaattgctacgtgacaattaatgattggtcgaagtcattaaattttttattctttaaaaaaaaatagtttacaaataccaataaaaaaatgacacgtgaataatgacttaatatttacctacagagtttgttgacagtgagaactcgtcaaccaacttgtggccagaaaatcaacttatgcttctagatcggaaatgagatgaagaaaaagatgaaatgtaaactcaaattgctatcttgaaatgaagagaatgatcgagaaatatctattgctctcaatatggcgttacaagaagtatgattttctaactccctcttacatctgagatgggagatatttataggctttaatggcttgtacaaagtggtcccatggggacaaaacgtcgctttcctgttgcaagttgtaggtgttggaggtagtttgactcctcgtactcttgtctgatgtcaagtggtccccagttgcaagggacttgtccccggttgcatgttgcaggttccaggagagtggttgcagcgtacccttggttgggttctcagatcttgtaggttcgttatcgccgctacccgtacttccttggttgtagaattctcacaaggcgtggttgcatgctttctctatgcacgctttatcgttgtaagttcacctctcactttatatcataatcctcggaacacacttacacaacacacataacgactcgcatgcaaaaccccccaataagctcgtgtgtgaacccccaacactcaacacacacacgtctcacccccttacacacacagcttgatgcgagcccccatgctcatacacacgtttcccctttccctacacacacgcggctggcatgtgagccccccatgggcttgcatgtgagcccccatgcactcgcaccaacacacacacgacatctcttccccccacacacacggctcgcatgcgagcccccatgaacttgcaccaacacacacacacacacacacacacacacacacgtagcacaacactcacacactcacggctcgcttgcgagccccatacttacactaacacaccctcgcacatggcgctcatccacacatgtacaacctctccttcttacgctcatgcttttgtcattggatcattatgagaccaatcatcgaattgcacgggtgcatcccaagaattatgagtatcgatggcggcattgcaaaatacatactgagtaggtaagctcactgaatgtgcttttgttaatcgcttcgagattagttaactaacctcagaaattatcagtgctaatttttggggttaacacttgtcccccagtttccatgaatttctagaaagtgttcttgtcgactgagtgagttggagaatctgccttaccgaagtgtgagaccctcttggttttcttcgaggaaatgccccctttgcattggagggttcctttttttactaagtgacctcatcccccattcgttcgagcaacaatattacttgactttggctgaacaactttgagggtcactctttggcctaacaactttcgtaactggcattggccgagcaactctagatatcactctttggccaagcaatttttggaattggcgttggtcgagggactctgaagatcactctttggccacgccatttttgtaactgccgttggccaagagactctgggggtccctctttagccaagccatttttccactgtggtaagcgggcatccatttgagggagtatggctctttgagcagtctcaacctcttatcatttcttcatccttgtactcggatgggagtgggcttattgtacttgactgtgtcccctcttgatttataagtgtttacttacgtttgagaggcgtccctctcgttttagaattatgccatgagaatcttccaagagctctttgggctcggcaacttttgtgaggagaggtgtatttctttcatcaagcaagggtagataatccttaccgacataattttttttttgcctttccaagtacgtagtgtggcccatggtcccgcacccttggactttgtgtaacacacacatttttattatgcacataccttcctcgttcattgttatcattatcatttaatgaaagaggagggatattgcctttccattctgcaacaagatgtggttgactaatcctaatgtaatattccttatcaacaatagtatttcttcaagtttgtcacgttccatgccctcaatttcattgtgtcatccatgcgggctaacttgtaggtcccgggtgggatgactgccaatctgataggtgccttcccaattggccccccaaactcctgccctcagatccctagtatttgggaagaccttacttagcatcaagtctttggtcttgaaggcatgcatgcggactctcgaattatagtatcgtgtcaccctttgttgatacactgctaatctcatctgggctgcatccctcctttcctccaagagatccaagtttttttccattgctttttgattggcctcttcgttgatattctttacacgaaatgagttaagactcatctcgatgggaagtacagcttcacactcgtacaccaaggagaaaggagtttcgaccgtggtggagcgtggcgtagtcctatatgaccaaagtacatttggaagttcttccacccatcttccttgaagcttttccaactttgttttgaggctcttcttaattatcttatttgctacctcaaattgcccattggcccgtaggtgtaccaccgccaagaattccctctcaatgcgtctcttaccgcagtaagaactcaataaatctcctcaaattgggtcccgttagtggtgatcttgtaaggcactccaaatcacataacaggaatttattgatgaaggacatcacttgtttagcggtgatgctaaccaatgacacaacctctacccattttgtgtaatagtctattgccaccaccgtgtattttactctagctttacctgtcggtaaggccccaatcaagtcaattctccacatggaaaaaggccatgcgctggtcatgctcgtgagtttggccagagggcgcctactgtagctaacatgcctttggcatttatcacatttttttaccaatgtcgtcgcatctttctccaagctaggctagtagtatcccggcttcaacaccttccttgacatcaaataaccccctacatggttgtcgtattctccttcatgtatctcggataacacttgttgcgcttcactttctcttatacaacgcatgagtgggatggagtaacctcttttgtacagatatccatcaatgaagatataccaagaggccttatactggattcttcgtgcctccttcttatctatggaaaacttcctttctcagatgtactcaatgtacgacgtcatccaagatggttctttctcttcctcttgtgacactagatcacactcgatagctggttgggctaagaactccactggtacagactctaggacattgacctctcgggttgacgtaagtttagctagggtgtccacattgacgttgctctcccttaggatttattcaatcgtgaaatgttgtagctgctccagggaactcctaaccttggccaagtatgccaccatccttggtcctgttgcttggtattctcccctcacttgggaaaccaccaactgcaagtcgctgaaaatttgcagccgcgtgacctttaattcctttgcgagtctcaatctggctaatattgcttcataatcaacctcgttggtggaggccttaaagccgaactttattgcacaatgcattttgattccttcaagggctatcattacagctgtaatgactgtatgttagaatatgaattagtaaaggcaattattgttatgtattgacatttttataattatttacgattttattattttatgggtcccattattagaaataggcattagagttataatttctcaattctggagattttattaaactctaagagtactatctatgttaaatatgaattatgtaattttaatgatttttcctcggcgacgatggaaaatacgatggatggtcgttagagtcacatggataagattagaacctatttcttagcaggacaaacttacgagatatttagaataccaagtttgggcgggattatgacttttgaccattttacccctaggcttacaattgcttaacttaggaggtttaagggcaatttaagtatat

SEQ ID NO: 28711 - DNA, 1728 bp, Cannabis sativa
  modified_base (34)..(52): a, c, t, g, unknown or other
  modified_base (840)..(846): a, c, t, g, unknown or other
  modified_base (1335)..(1336): a, c, t, g, unknown or other
aaccatgcaacattaaaatgttatttctgatctnnnnnnnnnnnnnnnnnnnattatattgaaatggtttttatttagggcacaaatcccaaaacttttctttcttattaaaatctgttgggacgattcccaaggcgagtttggccatatgatcaaactatgtggtatactcagtgaccgacattccctcagtctgtactaactcagtaaactctttccgcttagccatgcggatggcttcatggtaatacttggcattaaacaactcccagaattctttccaggtcataacagtgacatcccgggtgagagacaccaattcccaccacactagggcgtcctcttggaactaaaaagtggcacaagtcaccagatcattaccaaccacacccataaaattcaagattcgttcaatcatagtgagccactgctcagccttcatcacatctggacctcctagaaacactgaaggtgcttgcttacagaatctttcgtataaccgctctataccattgccagcaacaggttattctactggcaccactagagttgcaacggcctgagcagcttgctgtggaggcacaacaagaagaccttgctgcctaaatctcaaaatttcctcatcttgttagcagattcgatcttgcatctccgcaaacctctcctcccaatctggaggaccttgtcgtggatttatagggcgaccaccttgagctctgccacagccacaactgcgaccacggggattctgggaaatttgatttccctgaccgcctccggtctcaaccatattatcctgacttcttgtattttgttgggcgtccattttataggacttannnnnnnaacccataagccaggcaggttagatagtgatcataagacttaataccgctcttattgaattaaaagcaacacatttaaaataaataattgtaatctaatatgcttcctaacatactttaataaccacataaaattctaaacaagtaccggcttactaaattgtgagccgagctttctctgatgaagattgtacatgttttggaaagctttggtagacaaacctggcggctctgataccaaaattgtaacgccctaaagataaggcatgctgcagtgcttttcaattacagtgctatctttgctaatcaaagatttttctcgaaatacgtgtcaaattaaaacttttataataaatattaaaatttataatttacataattatttacaaacaccgggatcccgtttctaaacttttatacaaaatatgccaaagtacaatttccaagtcgaacaacgactacaaaataaaatccccagatgtcccgaganngaacactccaggtcacgctgccacaacatgtacaatcccatcctagccatgggcactcctgttcagcttttgcctttcttttacctacacatggaagtagaactgtgagtcaaaaaactcaataagaaaatgatataacatatcatataatactgacttgtatctaggcgcccatacacttatttacagggcttaacagatgagtaagaacgttcaatactatggtatagccactataccacatacacaacgtacctcactgtatgagtgttagtagggtttgtttcgtactcggagtaccactgagtgatgtaccacacacactaagtactttcccgtacttgtgccagtatcactgtaatgtactcttaaacaatattcactataccaat

SEQ ID NO: 28712 - DNA, 3089 bp, Cannabis sativa
acacttctatgccacctaagagaaaaatcaagatcgggaattgagtgtgttatcgctatgtacactaaattttgattattaataatttccactcacatgaactctcattgtgaagataaaccaataccggaaactgttttgcttcttgttgggaagaagacaactagggaagaggggaaaggaatatttcttattgatgttggctttaattcaaatcaggcctccgagaaccagtgaccaataagaaaggaaaaaaaaaaactatctgaaagcagctaaataagaattacgagtacaatgtttggtattcaataacctgaaatgcctggaataagtcaccctttgtaaatctcaagctatcaactgctccttgtcttgtaagttctacagcatgcgcaagagcttgaatgtccacctgatttaacaagcagtcatgcaaaagtagagttgtgtaaaacagatactcatacttgaaagagtagaaacgagatgctaaatcctcactacagaaatgacaaaaataagcaagagcatgtattgagtctctaggataatgaagttgttatcctacaacacctaatacgaaagttcatggatcaagctacattcaaaataaatcacctcatcaaatgggggggcttcatatgagctctcttgaggtgttgcaggagggtcacggtcctcaagtagcaacctctcagtaagatctgatatgggtgaaaatattccttgacgaaagcaaaatcctttatgtatactatgcggatgtaaaaggaaagaaaagacaaaaaaaatccaacataatcagcaaacttagtaagtttacaactgaagtataaaacaaaaaagtacgtaaatcaaaatttattgaaagtaggctaaccttatcaaatatcttaatgtcattgaaaaaagaggatcataagcatgtagatgagctcttaatacagttgacaataatccggcaatatcaaacctcctcctttcagaccactaaaaatacagtacatattaagttaaacaagctaatagagaaatccttctacccatacatgaaaataaaagaaacagttaaacgacagaactctcccaaactcagccaagaacactcacacacaccagaaatttttctcttatttctcaaaggctgctagtctcagttagagactaagtccaacacattacaaagaatcacagtttgatataaccaatctccgaagactctaaaactgattaatacggcccaacaccacttatttattaccctaactaactaactactgctctaacagagtgaagctactaacagaaacataaacaacacttctaacaattaaactaaccccctaacagaaaataaaactcagaaataacaacaatcaactacattgaaactactaggacaattagttattcatcttgttctgcctcacataagcgaaccttatgggcggtctatcattaaaaatcatagttgcctactggtgcaagtggaaactatgagtacggtaaaaaaaaacaatactaaatagggaaaacacaaagagccatcctgtcaaaagaatggattacaataaaatcgtcacctcatttgccactggagaagtctggtcatctttgtcataaatgaaggcaagaagtacatgcttgaattcctcgtatgcttccttaaattgcagataaagaaatatgtaagactctacaactggataaaaggatcaatcaaattcatctatcacaacttgcctgtactaaaagagagtgggacagagaaaaaaaccaagtctgcttcaatgataaaacaaaagcaagggacacaagcattctgtaatgaacttgtcttaaaggttataaacagtaaactaactcaaggtttataaactcagcccttgatttttttaattctacttagtaattttcatacaattttctcccagaaatcccgctttatacacattagaaattttaaaaacttttgttatggacacaattatttaaactcaattgtaggtaacaaaaaccaaaggatagacaaaaataaactaccgggtaggcatcaagagcacaaggagcaagagaggtcctcaagcaatttattgcagaatcacgatcctccacagttcctcttctcaatagctcaataaatttcttcacagaaaataggcgaaaatgaattaattgaatcaatcaaaacagcaagagtcaaactttgaaataacaagagagctatacctctaattgtatagataaatgataatcttgattagaaataaatacatagaagatggaaataaaaattggataattaagattttatgatacttgaaatagaaaatctcctataaagtttagtaattaatgcattgtaagtgatgtccaaaacttcagtttatcataattatagctcaaactttctcaacatccaaattgaaagtatacaagactgattacctgcttatgtaatcggaagagaagcctgtgatcatcgagaatgaaaggtgcatgtgctcgaaggagatcgatagcggtatctacctcaccagtctccaaggaccgtctgatctggcgaatgattactctggaatgataagaggacgaagaaggaaacggagatgaagacgaagacgaagaaggcgaataatgtacagacgacggcgacggtgaggaagaagaagagggagaggagtcctcgattaggttctcagatttagcaaaatcgatgactaaggcatcgagtgcttcccaattaacgggcgtggactccattgaactccgtttggttctcgggaaaatctgttagaaaagcaaagagagaatatcgcaattgtcaggctaggaagatggaatttccttttttttttaattttttttttcctatgcgaagaggatgaaaggcggcgatgtgaggtgaaaaagtggattggccattatatagttggcacgtgtccatcacgtgtggtccggtaagacccttgtcaccgtgtaaaatgaatgtttcaagttttaagttaaccacttcaaacagaaaactaaaaagccagacacgacatgtcgttttattgagaataaccgaacactcaatttcatgg

SEQ ID NO: 28713 - DNA, 970 bp, Cannabis sativa
ccgctatttaccctaaatcatataagacccgatacttaattttacaaatagcagtatgagatgtacctaggacctcataccatttctcaagaactattaattggagaaccggggaagataatagtgacaatactaaaaggtcctggtgccaaaatctttgccttgttagtacagtgagtcatttcagtagtagtactcactttgtgttttgtttgtgtgctttattgtaataaactctgttttgtttttacatacatagatattctttttaattggatagcccccccacatttcatgtatatttctccacaagaccccaaaagaaagaccctggcctaggaccccccaacaacatcacattctttttcccaaaccagtcggccaatattaattagaagagacatcacacttaataaaaaaatatttaaatattgtacgtactttgatttttgaaaccctagatagcacaaattattaattattaaaagtttcattctacatttacaaaaaaaaaaaaaatcatttattatttttcttcattttgtacctcctataatttcattgtacctacttatttacgtgtataataaaaaataataatgtatgtaataaaaatatttaaattttattttgatgaattatttaattttttttaaaaaaaaaaattataagtcgtaaatagcatataacatattttattataaaaaaattgaattgaaaaattcttctaaattttaaacttttaaaagagtgtaccaaaacacttattttagagaatatatactataaaattatcttatattttaaatattatagaatattttttatctattttattacatgataatttagattatgtgttaacaatacataatgttgttgatcaggattagaatatcaaatcgggtcacaataatatttatggttagaaattttctttttccaaccaaaatcaagttcaaaatattat

SEQ ID NO: 28714 - DNA, 1070 bp, Cannabis sativa
tgcgttacatgctgttaaacatttcgttgggttaagttgagttggaggtgatatacaataatgaggatttaaaatgatatgctcttgttcttttggagttatgattataaattaactaatgtatacatatattaatacaatatgtttatatttttccacttcaatttttcttattgtcaatttatttatgctatttttggaaatgttctcttttcaaaattgtaagaagagttgaaccaaatgctatgtacacttgctgttgtatgttctgtactcactactcagctagtattataagacttcacaattaagaaatctaagttatttgcattgaatattgtctattatcaatgtcaagacaatcagtggtcagtttcattagaagctcctttcttgctaggttggaatcaaatagaaaacttgaatgcaggttagtgatctggttgtggtgaagctctttctttctagaatttattatttgctggtctagatggggtaggaaatgaaatttttgggatataatagttaagagaggtattgacactcgaatcatttgacaactatttggtgaaagtttggtcatagatgataacatgaatttcctatctgtgactgtaaatgatcatggtctgttatcgtggagtggcttggtaaaactttggtttgttagtgtttcaaaagaaagagggtctcagtaggggttaatcaaggggaatacacttgtaacttaagtgctttcaaggattaaaagaattggtatcttgcccttgtgcactagtttgtttagctttagctgtagtgtttgcgcttcttatcttttatttggttatttcgtttcttatttttcctgttgaatataattttaaaaacagagtaaccccaagaggtggcctagtggtaaggaggagtgttggaaagtgctagtagacatttgtttcaaggtttgaagccccacaggcacaaaaaaccttggggccacttggaggtctccctgtcgatcatccaaggccaaacatttaaaaaataaaataaaattgaaaacagaattgttaaagtaaaacactaatcta

SEQ ID NO: 28715 - DNA, 2990 bp, Cannabis sativa
ttttaattattttgtcaaacaatccaagaatcaggcaatggtttggttggctcatttttttgattctaatactgattttgtttccaacaagaagagttgttctaacaaaattacatcctaatgttttagttgattttttttaatagaattgcatatttttaaactaaatgaaaatattaattagttcaatgttttaaattttagacattccattcaacatctgatctaatacaattagatatttaatgttttaacggtcaattgtaattaattcggttaatttttattggtttggatcgattttttcacacctaacacttccaaatataacaattaaattcacaaacactatactccggaataagactgctataggtgtcttcgttttcgtttcattgtattaatcgttatagttagtattataagttagtcgttttggttatttaagattgttaatgtctgatttgttgtttgttatgctttaaactgtcaaattttagttgagtacagagtcttgattttcttgtagtaaccaatgatgggttaatgctaatatgctataattgcaaatcctttgttactctttcactgaaatttgtcttcgtattttgccttggttaagtttctacatagtgcaacacacaaacttttggtagcaaatggtatcgatccaaattagaagcaattacataaagacaatcacctcgaactttaccagtataagatgactagtggaacttctatggttagagaaatgaaaattcccaatacggcaaagcaaaatcaaatacttcttaagaaaaatatgtacatagacgaaagcttatacatttgcatttttttgcacaaaaatcattacaaagttgacgatattttctagtataaaattagaaatataaaacaaaattaaaactcccatcgagtaaacactattaggtaataggtacttcaagttcgaactaaattaaaaaaaaaaaaacacaaccgtcttgctaagctatttttctctggcacgttctctcacaacgttttcaccacgaacagccttcttttgctggctcaaacgccaagtttggcatcaaattctgagacattcacaggcaatttcgaccacccaagagactcctttgtctcaataatctttctacgcaaaacaatagataaactcataaccaataacacagcagcaactaaaggtatcaaaagaccagttctgcctggccaaagactcaaaacaacatcagcagaatcaagaccatcaaaactgcccattgagttactcaacttcaagatctcaaccccattaaggataccatcaatgacatacggcatgctgtccttcgaaggtccaacactcacattcaaagcaccagaaatatctgaaccagcaacaactatgtctgcatagtacggagaggccagcatttcgtttgtggcacttgataaatccaagttctccaatgctagtttcccatttacataaacattgaagaagagaagctcaagtgagatactagcaatatcacagaaatgcaatcggacaaggtaattgtatccttctccggccaccgggaaaacccatgtcatgttaaggttcgggatcgaaccgttggtgctgcggatcaatcttgcgctcttgtacacgttatccggtccaatttcgcggcttgcaaatccagtctggtacttgattcggccaccgaaatacaccctctccgttccggaactcgactccagatactcatcatcgacaacccatgttctccaaagagtgtcgttatatggtgtcaccttaggacctccaacgttgactctgtaaacgacttcgagagcttggttagaccagctatcgaaattcacgttttcattagagtttagggacaaggaagtattagggacgaggtccttgggagcagaaatcacctcgatcgcgttcacaaacgcgaattttgaagaatcagtgggaaaaaacctaattagaagtttttcggaatcaacacgaatgaggtattccttgatcaaaggggtttcagctgaattaccgccattaaagttgctcaaaacgacgtatttatcaacaagaacgtgaaattgagcgctaccgaaatcgaattttgaggaattgaatttttgaaaatggagacgtaccatgtggatccctttctctctgatctcgaatttgtactccgaaggcttctcgaaaaccctagctgtgtcgtacagtggggaggaaccggcgaaagaattttcatttctgagagcaacagaccgatccgaggggcagaatggtaaatttcggttagaccagtcgctggaaaatagacgattgtcgacggtggtggtctctacggagccgcagtttacgaggtggttgtcgaccggagagaaccgcgagtaggagaaagaaggtgggaacgagagtgacaggaggagtagagagatgacgaagtttctgtaccgaaactccattagagagatagagagtgtgttggggaatttcgtcttgtttttttgggggtttggattggaataaaggagaaatgtatgagttattgagtcgacactggagcgagttggggtccacacgtacgaatattacaggctgggaacgacgacgtctgatgaagaattgtctaagctaaacacgcgttgacgaagtcacttaactcacccaatacggcataacctccttttaattgaaccaaccaacacctcaaacgctaccctttccaatgtcgtttcttatgttagtaatggagtatggacaatgcttgtcttgttttggcaggggattaataaccaaaccaaagtaatttattgtttttaccatgtcttaattaactgttgccgaaattaaaagttcaatgatactcaatactcatcttcggcagctgtcctttattattgggtcttccaattcaaactcaactagataagccagcaattaattgaagaataatagaccaaacaactcgaatctaacacttttt

SEQ ID NO: 28716 - DNA, 2500 bp, Cannabis sativa
ccaaaaaaaaaataaaaaatgaaactttgtgtttgggtacctgctttggggaaataagccattgttcccaatgaggtctgagcttagaacaatgaaaatccttaatatcaggagcttccttaaagaaaacagagcagtaatcattctgaacagagagtacaacaccagtagaccagacactctcctcttcattccaagcatcaacgacgtcgttaggttcaggtggtattgtgaaaggccctatcaaagaccggtcttgttcttcttctttgttatggttgcattttctcttctttaaagggttgttagtacaaggagtaatgattgtggttggataccatgcgttggtgaagaagcctgtttcatcatgggttttccttccaacttcgactgatctgtaatctttgttgctatctaccattttttgtttcttgctggtgtttttgaagcttgtaagtgctttaatttcagttgaagttgtggaagaaaaagaagaagaggaagaagaagaagaagtgaaatggagaagaacagttttgctatttattgattattgattgtttgactctgaaaggaaggaggagtctactcactaaaatatttagtgaattaattagtaatattctttaaaagatatatttttaaattatgtgagacttaatatttaattacatatcgagtagactccgaaaagaactaataggaatgtacatgggacgacaaattagcaggaaatactcgtcctgtctccattcttgttaagaattttaatccatgtcttcttttatttatcattgggaatgagatggagaatcccctaagagggcaggaacagactcagaaatctcctaataaaaaaataaaatttataataaaattttgaatatataaaatattaaattacataaaaaataaaatattacacgctaattattatccaaaacataacttaaatttcacaaaaagaatactaatatattgaaaaatacaaacataaattataaactataaaatattactagaaatataaaataaaatactaaacgggtctctgtcggagtagggagtgtgatccctgttcctgccccatttaacattcggggacaaaaagtaatcttcatccccgtctcgtttctcatttaaacagagaatccccgccccattaggagcgggacccatctccatagaagaaatatgcatccctaagtgttaggcaccagtgatatcttttagcaatcctctatttatatttgccaagatatacatgttatctgcatcttcgcaaacatgacacgtgggaatcaatcgggaaaggtcaaggagtcattaagctgccaaagtgccttgctccatgctcccggaggagagaggccccaatttcacggagctaacctccacgagagaaatcttcccaggccacgagagagatgcccgcgagccaacaactctttccattatagaagatgggaccttatgcttccgcgaaggatacgggccctccaccgagacgcaccagttcggggtacgccattgacctgcggaagctcagcccacgcatgtcaggctacgggcccaatggtgaggcttttgcttgtacgatgtcagaggttgtctcccatgtcacgctaccatgcagagcacgcctgtccttgtgtactgtatcaaacgatccaacgactaagaataagggtaattcaaataagaacgaccctggaatgacacgcgtccaaagcactgctagtacagccagtacaatccgacatcagtaaaagttcacatggaaaatatgctacctaccaatctaacggtgggggttcatccttatgaagatccatcaaaagtggcccatgagaggggatcaacctataaatacccctgaagacacacaaggtaggggattccaagaccgatctcttcccttctccttctttggctcttcaccttgaaactgaagatcgattctttgtaaaacacaatactgtaaccccattattaactctagaatattcctactaagcttcatttttttcaagagaaacacagtggataggagtaaaagtccatcctttttttatatgtataaacagtcatcggccaaagagcttaatgaaatagactcgtggactaaggataattaacacccgaaccacgtaaaaatctattgtctataatcttgctatttacgccttcattgctgtcttaagctttataaatattaggttgccgaaaaacttggtaaacaatacacattaacataaaatattttttttctctttcatctacataagatttgtcatattttttgctccctaaaatattgattctgtaaaactttcgataatatggattttgctccctaaaatatacaacttgttaagaattcctcctgaacttttaaatttcagaaatttagtccttctgttaagttctgttttattatttcgtttaaacgttgtcatatctttgttaattaataattttaccccttaaactttgacaa

SEQ ID NO: 28717 - DNA, 3626 bp, Cannabis sativa
attggaataaatttagtgtaaaatcttattaaattcgacattttaatgttctattagaattagcccgagactaccatttttttgataaatttatatgggacaaactcacaaccattttataaacacacataaccaataaatttttaacctagttaattgatgataaataattatataataaatttttaatctttatatttcaaaacataaatattggcatttagttggaggtaatgaaatagaatggagtgaaaatgaaataattttcatttcattcctttgtttggttgtattttaaagtattggaatgacattctaatagaagaccattttaatgtaacattttaaattttattttattccattcttatttctatattttcattcctcccaaccaaacgcgacctaaattcttaaaatataaatgataactacctcagcaaatatatttatccatgtcgttgatgatgaatgaacaaataatatcttcgaatcaaacttgtgatataaactataatactctcaagtctcaagtcaagtgtgtacgttcaatatgctataaaatacctttttttttccaaaaaaaaaagtaaaactttttattaataaaatttaattaatatgataaggaagagctgctgcatttatcttcccccttgactgaattaaaatactcttatcatataattttcaaattcaagttttaataaacaattcatttcagaaaaaaaaaaaaaaaagtttaaaaaatcaattcgacactactttctaaaccatcgtatataatgcgttgaagcattcacacctctcgttacttgattatactcacatgaaagggacaaatttttatagtactgaaaatagtgtgaaagactctttcagcaaaaaaaaaaaaaatagtgtgaacgactgaatatgtcaaagcacaatgccatcacttttctgatctgaagggcaaataaatatactgttttggtgtgagttgtaattaatctaaaagaaagtacagataatggcgcgtgggactgggatccgatctaaagccaaagtacaaaaactgtgttttccttaacggagcacaattgccacatcacagtatgtgagtttttttcttttttaccatttcattataatgatagacatagtagttatagtagtatatgggtatatacgtgtagggttagaaagagaggaagttaggatttgagaatggatttgaggagaggacggcgtgtgaggcgaaagcgaaatactctccacagattcagccgacacaaacaagggacccaccgaaagcggcagcgacggcattcacgcgttcttttcttcatttaaaacaaaaaactattttaatacgtgtcaaccgtgaggaccccgctactgtcgtctcatccaaaaacaatgagaggtttaagattaatcaattaattaggttcaattctaaattttaattcttttcgttggacggcaaaaccatgagctaacacgtgccatccaccgcatatatacatctacagtacaacgtacgaaataatataatttttttgccgccttgaactacggaaagtaaagaaccagatgtaataattaaataaaaatatatgtatatacacgatctaaatgtataaaaattacatccacgcgtgagattatttatatatatttttttaattatttgggaaaaaatcataatagtcctaagtagatcaatgggtgtgggtacggcgttattgaaaataatttagtcatcaaatgaatttcaagactataataataatagaaaactcatagagaggttttaaccatgaattataataggattacagattctcagtaatattaaactagaaaataaaagtttgaggttgaaaaaaaaaaaaaaattcccatatctcgcctctaatcataatttatagatttatagctgtttaatatttttgcatctttagaaaagaggttggccccatcttatcttatttgagtaatgttcttgtccaggtaatgaccttttctccaagtattgattagttaattttatcaaaaatacccaaaaatgaagaaacatactacagttataaaatgttcaaaataaaaatagaaataaactgaatttcttcattatcaaaataaaaagggaaagataagaaaactgaaccaaatttacatctatgatggaagccattaaaacttcatcactctttcttagctaacttctctctttaaattctcgaaaggaacagaatttacaaaactaaagttaaaacgagatttcaccccaacaaagaggaaaaaaaaactttggtggctattagttattacaaaaattgttagattttctctctttttttttaatatgcttccccaggtggagcaaggttaagatcgagatcgagaactttccttggttgcccttcgaccacggacgacgaatccgactcgctttgaacctgggccccacctccagacccgaactctacagtacccgggtcgaaacgaactgggtagactggggtcacaaactctcccctactgagcgcgtcgaagaacaacacggggcgcgtgggaacaaaccctacactcggcacacccctatacgccgccacgacatggtggggcggaggagcagacggcgccaccacttgctcctgctggagaaacgggaacacagcgccaccgctaaggcggcgcgtggaatcacggtcggcgcagtcgttgccggaagactcaacggtgctgctctggctagggctgcgatcggcggatggggaggaaggaataggaaagttggtcttagccttggcgccgcggaactccctggcggcggaatcgtaggcttttgcggcttcctcggcggtgtcaaaggttccgagccagacccggctcttcttagtcgggtctctgatttcagctgcgtaacgtccccatggcctcttccttaccccacggtaatgcatctctttgccggcatcgacaatcgatttgttgttattagctttcttcactccgaccctttccttcaaagccatatttgtttttcttttttgttattatttttggtttaataaaaatgaattaaagttgggttgggtgtaatgggtgagcggtttgctttgttgtgtgctgggaataaccatgctttgagggtccttttatagggagatgtgggagctaatattttttaattttaaaattaattatttaatgagattaattgatttgtggcggtcagcaatgagtttgactgggcagagagggcgccgcccaagcattatgagagagaaagagagattagtgagttacgtgagtattataataataatattttatgaagatgctaaattgagtatattacgaagctacgtggcacgcggcaatttttagacaagcggcgagactagagctttcattgtgtgccggcttccattacaggcccatctgccgttattacggcttcctttgtgcttttatattacgctcttttattttattacgtgtcagcgcgtgggtgccacgctagtatattttatgagaattttatactattttcaactttataatttttaaaagttatcgattaaactttttattttgtcaaagggtaaatatcattttggactctgtgtttt

SEQ ID NO: 28718 - DNA, 1816 bp, Cannabis sativa
  modified_base (676)..(680): a, c, t, g, unknown or other
  modified_base (896)..(898): a, c, t, g, unknown or other
gttgcagcactagttgcaatagaagtttctatgtagaattttgtcaaaaatacaaaaaaaaaatattttgaaatataaaaataaaaaaaccttttattttatttgttagatcactcgtcctttattttatttcttagatcactcgttgttgtaatatatatatctatcaatatcatgatcgaaatctattatagagttagtatttaaaaattacaaccatccatataatattgttattgaatcaatacaatgggcctaataggtcacaaaatttcttccaatgtttatcactttattacttagccatttaggcaaaatatatggttaagtcaatccttttttttttttccttagaaaaaatgttgtcatgcaattcttacaaaaaaataaaagaaaaaaaaaatcttagggaaccttttatatgactatataaaatcttgagaaaatgaaatgatatacaactcactatatattttgctcatagtgcatctgatcaacactaagtgcagattttatattttagatacaatttaatttgcacaatagtttaagtccaatcaaatccattccgtacaagtgcggattggatcgcttattttatattggttactttttaatagtgaattatttaatgttaattaaaaagtattgttttcacataactagtaacaaaatnnnnnaaattattgttattttatgtctttaataacaaaataaaacaaataaaataacaaatattaattttaaaagaagaagaagaaaattgtatgtaaaaatatatgcataattttattttaattatattctccttacatataaaaataaaatatacatttgatttattaagttttaaaatatatttgtatcatatatattagatttttaaattactattnnntttacattaaaatattaattatattgtaatttttgaatgtgtggattgaattggattgcatcggttacttttacatgtcaaacaacattcaattcgtacaagtgcagattttgaattttctaatccaatccaatctgcacaaatacggaaatctgcactttgcggattggattggattggatcgtgcgaattggattggatttagtattttatgaacacccttatacaaaactaatgtttctatgtgctcttttagtgtaagttattattattattattattattattattattttcgaaaaagggagtaactctcattcaacattataaaataattttataaatttaaatgttgttgaatgttgatcaatatattcaacaactcaaataaatatgaaatgagcaaattaaagagagctaataaattatgagacaagtatttttgcatggttcggttattaaagaattataatccaatattgctgaaagttattgtatgaacacaacaatggcaaatctctcacagttattgcgttggctaaacttaatgatgatcgagatgaaatttcaacttctcttcgaaatccttttacaatgaggatattgctctatttatagataaagacaccgtgggtaagattagtgatggcctaaattaataattaaatataattaactcactaatggtgtggcagtcacagtcccgtgatctgtaagaggaatactcaataagctatgcaaccccacatctcttgaaaaaggtcaagtgtgatgattctaagactgtgtaggtatggaactacacaattgagaagggcttaaatggatcgatgggtactacctatgccaacaagacgaatcttcttttcagtagctataacaccctactagttcaggcacgctacagtgttttctcat

SEQ ID NO: 28719 - DNA, 3814 bp, Cannabis sativa
aagaaggagaagataggctctctgttagggttttcaatgtgcagccgtttatgtgcatttgggaaatgagataatatatatgtgcttttagggttatgtgcttttagggtttctaaatatatatatatatataaaataacctgttacaattaaaagtgggctgtcgtattggttaaaaataaaaactgggagttaatttttcttttgactgggtaaaagggtcaggtttgaccttgggaatttaattacttctttgctgtggtgtagggcattaaatcctacaactaacttagatcttaacaaaaataatagaaccaagaaggttcaggtatggtggtgagatacaggggtaatatcgtaatatatgtggatcaattaggtgcaagctctttactcacgagtatgtggatcaatgagttgcaagctcttatttccaagtatgtgggtcaatgagttgcaaactctttgtgtactcgtcttgaacaacttttattatgtattctatttatcacgatatggacttgtcgtcttgccagtcttactcgttaatagttactatacttatctcgcatcttcctatgttacagtgagtttgaatatttttatcaactgtaatttttgaggcaaattatttaatgtgcatttaataatgcaattattaagctgattcattttttttagtgcagtgtcagcttcttgctgttagccaaaattagagtataacattaattatccatttcaaacaaaaaaaaattactttctcaatataataagttactttatgccaaaaaaaaaaaaaatcaaattcaaaactcaacacatgcatgtgatctaattcaaattataggtgccaatgccaagttacttgatgaatcagaaataaagactaaaatcatttatggggttacaatttctcaataaaaacagctctttatacacaaaatcagttaaaactcaatccacaaaattcaaaattacagattacttcctgaaacaaaaacgaatactaattcaactatcaatttagctttgaaataaatcaagttatacttcatgcaaaaattcagtcaaaaatcaaaacacacgatcaaatttaaaattataggttaattccaggttacttcttataaactatttacaaaaattataaaattacacagcaaagacctatatatctgtcccataattctacgtatcacctttatataataaatacatataataaaagacagacacatatacatatagagatgcagagaaggtggtcaacgaaaactgtaaaataataacgtgtatgccactcaaagtctccactactctgatcagtagtagtggacatcaaatgggttggcaacatcctaaacactcttagctacttctccaaaccatatccaaatcttcattcacacaactttaattactactccctcactcccttatttctcagccacaaatttttggacataacaaaaaaaattatattatattatgtgacatgcacagcatatttatcattcctccaccaataacagctataaataggtgatgagattgttcaaatattctataacaactcaatcatatcatacaatacaaatttaggtctttcttctttctttctatatactctctaagcttttggaaccttattacactaatacttgtgacattttcattttcaaaatggctttatttaagtcacttcctcttctagttctactagttggaatgttattggttgttgatgaatccgaaagccgggttgcaaggaaggatctgggtctggatctaggcggtgttggagttgggatcggagcaggtatcgggttaggcttgggtggaggaagcggttcaggagcgggtgctggatccgggtctgggtcgggttccggttcaaactcctattcgtcatctgggtctagttcaagctcatcaggtggtggggatgcaggctctgaagcgggctcatatgctgggtcatatgccgggtcaagatccgggtcgggttcgggctctgaggctggctctagagctgggtcgcatgctgggtctagggccgggcctggatcgggtagaagcgaaggacacgggtcggctcaagggagtggtcgtggttctactggaggtggtggtggtcaaggttctggtcgcggtggtggctctggaaccggtgatgcctccggcgaagggggtggctatggcgagggttatggtggaggaggcagtgattgaattttgatattaagaaaaggccaagatatatatgtatgcttgatgaattaataaagctagaaataatttagaataaaatgtcacattttctgttataatatatagtcatgtattatatatgattaatgttctattttgtgtggcataaattaataattaataaattagtgtatattgagaaacttttactatagtcatgcagttatttgaaatgttatgtagtttttcttttctttgtatgtgtttttttctagtgtctctatcaattatagctttggagtaataaaattttatacgttcatatatctatctctatgttatgtttgaagtatgattttgtaatttttattattttaataatgtcacgatttatcatgtagcatttcttatatatatacattatctcgatttttaataatcctcaatatatatatctcgattttaaataatatacatatttatgttggagtatacatagagaccttagctcgattgattgaagggtaccaacacaaaagaaaaaaaaaaagaaagttatcccataagaatatgatttaaggttcttgtataatgcactaaaaaaaaaatgatgtacggatatctcttattatttcattaattatttaagatattttgtaaaattttgagaagtttaaaataatttacagtatataaaaaatagcattcaaataatttatttacaggcatataaaataaaaagaatcacacatgcaataaactcagactgtttaaattttatttttggtgtattaaatttttctaaatttctcaaaattttgtaaaatatttttaataattacaatatacataaccatgaaaaaaaaattgaactaaaaacttatcttgaatgccaaaacaaataacaaatatatcagtacatccatttgaaggtggtgctcataaaatttccttaagatttatttaacaaccattattggacaatgaagggccaaaggagttgctctgtcctccctaaaaaattgcttatatattttttataagatagaattacttccatataattatatataatgatatataaatattcaaagatgaacttaatattgatgttatattatttttagtataattaaatattaaattttaaataattttacatgataagtttttgtaaaatattgctaatcaattttaaaatatcacctcgtgatatctaagaggaatgttaaaaaatattagtacgtattggaatttagcactctcctatgtattaatattacaattaattcaattatgtatcaaattccatatagtttagtgtaataatttttaagaagtcaacatatctaaaggtgctagacactattggtgtccaataataatactctaattatttaaattgtaggtacaattaaaattgattaatcttctaattaagatcatgtatagctatataattagattttatattggaaataatagttatacacaattgcaagatgtaataaataaacatatatttaaccaatttgttttttttttcgcaaagtatatctttatatattaaaagtgcctatctaacggtatttcttggtttaac

SEQ ID NO: 28720 - DNA, 4773 bp, Cannabis sativa
  modified_base (594)..(595): a, c, t, g, unknown or other
  modified_base (1281)..(1287): a, c, t, g, unknown or other
caatcacaaccacatgagtggtgtccctcacttagggtataattcttatgttataaatcttgtgattaatcaatatctgagtctaaggtgaggagttttcaagggaagtgatggaaatgtcaaacaaacaaacgagtataacattttcaattacaaaagaaaagatatcctattttgttatgttctgtttttttgcttatagttgacaatggcaagtggtctccaccatccccacgccccgattcgtgcagagccgttattttgatttatttaccttatgcaatcaattctagcacacgcaaaaaaattgaatcaaagctacagtacagctagcactaaaattgtagtgcatgtttaacatcataattaaaaaactgttttttgttttcaaaacaaaaaattattttttgaaaacaatttgacttgtttggccttgttttttgaaaacagtttttagaaaataaagttacaaaaaaataagaattttgaaaataacaaaatgttattttctgttttaaaaaccagtttacttttagttaatattatttttaaaaaacacacgtgacttgtattttaaaaacttcaaaaactatnntttgttctcatttctaaaaataatattttgaaaacaaaaaacagaaaataatactaaacatgctcgtaaatttttgcagcatgtttttttctttttttgaaaagttttttgcaacatgttgaacgaaaaaatggtgattattattattattattattattattattaattatataacaaatgagtaaataaaagagatattttctctactatttttttagattaggtgggttttgattaaaaaaatatataaaagcaacggagagggattgagatttttggctaaaaaaaatgggatacgttgaaaaatactacttttttgtatctactaattaaaaatattctcatattatattttattaaaatatactaatttttttttactgaattgccaatatactctcactttttacttaagtctagcataggtatatcttaaaggatataaaaatgaaagtaaaaattaaaataaataaaataaaataagtatatcatataattttctcaacaaaaaaaaatacataagggtaaatattgttttttaagggtaaatgaagattcataaaatggatctgaattttcttcttttgatttttttattttaaatttatttaagttattctaattttttttgatttattagattttaaaaaataagttaatgttgtatataataataataataannnnnnnaaaaaaaaaaaaaactaatattcttatgttgcttaattcataatgaagtcttatatctctttttgatttgtcagacttttaaaaataagtcaacatgtgatacataattaaaaagacaaatataaattttatagtgttatgttgctaaattcattataaatttaagggtgtttttttttttttttttgaaagtaaaagaagctttattaataaacttctatcacgattacatcacgaatatcaggagtaaactcattactcctaatgacacgatcaacggcacaagatgaagctcgaacaattgtatgagcaacaccattgacagattgtttaacatataaaatagacacatcattaacatctttcaacaacgtcttacagtctgaaattacactttcaaaataggaaaacataggaagtggactacgaagagcttgaaccacagtaagacaatcggttttgatggtaacccgattccaacctttcttttttagccagcttaaagcctctctcatacccatagcctctgctatttctggagtcatggtgcctggtttgcagcaggaaatggcttccaaagcatggcatgatgcatccctaacaattcaagcaaagctatacctgttagcatcagaaaaaagagctgcatttatgttgattttaacttcccctgctgttggtgttttccacaaaattgcaccatgagctgttgtaaaaaaatgcagctgtgaaaacttgagacttatcttgcaccttgctccattgttccaacatgcgtgtagccaaaagattgacagcagccacattcgcacttttctccttccaaacacaatcatttcttactttccatatagcccaacaagtcatggctatgatctttctttgttcctcctcaaaagctttaaaataagtgtcaagccatcatttgaaagttccagcatagttcattgtaactccgagtcccgtattgacccagcaagccagagcaaaagaacactccaccagtcgatgcaatattgtctcactatccgaggaacacacagggcaaatggagtcaatgttgacatgtctatgcagcagatgtaccttagttggtagacaattcgaggcagctatcgacaatagatctttcaccttcggaggaactttaagacaccataatttaccccagatttcagatcccaccagctacaaatcatcttccttgctttgttgcaaatgtcgatacatacttttcattaaaaaatttcctgagctctcaaaagaccagaactaaacatcatcaatacgactttaatttaagggaatacttaagatgagttgaatatcccttgtattaaacaaatcacacaccaagtcaacatccaaggctaaacaattagtgaccataagagcagcaatattttgatttaataaagcaggatgactcgaactgattctcggattctcaccacaaggaagccaacgatatgaaactatattaatttcagaaccatttccaacccgcctatgtgcccccatcctaaccagctcctttatttcaaagatactacgccaaacaaaactgggattacttcccaattctgcattcaagaagtcctttcccacataatatctagcctgaaacaaacagccaacaagtgtgtgaggcctacagagcaaccgccaaccttgcttactcaataaagagagattaaaatcatgaaggtttctaaaacccatccctccttttgatttatgaacccttagcttatccaactcttccaatgaatccttttattattctttgaagaggatttccaccaatattttcacattaactgctccatttcattaacagttttcataggaagctagaagacattcatagcataactaggcaaggattgagccacagttttcaagagcaactctttgcctgctttcaataagaatttcccctcataactctgtatctttttcctcattttttcttttaagaatcccagcaaaacattcttatttcttcccaaaatactgggaagacccaagtaagtacttgcctctcatgcctcttaaaccttcaagatagaatagattctcgcacgaacatccaccccagtattagcactaaaaaaatagaggatttattcaaatttacctgctgctctaaagctatttgaaagcaatggagaagctccatcacattattggattcctcctcagtagcacggcaatataaatagctatcatcagcaaaaaaatatgtgggtaataacaggagctccacgagctactttacaacccctaagtttccctcgcctctcaaaatctaaaattagtgttgataggccctccgcacacaaaagaaaaaaataaggtgataaaagatcatcttgccttaatcctcgctttgccacaaaggacccaattcctttccacccgaaagaatatggtaagagaccgagctgacacagcacataaccaactggatccacttatcactaaaccccatcttcttcattgttgcctgaagaaatccccacttaattctatcatacgccttgctcatgtcaagcttcatagccataactccctctttacccgagcttttccgtttcagataatgcataatctcgaatgatattaaaatattatccataataagcctactaggaatgaaagcgttttgagattctaaaatgacatgatgaaggacacctttgaattggttagctaacaccttcgagactattttgtaaatcacattacaaagagcaataggccgaaattcattcataaattcaggcttagactttttaggaataaggacaatatgggtgtcatacaggttattcgaaaactcaccaaacataaagaattgttgcaccaacttcactacatccgaaccaactatgtcccagaacttctgatagaaccccgagttaaaactgtcaggacatggagatttatccggatacatttggaacaatgttttttttcaattcttcactatcaatcaagtcacaagatcaagattcatctcggatgtaatacttcctcgaacacaatcaatgacacggtcccaacttgtattggaagccgaaaataaatccttataatagtcaatcatcaatgtgctcaacccactatcccaattaacccacactccactgttatttttgagagaaacaatctggttatatttcttccgcgtattggcacaggcttgaaaataattcgtgttttggtcaagggttttcttttaattcattcaaaaaaaaaaaaaaataagtcaatgtataatattaataaaagttccaaaaaaaactgtttgaaattgttgcaagataatgaattaattctcatcactgtaaacgctttcaaatgggccgtaaaaaatattatgatggaagtaaattacatttgtatgtttttttacatttttacggtttttcatagaaacaacatgaaaataacaggaaaattaaataaaagtatcacgaa

SEQ ID NO: 28721 - DNA, 2679 bp, Cannabis sativa
acggttcttattttgggattcccaataaatatggaacccattctgatagggttggccatccagattgggacatgtctcgtctaaattggttcgatcttttcataattactagttctagggagtttagtaattattatagctcttctttatcgtctgatgactatggtaattttcttaagtgggagactatctcaccacatattttttgtttattttgcacaagtgtttatgtttttcttatgttgtctcgcagatctgaactttaagaatcttttatcaaggccccagattccaagaaaggcaaaaggcggtctatcgcgtcggaaactgcttcttggtagaaactagatactctaaaaaacattgaagaagtcaatatccaataagaagcgtgcctcaaattagcttgttattgagcctgaggtggctccaatttatcctcctatcccaacttctgcgagctctggtgaaccagctcttgggtcagttcatcaggtcaaattctctagatttcatcctaagacggccttctaggagccctcttgccccctgcccatttttacatgtattgagggctcgcaagtatgctcgctgcatgcgaccaacggctggtgtcactataaaaattttcaacaagaggactggaagttgatcaacaaaggtgattatcaaagtctgacatcaaggagcaatgatctcatgcactcagctagttcttattcattttgaattcatgtattatatttattttcatgagttctatcatgatctcattttttgtaggcattccttctgtctttgttgctcaccaaaggggacttcaaactatcactcagctaaacgctaagcttcgcaaattaaatgatcaatgcgaaggccttgcaaaccaatggaatgcgttccagactgaaatttctcgactaaaaaagtaggtggaagagcacgagaaaaaggaaaaaactctcaagacagaactcgatgtttccaaaaaacaggctgaggatctcactgaggccaaacaaaagacccaggaagcacttgacgaggttaacaaaaagcttgaataggctgaggaaaatgccatagctaggataaatttgatcgccaaatgatcatttaatcgagcttgggtggaaaatccaattacggacttgagctttctggcaaagggagccgctgagatgttagccttttgcaagcagaccaaaaaacttgaggcagaggatgctaagggtgaagaggttgaggaagaagaagaagaacccactaagtcaccaaccatgtaaacttagtgatttttatttcaatttccaaataatagccattagcccgagacgatggtttgccccttgcggcatttgtaatattatttaacttttggtttgttggatggacaacattgcaatatataaatatttacttttatgcctcttatcctgctttgctcgagttattaatgtttgtttattgcatttttattcataacaaaacacttttcttgatttagcttgggatattttaggtttaccaatgttatttaatatgcgagtagtttatattcttccatgttttcgcgagtagttagcaatcctatatgtctttcgggagcagttactagtctgctatgcttagagcaaacttcaaatattttgaaacactcttttaagaactattttaaatatttttggttgctcgtatgagtagttaatcctctatccatattttagcttgtctattatttttcaagacacgttgtatctcgtttataatacatgttataacatgcaagccgttattcattcagatcgcatatagcttttttgttgttttatgagaaaaaatctcatttacaactgccattttaactttcacttaaagaaaaggttttttcaattcttgactttgtattgtcttaagataatttttaatcaatcatcctttcctttgtgaaaaaaatttaatttttaggttttagcatttttgtatatatttctaggtgaaatctagttattataaatatatatgcccccatgtaattttaaagaaataaaactttatgattacttgaaatattcaactttttattcagaataataaaccactattataaagattaatacatcattatataataaattactggtaataaggttgtagatgctcactgttccagtgatttttttataagtgagccactaagccaagataattggtaaagtccagttccaactatagcttcaatgatgtacatgccttcatagttcgggtttaacactccagctattggatcttgcgtattttgcaaatacacatcttaaacaccaaatctcttactttaaagagtctctttcgaacttttttgttaaagtatctcgtgatatagagttgataagaaatattggttatttgagactcgttgaatttttcttcaagcagatccaacgacatattcagaaattcttggttttgatcttgattgtagaattcacccttgtgggtcgcaatgtttacttctacaggttacattgctttcgagccaaatgccaatgaaaatagagtgggtctgatgttgttttgtctatggttctatgggtccagagcacttgtggtagctcgtcaacccatcttcctttggcagtgtctaacttcttcttgatagtatctttcaaggttttatta

SEQ ID NO: 28722 - DNA, 3080 bp, Cannabis sativa
  modified_base (28)..(31): a, c, t, g, unknown or other
  modified_base (94)..(104): a, c, t, g, unknown or other
tctaattataaaattgaaaagtaaaaannnntttatagaacatgtttttgaaaaagattttcacttttccacttttaaaaacagaaaactgatnnnnnnnnnnntaccaaacgccaccttagttaaattataggggttcgtttggtacgttgtattagatcatattatattatattgtattgtattatttattgaattgaattatatatatcatatttttatataatactacactaaattttaatttatactaaaatattatatatttaggtgttcataaaagtcaataccacatatagttttacataaaaatattacataaaatacaattcaatataataatatacaatacattattatgtaatacgacgtaccaaacgaaccgtaaatgaatttattagagtttgggatgttagatgaagatacaaggtgatagatacattgctcttaacattttagagtaaataatttctgaaattctttacattataatagactaataatcatatattaatcattttaggtacattttttcaataaattaatgggtcaaatcttaaaaaaaatatctataaaatagaaaaaattgtgcaagaaaataaagttaaaaattcaagcctaaattagactatgttctattcatattttggaaaaagtcaaaacataaaaagatctctctttcatattttcggaatatcttgaatcatccaattccaagtaatatcaaaaaagttatagttaaaatactatcaatcatcacagcaggaaatttctaaaaagaaaaagataaaaaagataacagaaaaaaaaaaagatagaactacgatttttgtcttgtttaagtttaaattttataatcttcttagtatcttttagatatctttattaacatatataaacacgttattattagtatttttaggagatttttcagagctaaaaaaattcacaaactcttaattagcaagtaattgaggagtacgaaagttggagagcaaaatcaattacgaaggctttttcaacgaggttttcaacattcttatcttctctattttcttcttctattttgaattaatatgtgtgaatttgcaacgatgaatatgagtagctaaatagttatttaggatgtagatggatattgtttgacattgatttatagttttaatgcgatttaattttctcctaaattctatgtattctatttcatccgtacttaattatttttaattgtctgatcaccaattaaatatttatgattttaatgcaaattttgagaagtgagtatcaattatgctatagtaaaatagaaacaaattttgatataggatgagagtatctatatagttttgatagcttatagggtttctgtgtttaatgccttttacatgtttaatttattacgaaagtagaaaatttgtatgtaattgagatttatatatctgagaagactataaattacttgagtaaatatgctattgcatagaatttggtaataggaattaaatcatgttaaaccacaatcaatgaatacaattgaaatcgaaaactctaacttttaattatcgttaatttacctattaatttacttgcttcatgtttttattgtttttattattttttagatttaagtttctcttagatttgatatagccaaatagatgtaaaaatttaattttaaagtacttaactacaatctttataggatcgacctcagtctttgtgagtctattacttgtttacgatatgtatacttgcgtgttgaaaataccacaacagcttgggtcttggctctcttgggctgctaataccaatctctaatcttgttcaccacatttatttatttatttacttttttttttctttttcaaagtgtcacaataatttttaactcctacaaataacaataaattaaatctaaatcaaatatttttaaaataaaattatatctcattaatttcacaaaagtattaatataaatttaatttattgtaaactttgagatcaagaaatgtgtatttttactgttaatcataaggttacaaggagacaattataaaagaaagaaaaggagagggaaaacgaaaaaaggaaaaaaattattttcaattatttatttatataattttaaattattttttgataatatagagaaaagatagagaaactcatatattatggaatgtaaaagtttaatgtaaaataaaaaaaagagattttggtaatatattatataaagttgataatctattaagagtgctctagttaggaccgagctaagcatatgttattctagctattgcacaaaacttcctatattaaaaaaattatattttttatcatccatttatatatatatatataaataaatatttttttttgaaaatctatagtatacgtaataaatatatataagagtaaatatgtactttaaaaaaaataaaatcttatggtctcaattcacataattttaaaattcttacttattttaaaattgataaagtatttttttttcttaaaaactaatttataaaatattaattgataatttttttaacaaaaaaaccttatttaatttttcgtctaaggtttccaaacttgggccaaccgactagctaatagagtaatagaaaaagattaagagaaactcttgtgatagtttcccacagcttgactgtattgttacttttattcttcctctaaataaaaattgtggtgatttttaacactagatgcagaatctcttgaataaaagatttgataatgaatttacttctcttaattgaattacttagcatttttgtacaagatatacataagtatagttagttgccataagtataacttagttacaaatgacaactacaggattaaactaacactaactaactactatatatcttggtatatatatatattttaaaaaatgaatatattctattaaaatgcacaaagttcgaaaaaattcttaaagtataaaaagagttcaaaagattaaacaattaaatttacaaagagattcaaccactaaatatgtgactatctataacaagagttcattttgctagagaatgagttgtaaa

SEQ ID NO: 28723 - DNA, 2726 bp, Cannabis sativa
ccattgtcttgtaagacttaactaaatcgtctgaattagaattgtcatcaaatggtattggctctttaacaggatcttaatattgagcaaaacgttgaaatagagttataaatgatagtccttgaagttcgagaagctgacaatgagccaagataaatttttttagctttgatgacctctcttgagtatcgtcttcaccagccatgtacacccaagatttttaatgtgaaaactagttagtgaaatagaaaaataaatatgaataataaactagcacaataatccctaacaacagctctaaaaatttgatgtgtgtcctatgccatatcaaatttactaattatttttattgtaataattttaattatttcagtatataaataagtacaagtcgatctcatgaggactatgtttactccattattcaatgttaaacagtaaataaaggaggggattttcttaaagaacaaattaaacaactcaaattaagaaagcaaataaaatatgatgctacgtgatttaagaaatagctaaacgtttgtctccaccctcaacaatcatctttaatactaataacgaatgcaattttaatttttcaaacaaattattaatcccacaattaacgaaaaagcatacaattatctcaatctctctttgtaagtaatcaagacaaaacgttcaataattaactcttttaactacgcaataaatctatgaagcagatcatctaatcaagattaaaataataatcatagcattgaaaatagaagaataaaagcaattcaatataatgaaaactaagaaattaacattcatcatagcaattaagaatttatgttttaaattttgaaatagcccttaattaagaagaaactactccaaactagtcattataatgaaaattataataaagagtaaaatattaaagagaagaaaagaatctataatgatgaacaactgatgaagaaatcttcatcttcttctttcccttcaaaatgcagtctaaaagtcccaaaaaatgaaccctaaaagttctatttaaatccctaaaaattcctttgattttaattaaaaaactaaatttaaaatccaaaaattgtgctctcgctacggctaagctttaggttcgctacgacgagagtgcctagagcaaaaacccaaaatttcaataatgtcttcactgcaacaaacaaatcgctctcttcaaccatgactcgctcactggagtgaagctttaggatcgatgcactgggaggccacagttgaaaatttgatgctcgatggttccttgagtgcttaaatcagttttttagccagtactccgtcaatacaattcaaaattggacaattcaagatgatctagaaaaataaaaatgagatctacaactttcttgtagagctccaaatccagttctacctataaagccgtcacaatatgaaattacatttagttttgtcaaaccgagctctctaacttccactattttccaccaaaatgtgttaaaaccttctaaatgactccaaatgcatggttaatcttccaatagccaaaaaaattaaaatcactaattaatgatttaaaaaattaatttaaaaatattcacataaaattgaccatatttataagataaatatggacttatcaaaaactaagcaaatgaaagagaaaagacagagaaaataatagaaagaagaagagagatagatattgaagacaaagatatcttattagttttttttttttttgtcattaaaatgtgacttatatacaagtatgagctcaattgagcagaattgaattcagtttgaattcggttaaaacaatagagtagaatttgacaatcataactaaaactagctattaaccaacaagctaatttctctaccagtccccccttaaactggcgattcaagcatccttcatttgcaagtttgtgtctaaaaatgggaatttcagaactagaaatggttttggttagaccatcagtagtttgatctaatgtgaacacatgttttacttgtatctccttttgtaacacattttctcgaacaaagtataaatctagctccatgtgcttagttctagaccatcagcagtatgatccaatgaataacataagtaccatcgacaaaaaaatagtgaaatgaaaccatgaaggacgatcataaaacatgtcgatcaaaactagtgaaactagggccaagagtgacgattgtcgaccaaggccaatgaaaccagggccaagagtggtgatcgtaagaacctttaagcaaagactaatgaaccaactaaactggagatcaatcgtcattccaaagccacactgcaccgtcgacaaaaaataagtgaactagggtcaaagaaacacgaaaactagaaccaaatataccaatggtaaatattaatcaagaaatgaaataggattttcctagcggacgaccataccaaaaggcaaacttattagctattagtaatttaattaataggctatagactttcacttaaaagtgtactttaggtatttgcctagtggtaactgctgctggacagtacatctatctatttgattaatctcttaaaaatataatacagtaaaagctctatctaagaatacacttgaaatcaagcaacttatgttctaattaagaagttataactaaatagagttacactgaagaaaaaaatatcaaaaaaatatcaatgtaataataataacaataaataa

SEQ ID NO: 28724 - DNA, 3238 bp, Cannabis sativa
ggattttcaatgcaactgtgagttgtttcaaaatttctagtttagttggcccctctattgtacataatacaaccttttgaattctaaattatgtgttttaatttttatgttgttcttccatccaggtacgagaaaacatattatttggatctgaatttgaatctacaagatattggaaggctattgacgtaaccgaattacatcatgatcttgatatacttccagttgagtggatatgaatttatgtaatagcttgctcatttatatggaatgccaattgatggctaaatattatcatttcctcgttttattttaaaggggcgcgatctaacagagataggtgagcggggtgtgaatattagtggtggacaaaagcagagaatttcaatggctagagctttatattctgcagctgatgtatacatatttgatgaccctttaagtgctctagatgctcgtgttgctagacaggtatttgtgtcttactgatgttgcatttccaattatgtttatatttgagttgtaaccataatggattgtaacaccaacaaccaaagtcttttatttttgtatttttctttgtttccgttgctgatgctcattagatcttcttgcaatttttagggctcttaataccgatactgaattggtctctcttattgtcttgatatatttgtaaaagtcatatttttaatcatgtaaggtcacttcatctccaggtttttaacaactgtatcaaacaagagttagaagggaaaactaggctacttgtcacgaaccagctacacttccttcctcaagttgacagaatcattctagtatctgatggtatgattgcagagcagggaacctgtgaggagctgactaaaaatggaaaattgttccaaaaactaatggaaaatgcagggaagatgggagaaaatatagaagaaaatatggacagtggaagttcccagaaaagttcgattccagcttctaatggggaggcaaatggttcttctatagatgaaatcaattcaaagagagggaaattgaggaagtctgttctgatcaaacaagaggaacgagaaacaggcattgtcagttggactgtcttgatgaggtaacatcatgcattaatctaagaaacataatttgaaaatcgttactttatcttttatgttttgtcttgtttcatggggaactacatgtcatttgcatgtgccggtatcagtaaaacgtgctatgattaatttggaaccctcaaacatagaacctgaaatgaaatttgacaaatttatatcaatgctgcagtgaattatttccctacattacaagtctggctaattatgatgtcttgcaaatttagttattcattcttgtcctttgctcaggtataaaaatgctctaggaggcatgtgggtggtcatcgttctcttactttgctatttatcgacagaagttcttcgagtttcaagtagcacgtggctaagtttttggacagatcaaagcaaatcaacaagttataaacctggattctacattctcatatatgcacttctttcatttgggcaggtgtgtgatattgatatatatttcgagttatgttattctttacaaattagctcgttctctcgtttgcgcttgtcatctacctaagcgtgccattttcagctgtttaaatggttttgatgcttaactattttcaacatgccttaacagatttttaagtagcacattgaattcaaaattaagtaagaaatgtctacaatagtatattgtattcactattcattacatgtaatattttttgtatgctgttggtaaaagggtagggatacaatcacatgtataaatgtttgggtgttttcatttttgaaaacagataaaatgaaaactgggcataagtagaaacaaattttacgacaccatgttaattgctggctcctgtgtttgattcaggtgtctgtgacactggcaaattctttttggttaatcatgtctagtcttcgtgcggccagaagattgcacgacaccatgttacatgcaatattgagagctccaatggttttcttccacactaatccaactggacggataatcaatagatttgcaaaggatttaggtgatgtagatcgaaatgttgcaaatttaatgaatgggtttctgggtcaggtgtggcagcttctttcaacttttgtgctgataggaattgttagcacaatatccctctgggccatcatgccacttatgatcctgttctatatggcctatttgtactatcaggtatgcttaattgtttgctgtgttttttccaaatgtacacacaataattttttaagaaaagttaattaaagaaaaagacaagtcacatgtccttgtgtggcttcctaccaaatttattaaaaaattggtggaggaaaacttgggaaatatcaagattaaaaagaagcaaaacaaaagacataactagtacagaaacttgcccaatctctactaagatcaggaaatgatacacccttaaatcctttagctcgttaaatccaagttgctaccccgaaactttatttgtcctctgtatcatcaaaaaatttattatttcatcccccaatatggatatagaaagtataatgaagcctacaatgtcagataatattcagtcttacaagattgatatagagatatttgtgtgtctctgtactgtatagttgttagtttaacccagttgaaatatagcaaaacatgtgccatagaaatggaggttgaaggagcccgcaacttaaatcataatgataacaaattttcaatggtttagtaatagagattttgttcaccacggttttcctccgctataagtgacggtatcaattcataacggggggaggccaagacaagtaatctctttctctttttcaaaaaaaattgagctttgagctttggccactatttatcaaaatggttttgaaaataattatatttatgcaaatttggaattaagtaaccaatatgaaatgaagtatgtcttttttgttaaccattctgttggattgtattactcaaaatgggcccttttgttttaatcatatgcacacagagtacagctcgtgaagtaaaacgcatggattccattacaagatctcctgtttatgcacaatttggagaagcactaaatggattgtctactattcgtgcatacaaggcgtatgatcggatggccaacataaatgggaagtctatggacaataatatcagattcact

SEQ ID NO: 28725 - DNA, 3225 bp, Cannabis sativa
caatctcaatagtttaggaggcatttttaacgaccttaaaagttcagggggtatgatttagtacatgtcaaaattcggggagtaaaaattctaattaggcctttaaataactacaacgtaaatatcaaaacaaatataaaatgtaccaaaacagttggtttaaagggtgtatactactataaaactatccaatattattcgagctctagctcgacaaatgaaatttatatttatgtatatatatatttaaattagcaaatgacttatgtgccataaactgaaaaagaaaaaaaaaacaatagagtaataacatttttagggcgccgcctacgaattggtcatatttatatgaaaaatattaaaagatattagtgacgcttagcatgttcatattgttattggtataattgagtattgagtcttatataatttaagataataacttttagagaatattattaaccaatcatagagtgtcacctctacgtggtgttgggcaccactggtgcctaacgacaatgctctattttttatattattcaaaatctaacttttgaactcttatgttacttgccaagagaatttatttgcatgatatatatggaaaaatgctgaaaggtactaatttagtatcatttaaggtattatattgttattggtacaattaaatattgagtcccacataatttaatataatataatttttataaaattattaatggataaatttagacaacactaaaatatgcgagtattcaaatgtcatttgaacacctaataataaataagcgagtactcacttagaatagtgagtactcgaagaatataatatatataatataggcgagtatgtaaataatatagaacaaatacaaaaaaaaatatatatatatagtagttcaaccgggctcggcctgcctaatccactgttgaaagagattatctcttgcttggtttctttattcagatcagctaagccccctttgacaataattgacacattaattatattattatagcaattataaaattaatgtaacgtttttcacgatcgctctttgaatactcgtccgttagttttcattgatcaacgtgtttgtgcctttttatgttgatatagtggtttcattaaatatatgaggtgtactttccttgatacaacatctattttagctaatattgtgagattcttttgatactgcgagtcttattttacatgatgttgcaagccatttttgataccgcgcaaattctatagtagtcctttttacgagaaagagaaaatttatctcaataacaaatatcattaacaatttgcaaagtgttattttgtagtgatgctaaacacacttgtatctagtaataatgttcttatatggtatataatcatatttaatgttaaaagatatatattgtatctaatattcttttagatattatatcgctagtagtgtaattaagtatcaggtcaaatataaagtaacaaaataacttttaaaaaatattgttaactaatattatgttaaacagtaaatactatctgtgttcaataacaatactagtaaatcattcacttgccacctagctaaatagtaatgctctattattgatgagctctagtagtagtgtttagatttgtgacctaataacaataaagaaataagtacaagctctaatgaggataagattttattgtagcttccaattacaagactatcacattaaatgtagtcaaaaaaaaatatagttagtacttcccatgagttaattagttctttcaataacataaatatttatcatcacacttgttttgtctcgaactagcagacacacctattcaaagttccaaatccatccattaattctcaacacaattattaatactttttctaaataaatttaactaaaataattatatatgtacaatatataacaaacatatcttaattattcaaaccatttatgtagtatagattcatatcttctaaaagagaatcataatctacttctttaatatataattttataaacgacaaaaacacatgtccaacactcaaaattatattatatggaagtggcccttccaccatttataatttttcatttcaataataatagtaaaaaaaaaaaaaacaaatacataaataataagaaacattataattagtaattcatgtagttagcattttatatgtacttagcattaatttgatagttttattttaaaataaaataaacaatttgaagtgatgaaacttgtcactattacatgctaaattgctaattaaatatggtgaaatgtgttgattaataaaggaatattccgtatattaattttactattaataataatctcaaaagttgaattaattattaatcattaattatgatacgtctatttaaaatatgcactaaaatacagtaacatcgacaatattttttagctaatcaattaaggcatgagctacaatttaaaaaagtatttatgtctagttttcaattttacatatattcatgtattaaattatgttttttaatttaaatatgtactaaattaattaggatcgttctcatatataagtgggttagacttatacttaagactcatatttttcagaaatctaaaataaaaataaattttttttattaaacttttattttaataaaattatttactatataaacaataaatatttatatcttaattatttaaaatatataatatattatataatattatgagttcgaatctcataatatttttttaataattttatatataatttaatttgatggatgccaaattttgtaaaacaaaagccttaaataaaacacaaagtaccactaaatgtgaattgtagatgccatgtaaaatttgagttcaccacaaattgaagtgaagagaacaaacacaaaacacagtcataaatattggagataattaattaatggagaacagttgtcatcatcatgtggaaaaggttgacttagtttattgacttattttgacactgtcatctgtcaaccactagactataaataattaagatattgatttattttgaaggagaaaagtacattggtttttggagtagtgaatagtgaatagtgatctttggttcttctgccatgcatgtcttgtggaccaccattccattattatgacacacaacaacacaaacaattatatatcatcaatcaaaccctaacaatttctctctctct

SEQ ID NO: 28726 - DNA, 1254 bp, Cannabis sativa
  modified_base (497)..(538): a, c, t, g, unknown or other
ttccacgtacacttctaagttcttccccatgacgtcttcgaacatcttataaactagcatctgataagtttcttcgacattcttcagtccaaatagcattacaatgtagcaataatcccctttgtcagtttagaaactagtatgatcttgatctgccacatgcattttgatctgattataggtagagtacgcattcataaagcttaataattcatactcgatgtggagtccactatctgatcgatctaccaaagcaagaagcaatcctttgggaaagctttgctgagatccatgaagtctatacacattctccacatgtcgttaggcttcgtgactagcactagattggccaaccacacgggatacaattcttctccaagaaactcaatggaagtaaatttgtcaacttaataaatcgtttaagttgcgtttggaaagttatagaggaattgaatttgagtgtaatcggaggtaattacataatttgacacatttannnnnnnnnnnnnnnnnnnnnnnnnnnnnnnnnnnnnnnnnnttgaggggttccaattacactttctaattctcatggcctcccacgagaattgattgtaattacactatgtaatcactaaaaactttctattttaaatattatgtaacactttaatatctaagacaccttacgtgttttctattcatatataattttgacctcatatctaatcacacattatttttctgtgtaattaatgactattttgtaattctattatgtaattaataactagtttgttatataaaatattaggaattcatattttctttaacgctcaaaatgtgacttccactagtggtagttgtagtatagatcgggcggtcgattccataaggaggtgattatagacaaaatgctagtagaaaagtaaacacaaaaggttaataaaaaataaaaaataaataaccaaatgagtttgagggtttttgttttggtaatcaatattaaaagaaagtaaataaaggtgtaatcaatagtaaaagagagaaagacttcaagagttatccatatacttacttagctattttgtagttttgattcacaaagttcatacaaaagatgtagcattaaagattattatatttttacgtaacaagttcttacaaataaaaagaaataatttaatcttatgtagaacctagaaatgacattatacatcaagcaataatgcaataaaagattaaatataaaactaaacatcaatattattttta

SEQ ID NO: 28727 - DNA, 1642 bp, Cannabis sativa
atttaagggataatgactgtaattacattttggtcagccttgtaattaactaccactatgcaattataaatagtggcaaacaatctcaaaaaaagggacggaaaaactcctatgcaagcggccctgaaaaaatactcaaaaatttgaataagattgactcgtgaactatgcagaattttaactgcaaaactacgtaaaaaacccggtgttcatattttatttttctatagctttcactactacaaactatacttttagtgtcggttttaaactgacactaatacttttagtgtcagttcatagaaccgatacttattctacagtcacaaaaagtcaatttttggtgtcggttctaaacagacactattaacttttggtgtcgatttacaaccgacacttaaaagtatacataactacttttcttttagtgtcaatttaaaacagaaccattaaattttggtgtcattttataaccgacacttaaagattctttagtgtcagttataaaacgacaccaaaagacttatttgtgaatttttaaacacgacatacatatgactaaaacataaaaaaaaaaaaacaattaatgatgcgtaaaacaacaatattgacagcataatgaagaaaaaaatgaaaagcaacattattaaagaaaataacaccaaaataaattacaaagaggaaaaataaaagccatttataaatagtttatacaaaaacaacaagttaaacttttgaaattcacaaatttagattagaaattatcaagaactacacatgcacaaatttgttgttctcatcccgatcccatgatcatttgtgcacctgaatccattcattcgatgaacttctgttctttcatcaagtgctgtatgcattccaattccataaaatgattcgagagataaaccttttcatcattaccattaagaactcgtaatcattccatggcggttaattcagatttgacctgagattgttgagtagagacatgtttgtgttgcctcatccaaaccatcaggagtggttagcctactatgagattaaggggtagtatccatctgcctcattttccgaaaggttgaattcaattggctcgcctacaatgatgctaatctttcttgttacataatggtagaagaggtcttcttccataaggagtgctttgaggcattacctgtactatacttctattagactaaacagatagcaaacacgcttcgatcccttttattatcctttcctatattctaaaataagtatatgccaacaacgccttatcaatatcaagtaaaataaaaggaactaaaagctgcaattctctcaaagtaattgtagtcacaagccataaatgtttaataatatatatattcatatatcataatttagcacaacaaacaaaaaaaaaaaaattgttttcattattaacatgagattagctcatattttatgttatatagagtgatattatagtgacccatataattcattagcaaggccactatcaaaatcaaaattgttctatgttatgcaattaaacagaaccaaaattggtcattttgattattatcaaaaaaaaaaaaaaaagaaagaaataaggatagaaaaagataatcaacttcaaagttaatgaggctaatta

SEQ ID NO: 28728 - DNA, 2868 bp, Cannabis sativa
gctaaagttgaggagccgtgagagcgagcaggtgaagattgtacatgtcgggacagttaggccttgagcgtagatcctcgggacagcagcgcttttgttgtttagtcgctgggcgacaaatattttgtaagggaatagtaaagttttgtaattgtattttgtaaacgggatcccaaaattttataaatgtaatatattatgttttaaatagttaagcaaaattttaattatgcacgatttccaataatctcgttgattagaaacgagctgcacagtacgttaaaaatcacgctaacacgcctataatagttagggtgttacacaagctttcaaactgacaaaggaatttattgctaaaaggtcatgccctttggattaaagaaggccagagctacctaccagcgaatggttaacaaaatgttcaagaatgtattgggaaaaatatggaattttatgttgatgacatgttggtgaaatcaaagacttccatgagtgatcatgaagatttagaagaggctttttccttcatccaggactatggaatgaaactaaacccaaagaaatgcacttttagagtttctttagggaaattcttgggttttatagttagttctcaaggcattgaggcaaaactggtgaagattaatgcccttctagacatgccttcacatagaaaacagaatgatgttcaaaagttaactagaagaattgtagaaatttgtaaattcatctccaaatctatagataagtgcatacctatcttcaatgaacttcgaggaacaataagtttgaatggataacttaatgggaagaagcctttaagtaacttaaagaacatctaatgaaggctccaatattgtccaaagcaattgagggatagtcgttgttcttgtaccttgcagtgttcgatcatgctataagtgccccttcagtgcgagaagaagggaaggtataacttcctatttattacgtgagtaagagattgctgggtgcagagtccaaacatctcatgattgaaaagctttcgtattgcttactgattgcttcacaaaaattaagaccatactttcaagctgatgtcataagggtactgacaaaccacccactcctttaagtcctacaaaagtcggagtcatttggaaggctcctaaaataggcttcatatatttcattgtggaatgcgcggggatgaatgatgatcctgaaacaccaatcttggagagagaagtttttaaaatatatgtagatggagcatcaaatgaaaatgttctaaggctggaaaaattttgatttctcctcaacaacttcagcaccaaagtgccattcgatttgaattcaaagcctacaacaatgaagttgaacatgatgacatgattgctggcttttagttggctaaagaggttggtgccaagagtatcgagatgtacagtgatttgtagctggttataaaccaaatgtctagagagtaccagatgaaaggagcaaagattgacagttacctagcaaaaacaagggagctattgcaacattttaagcactactctatgaagcaaattccagaggataaaaacaccttcacaaatttgttagataaattgaaaacagatccagaagaggagaattatggattagttcccataacacatctacttacgccaagcatggagacactgggggtgttagccatcgatcactcaacttcctagatggccctaatactcaagtatttggaatcaagcacgctcctagaacataaagccgcttcgcagaaaatctaatatcaatccccttaatatgtgatcatggatggaaagttatagagaagaggattatcgataccatacctacggcgcatagatggaacagagataagagctatcatgcatgagatatatgagtgattttgcaaggatcacacattcaaaccctgtctttccaagaaaatcattctccatggttattttaggcctaccataaagatggcttccagtgaatatttcttctaatgttaacaattctcgccttattcaaaagttctaagatccccacaaatagagataacactcatgaatagtccatggcccgttgctattttgagaatagatttagtgggatcactttcaacaagaaaaggaggagtcaaatttgtcatcatagttgttgagtacttcactagatgtgcaaaagctgaacctatgaatatagtgacctccaaaaaggccttggacttcgtaataaagaacatcatgtgcagatatggaattccatgcaaaatagtatccgataatggaaaggaatttgacagtgatcaattcaatgacttctctatcaagcatggaatcatcaaaagctttttggctgtggccaaacttcaagcgaatggacaagtggaagttgtcaacaagatttttaagacagccttaaataagaagctgcaagcatgcaaagcacattggccaaaagaacatccaagagatctttgggcctacaagacaattgaaaaaacttcaacacgccacactccatactctatgacacatggatgtgaagcagtaatcctggttgaatccatagtgcctccacatatgacagaaacgtagggccctactcgaaatcatgctctacttcaaaaataactagaattaattgaagaaattcgagaacagtcatagtttcaactcaaaatgtacaaaaataatattgctagaaacatcaattccaaagtgaaaagtagaagatttgaaattggtgctctagttcttacaagagtatttccaacctctaaggagcccagagtgggggtcctaggaccaaactagtgttgggattttatgccctaaataaaacccattacaatctaatctaatt

SEQ ID NO: 28729 - DNA, 3106 bp, Cannabis sativa
tttttgttcattacgagaaagaaaagaaaaatgattttgtttactcaataatatcacaattttattgcatgaccgtatatctatgtctttcatcaacaaatataaagctggctatcgcaactacagatacacaaggctgaattcacatttccgccatggttttcctcaagtgcaaagaagctaatcaaaagaatcttggatcctgacccctcaacggtattgcctcgtggtctttctttatttctttcaaatgcccgatgatgatagtcaccttcatttactctttcaaggggctctgatattttctttattaaaataaaagaaggcaaatttgtatctgctacgacataatttctgaaatacatgtaacattattgcatgaaacagcgaattacgattgctgagataattcaaaatgagtggtttaagaaaggatataaaccaccaagatttgaacaagctgatgttaatgttgatgatgttgatgacatcttcaatgaatttggggtgagattcttgacttaattttgatttgtaatctcgttgcattagtttagagcttgaatttgctgctaaaagttctttgataacaggaatctggaaacctagttgtggagaggcgggaggaaggctctacagctcccgtgactatgaatgcttttgagctaatttcgacatctcagggcctaaaccttagttcactatttgaaaagcaaatggtaaggttgaacttggttcgacttctttctttcaaattggctgttcgcataaaagactctagttgaagacatattatacattatacttacgatatttcttttaaatatatagtatatacaatacgaaaaattagtatgactagcagcatttgatttacagtcgtagaatttagtgttatgatcatatgaatgtgcaaaatttaatgtttattctacaatatacaatccaggatgctccttgtaatgagtttaattaaatatcattgtctgagagaaaactgaacatttgtttctaccagggacttgttaaacgagagactagattcacatccaaatgttctgcaaaagagataattacaaaaattgaacaagctgccgggcctcttggtttcgatataaaaaaaaataatttcaaggtatggtgtctatcttctcattctggcataatgttactgcattgtatcttatatctaagactgttaccaatcctttctgtaatattccagttgaagcttcatggtgagaagagtggacgcaaaggtccattatctgttgcaactgaggtacatttattttcagccaaaaagttcaatttgaaaatcacttttcaaacttgctcttaagttctttcttttcatgtagatttttgaagtggccccttccctttacatggttgaagtccggaaatccggaggtgatactttggaatttcacaaggtatgacaaaaaagaagaaaaagtagccctggattttttattttgtttttcctcttttccatagcattctccacttggatcttcttgtctgttgtgaagaacatgctgttgtttgttacctctaaaacttattttctatcgattttaaagaagcataacgaaatgcaaattacctatcatagttaaagatctgagtttgacaattctgcttgttttatttacattttcagttctacaagaacctttcgaccgggctgaaagacattgtgtggaaatcagccgatgaatcgaaggatgaaacagagaatggttagtatttttctacaacaaagttatgcttgcttcttttttcttggtaaacacttgtttaattgtttctttttcatgacatttgcaggtgttgccggtattgccggtgttgctggtgctcgagttacaccgactaaatgattgagcttgtgttgtttacttctcctcacacacacacactctctctctctccaaaacaaacttctagtgtgaaatatttgcagaatgcattggaaatggaaactcagatttctttaagtgttgtttgcttaatttaataataaagtcttcacctcagtggaagagcaactataataataaaaatataaatatgtttatactgttttatttctccctaatatgttattttgggttggatatgcagaagattgtgtttttaatattttgggttaaaatatggtgtaccctttatctattatttaaatcatagaattgaatctaaatacaatatcaattgattcctacaaaatcatggtacgaatatttgcctcgtttatgagtttggatttagtttattgtatcccaaaataaaccaaaaataataagctcataatttttatattcaaattgatcaaatgattagtaaaattaacaatattttattgataatcagaatataaaaatattaataaataaatactcaaattttaaagttatgctccatagacaaagtgaaatagttttaattttatacatttttaaatagttttaattatatgttattatattttgtataatattcgagttttaatatcattttatttatatataactaataaatacaaatttattattctctctcaaaaaaaaaaaaaaaaaatacaaatttattattactatacattataatatttttttagtaagttgtactaatttatttgtgtttatagttctcctcaagtttatatttttgatatcgtgtcgattgtaacattgccaccaatttcatattttttgtgcctctttgactcatactgtataaaaaactaacttgtatttgcaatactagttgctaatgattagggttgacaaaatatatcatcgtgtcatattcgtgtcacattttatttgacccatttttatatttcgtgtcagacacgttgacttgttttcaacccacgtctaattttatcaattataattcgacctataaaaatcgtatcgtgttcatgttgatctactttaacatgttatactattggtgaagattgaattttggagaaaataatatatttaaaattatataaaaaaaacttatgtcgtgtaaagagaattctgtcgtgtttaacccattttcaatctgcacttaattttttcgaccctaactcataaattcgtgg

SEQ ID NO: 28730 - DNA, 1773 bp, Cannabis sativa
ttggtagtaacgaatatgagatctgcccgtagctgagatgtgagatcgtacggcctcgaggagacgtaatgcgccggtagcgacgacgtcagcggtgtaatcagggatctcgaacgaaacggcgacatgagattgggcagctagattgtaaacctcgtcgggacgaacaatgtcgagccaactacggagcgaagaagcatcggtgagatcggcgtagtgaagcttcatacgagctttgtgtgcattgtgtggatcgatgtagatgtgattgattcgctgcgtgttgaagtttgatgatcttcttatcaatccatggacttcgtaacccttgtcgaggagaaattcagtcaggtaagatccgtcttgaccggttatgcctgtaatcagagcaatcttacggtctggagcttcgccgccgttggtggtggtggcggattccgttttgagtgtatcgttgttgctttcggacgccattgttgatttgatttgagctttttttttgtgaaaatgagagaaaattgaggaatttaagcagagacgaagacagatctaatagctgagacgcggtttttttcgttatttttctgttaacgcatcaaaatatgacacgtggtgaaatgagggttttttagtaaataactacaagaaagtgtcgaatagaattgacgattttatccttggtgtcgtcggtgaggacacgtgaggtactgttgtgtagaaatttttttttattgtcgtatagaaaattgaggaataggaagatctaatagctgagacgcggtttttctcgttatatttttttaacgaataggaagatgacacgtgtggagaagagggttgattagtgaataagtagagaatgagttgacgattttatccttagggtcgtcggtgagtatacaattgggatctgtttggttatttatgtaagacacggtttattatttttgaaaatgatacagtgtaatccattttttgtagtatagactgtgtgcctatatttttcagcaagtaacatatttatgttattagtacacttaatattattataatggagagcaaacaagagttcattggaatcgatcacaccaaagcacctatttttttatttttattttttttggctttgctaatgtagtgtgaaatgttgtataaaaattaaaggatggttagagtggagaataagtgccacaaatgtatcggagacccttaaatggataggttgagcaaaggaaaggtttcaaagacaagaaatgatgtttttgtggaatactaaatgtcttacaattgatacaattgtaaaaaataatcaaatatgatgtaaagactagacttaacttatttttgctaagtcaaaagatatagattggattgagaaattgtaaatagattccaagctttgttacaaagtgttgtttaggggtaaaacatgttttgtagaaacaatactttacttattattgtcaccaaattgaatttaaaaatttaataagttagtaattaactgtaatttttgtagaaacagtactttacttatcattatattattcaagtaagtttgcataataaattttccataacagatgcacttatggtttccaatgctttacaagctcccttcaattcaaactcagcattttcagatttaataattgatgttgttagtcttttattcttttttcctaatataactgtttcacatgttaaacgttctgcaaataacgcggctcatggccttgctaagtttactgaaggaactctgaaactcagagt

SEQ ID NO: 28731 - DNA, 2775 bp, Cannabis sativa
tctagaacatggtggaaggtggtttgggggtctcggctcactcctaaaatgaagatcttcatatggcgtgtgttccaccactggattccagtcaaaacagagctcaccaagcgaggtatgtccatgaatttaacttgtaaccggtgtaagagccaagtagaagatgtttgtcatgctctgtggaatatccccaagttacacaaagtttggaagcactttgggttcctccaccatttcccttcttctttaaagcaagcccctgattttttaatgttgatgaaagggaaactttctgaagaattcttcattggcattacttggctaatttggtaccaaaggaataaatgtgtttttcagaacaaggacattgaagatgatatttggattccttgggccacggagatgatggagatacacttggcttctgctcaaactaactcccaccaaaatatttcaaaagacacggttaaatggtctccccctcccccaggtacattcatgattaacacagatgcttctcttattgaagggcaaccgggatgtggtttaggagtgataattagagaccatttgggtgctttagttactgctacaacagagttcatccctggctgcctctcggtgttactggcagaagctatggcaatccgtctagctctgaagcttgctgaaacaagattaatgcagaacatcttcatcgcttcggatagtcaatcggtgattaatgctctgaaagggaagactcacataaatacagattgggggtttgtgattgatgattgtattcaggctagcaaaaaactccttaacctgtcttttattttttctcttaggaagtgtaatagtgtagctcattgtatagctaattggagccgtttgtaccatgctactggtgtgtggacttcggcaatacctgattgtgcagctgcttttttggaagcagatatgcccctgggtgttagtttgtaattcagtttttatttcaaaaaaaaaaaaaaaaaaaaaactccatttcaaaaaaaaaaaaaaaacaaaacaaaagtaaaacaaattcggaattggaactgtggtccgtgagttgtacaccctacttcttggccttgggttggctctctccaatactgagctttctcattctgaaaatgccgccattacagtctctgcaacttcgacgactccttcttcgaaacctattttcttcatcttcatgcctctcttcttcttcgtctttcattagaaagccccatttacttacttcatcagaacttactcccgcttcttctccattccgccattaccaacccaccccttcaacctttcactttctctctctgccccaaattcatctctctagatttttttcttcctcgtctgaaaccctaatcgaccaagatcagattgcccagtctctctcctcggagctcgtcaaggacccggagacagagcctctacccatcgttgaacgccttacactcggcttctctcatatcgtacccactccgcctatagttctcgccgcgctcaatctctcctctgaagctggccgtacggttctagggtttaacgaatggctcatctcaaaccctaaatttgatcactctgacgagagcctctcgttcttcgtagattactttggacggcgcaaggatttcaaggtgatccacgatgtaatcctcagtggccaaggcgtggctgggcctaaaaccctagcttcagccattgataggttagtgagagctggtaggccaactcagacgattgcatttttcgagaagatggagagagattacggactcaaaagggacaaggaatcactcagattggttgtggagaagctttgtgaaaatgggttcgcaagctatgcagagaagatggtgaagaacttggcgaacgagtttttccccgacgaacgaatctgtgatgtgctgattaagggttggtgtgttgatgggaagcttgaggaggcaaagagattagctggggagatgtatagaggagggtttgagcttggacccatggcttacaattcaattcttgattgtgtttgcaaaatatgcagggaaaaggatccttttcagcttcattccgaggttgaaaaggtgcttcttgatatggacgtgaatggaactccaagaaacgctgagacattctttgtgttgatcaacaatttgtgtaagattaggaaaactgaagatgccttgaaagtgtttgatagaatgggcgagtggggttgttatccaaatgcagaaacttatcttgttctgaccaagagtttataccaggctgcgagagttggagaaggggatgaaatgattgatagaatgaagtctgcaggatatggtgaattgcttaacaagaaggagtattacagttttttgaagattttgtgtggaattgagagaatcgatcatgctttgagtgttttcgagaagatgaagaaggatggctgtgaaccagggatcaagacttatgatttgctgatggggaagttgtgctctcataacagactggacaaggctaattcccttttcaatgacgctctgaggagaggaattccagtggaacccaaagcttatcaggtggacccaagatacatgaaaaagtccaaggctgagaagaagaagaaagaaaagaagagggaaacgctgcctgagaagatggccagaaaaagaagtcgcctcaagcaaattcgattgagtttcgtgaagaaaccaaaacgaatgatgcggcggcctacttgaattctaacttgagaacatttcaaattttcgaact

SEQ ID NO: 28732 - DNA, 1610 bp, Cannabis sativa
taacgtacataaatatgaaaaaaacttagactaattttttttttttctaaatgccaaaataaattaagagtgcatcaatacatctcttttaaggaagtgcactgtagaatcaccatatacttttatactcaaaatatacacgctgatgttgatgttgcaaatttttgaacatttggagaaaagtagttagcatttcctagtgtgttacaagaaacttcatctagttattgtattgaaattttgttttactttgattattatcattagaataaattgtttatttgtataaattgttggtatcacaatcgatgacgcctttgttaaagacgatagagtaagtcaataactataaaaataataaagattaattgatcattaatttaatgagaattattaaaataatatatgtcagaagatcccaaaaggtacttacgtttagtttatagatcaaaccccaaatctcaatcaaagattgtataagatatctattattttattctatttgagtgtaataatatattttattaattttttgttttttaattagaaaagtagaattattttttaaaaaatattttttaaaactgttttttttatttttttaatttatttaattgacaattaaacttttaaaaatttcaaataataaaaaaaaaaaatactattaaaaattttttaaataattttttttcttaatcaaggactccaactctcaacttggaccttgggacccgaccgaccctattttcagactcgaatcaaggtttcatcttagacttagatttaaacttgacttaaataaaatcaaaaaattaaaattaaatcagtttttttttttttttaaaaaaataattaccaaaaataattttattttttaaaagtatagattttaaaaataaaaaataaaaataataccaaacacaaagagatcttaaccatttgttttttttttctcaatatggaacaaatagatgcacgtatcataatctcaggcttccagtctattatttggattaattaattttataaacattttataattttattttttattcataacgaacaagatggcgtgagtatccaacccatggtcccataccatgtttggaattaccgccccgctataaacgcgttaggggtacaacagtaaattaaggaagggtagtttcggtaaagagtgaggtatagacaccccattacggctatacggtaccgatcctttgtcgtaaataaaacaaaatacagaggacaaaattgtcgtttcggttacaccggtcaataaaaggacttaactataaattcatgtaaagccggcaaagtttcatttgcagaaaaagtggttaagttaacaacgtgggattaaggaataggacgatggagttcccgtttggttgacaatttttgaatttcagttatttcaatttcaactctgcttttgaatttaactatcacgattttgttttgagctctttcaattttcaatggcggaaacatctcatggccctgctagcttttggactcaagccgatgctctactgcgaaagaatctaacttttcaggtctctctctctctctctctctataaatttaatatcgatgtatatacaata

SEQ ID NO: 28733 - DNA, 2453 bp, Cannabis sativa
tgctctgctacaaaaatgaatcaaaaatagtattctttatattattaatgacaaaataagtgcatgtattaacacacttagatctgtaataatctcgaggactaaatttgtaaacccaatcccgcatataaaaaaataaatttaaaacacgaaaaatagaaataataatgttaaaacaattacagtttcaaaagtgtataaaaactacaaaacaactataaatatataatcacacatatacaaacgaaaatgcaacaatcatcttaacaatagagctttctctctctagaaaacaggtcctaattcgtgctcgcatgtgaggaagacaagatttatagattccattcttggaatcaaaccaatttacttttcggatgctgaagaagaagagtagtattgttctcgaggagtgtgtgatcagattatacttctaggaatccaggagggaattcttatgcctctttcagctaaatcttatttgcaatcgattaagcaacaagaggagattaggaaggactttgctcacttcctagatgcttcgaattgatgctctaagagtatttctcaaggtaattcccctgttccacctgttcttcgatttggttcagtaatgagaaacctagagaattcattctcaaatttagccactagtagaaaagttaagattactaacgatgatattaaagaagagattgatttctagaaccctttaatagtatgctatgtgttgggagctaatcccccattatcaatcttataaggatttgttaggagaatgtggagtgataaagtagaaagggttggaatgctttcatatggcattttcctcataaggtttaactcaattaaagatagagatgagagcctcaaaggaggatatatattcttcaatagaaggccggttgtaatgaaaccatgggaccccaaaatcaatttcaagaaagaggatgttagggtggttcctatttaggtccatcttgatgaccttgacttgaaatactggggtcaaaaaatttcaagatgatgggaaatttggcaagtctattatggtggatgatgctacaaaaaatagagaaaagcttagcaatcctagagtgttgaaagaagttgaaatgcagcaagagtttccagagactatagactttgagaatgaaaatgataacaacaccacggtgcttatatattgacgagaaatcatgtgggcacacacttcatgacgaggccttaacctcactgggtgaaagaaaaagtgacaacattaaaaatacttagcgtatattgtacgatatacaaactaagtatagatagtatgacgagccaagataacagacagcgaggtgtttatctcgctagaaggtggtatacatgcgaggaagatcctctcggcttccgagagtatagctatcaaagttaagacaatattagtctcgagaagttaaaatgacaaacagctgctcgctatcaaagtgatcttgactccattctcggtgagacatccctatgagataagacttactgtatatctttaattacgcgttcatctaggcccaataaaagcaggatattcacagttgtgtaaaaatctcatttatttggcttgatttgtaatcaaatcccacaattttagggataatggttgtaaacatattttagtcaggtttgtaattaactaccactatgcaattataaatagtggcaaacaagattaaaatggggggatggaaaaaactcttatgcaagagactctaaaaaaaatactcagaaatctgaataagattgactcgtggactgtgcagaattttaactgcaaaaccacgtaaaaaaccctgtgtccatacatcatttttctattgcttttatattttttttgttgaatcataatcgtgaggctcaaatttagttaacgaaaatttgcgttaatagaaacatacttaattcataaaaaaaatgaacaatctataaaatatcattacgaatataaataataacaaataaataacatcaaataaacctaaaaacaataataaacaaaaataacaaaagaatatatcataggaaaagtgaccaaaaccatagatagaaataataaaaaaactataaaaaaaaaaataataaacaaactactatcaaaagcaaaaccatcaatacaaattaaagcaagcctaataaaaataataaaacatataaaagcataaaagatagaaaaatcaaataaagaatatacacaataaataagaaataataacacaaatagaaactaatttcaaagagcaaaatgattacaaccaataaaaactaacaaaggaacaatacaaaaaaaaaatcaatataactaaaaaaatctaaaacctaaaataaattcaaaacaatatacacaacccacaaaataaatacacaaaatatcaaagttgggagaaaactaaaagaaaattataaacaaacctctgaaccat

SEQ ID NO: 28734 - DNA, 1945 bp, Cannabis sativa
  modified_base (1173)..(1184): a, c, t, g, unknown or other
gcatacaaactaagcataagcatggcacctgcatgcaccacaacatgcgccactacttgaccaccacttggccaacttgtgggcatcacttagcttgtaacgtgccatcttggactgcacgtaacacttaacattgctcttttcaccaaatacatttttatagtacaattttttcgaagagcatcttaactttttcaaacattatgtcaaagcgtctagatcgccaatttttcatgggcctctacttaagaacaccactaaattacattgtatacttttttaaattcatgtctttaatttttattctctctttcaaaatctattatgtttacctcgtttttcaatcattttactaattttagccctattatttcacaatagtctccattcttctctaattaaaattttatccaaacatatctacaaacttacacatccatctccaaagaacattattttattatttttgaaattatgtcttagttatgtgagggtgtaaagataatttaggtacaattcttataaaaagagttatatttaaattaaattttatttaaaagtaaatttgattaatgtataagaaaaaaagatattcttcaacttctccctaattaagaataccctttccaagcctaattgaattccactctttccttaatttcacgcaaaatgaagggataaattaaaaaaaaatatccttttttaattatatccattaatcaaaaatacccttatattatattttattaaaatatacctatttttatgagtgggttgtccaatgtaccttactctctacttaagtctggcatataatttacattaacctaaggggtctaatggagatatcatatataaaaatgggtatatcttaaaaaatatatgggtaaatggcggcaaaactcctaaaagttttattttggtttcacttaacccccaaaacccaaatttgggcggtaaaacccccaatactcctattctgttagcaatttaaccattctgtccaaatttagctgttaactgccaggttggattgtccacgtggacacaatatacacgtggcacaattttattggtccacgtaaataattattttaaaaaaattaaaaaaaattaaaaataaaataatttttttcttttttttttctttgtttttttcctttttttttcttnnnnnnnnnnnntttcttttctttctttttctttctctgaaacatctctcaatctcctctctctatctctcgcactatccccttctctttcttcttcttctgtccccaatcctccacaactaaccacctctgaaccgcaacttcctccggcctcgtcctcctctgccgacttcgaagccattaaagccaccacccaccatctcctccatctcagatccgccattaaagctggcgaacaaagatgtagcttcgacgtggttgtggaggaggacatcggggatcaccaagccagctcggatcgatctcctctctctttcccgatctcttctatttctctttatatttagggtttttaaatagttgtggggaaataaatttagggttttcaaatattaattttggagttaaggtttcgtatatatatatatatatatgtgtgtgtttgtttatttgttggatttggatttgtttgaattggtttgagcttggttttgttgtttttttgttttttgtgatttggatggttgtggtgataacagatttgaagaagatgaagaaaaagaagatggtggtggtggttggtaacagtatgaaggaaggaaggaaggaaggaagatggtggcgatggcgatggctggtaaggaagggaatggtggtgggtggtggctggaattaggtttagggttctgtgggtggtggttgggaaggatttaggtttagggttcatcgtgacaaagaaaaagaaaaagaaaggaaaaaaaaagaaaaagaaa

SEQ ID NO: 28735 - DNA, 2414 bp, Cannabis sativa
ccaatatattaagagtaagccccacttgatttggcttcaaggtttgatagtaacctctccaatacaggatgccaactacaattaagatacatacactgaagccattaattaactcatctttttattagaatcatacatagtacactattaaaaagtcacacaacacaatctgataaaaaaaatctgttacaaggcatgataaacacattgtaaaaccaaatttctacagaaaccaacttatgatcatcacaaaatataagaatctatatctatactttatttatgtccacaagtgacaatatgaaatcaatagtagtactaatagtgggatttttatgaatttgtttattttattatgcttcaactgaaaaacttacaaagttaaactaatctttatttatgacaagggcaaaatctccacttctaaacttgtccatctggaccttaaatgcaggcatagcaaactctcttaaagtcaccgaaaccttgaaaccatccttgttccctacactggccgaagagtaaggcaaaaaatagcaaggttcgagccccccaagaaggtgcgtggagaggggtaatacagtgacaggaccaccccaaccaaaatcaacattagagtgtcctaagtgtctccagtccgtgaacccactcacctctttcccagcagtaatgccttcaccataatgcaagctctgaaagtcgatgaaggaccgtacgtactcctcagtggcgtttcttttgctcatcttgatcacctctgccgtttcccaaatgggcttctccactaaatcattggctctcatcttggcatacattggaacacaaccgttgccccaatagtcccctggtaatgggggcatcactatctttcttatattgagtgagtatgcatactttactatctcatcacctgggatcttggaagctttcactctgttttttccaataatgaaaagctcaaaattaagactgagctctacaattatacaacattgaaactaatctaaaaaaattgtatttttatgtcagctgtaaacacagattattatgattatgttctgtttcaactttttaatatataattcctacaaaatttagaataaatcatcataaattcaaacgttacatttattttataaccgttgcaatcaaatgtaattaataggcctattattatttataacactctcattattagcacaatttgtaacatctatctactacctataagttgaggttaaatattattttagatactatgttttacaaaagttattaattgaaaactttatttttgtaaatgacaaaataaatcctatattttttgaaatgaaaaaaaataggaactgaatttaattttcaacaattttattttttaatataactaactttaagatatttctaacagaaacaaatacagaaaatataattagttttgtcataacatctttagatcatattattattaattttattttgataaaaaatcaattcagaatcctatttgtacaattttaaaaaatacatgatttttgacagaatagaaattcaaattattaagttttacaaaaaaaacaatatccaaaatggtatttaatgaacccctctcaattcagagctgaataaaagaaacagtgctagaaatccagaaccactatatttttctatatttttttttatcaattatttacatactaacacaaatattatatagtactatgtatatgatatgaatactatggtctaaatttctcccacaacaattatttattttaagttagattaaagtgatgaaacaggggaatataaatagtatagattgggatcaaatgtttaagaaacttactttgctcgccaaatgaaagctccgagagcttcaaacgtggtgaaattcaaaccagaatgctttaataattggctcttaaacccatccagacactcgtctttcacatcaaagcattccctcacaaccggaccaatcgattgttcgtacgcagagaacccactcttcaaactcaagaactcccgaatcggcgcctcgacacgtggcggattacggggacccaacaaactttcccggttccataccggcataatcgacgatccctctccccgagcgaacttggccattacattgaagaactgagttgcgccgagtccgtcagcgagcgagtggtgaagtgcggtaccgagagtgaacccgccgcaatcaaaaatcgtgatctgaagcatacaagggtgagccagagcttcgtccggacctggggtgggcaccaactgttcgacaaaatgggtatccgggttatcgaggtaacccagagaatcaagtgtacagctcgctttggcccgtacaaaggggacgccttgaccttttgaacataccagctccagccgccgatccggaagagatcgga

SEQ ID NO: 28736 - DNA, 2293 bp, Cannabis sativa
  modified_base (2171)..(2174): a, c, t, g, unknown or other
tagagtaagaagaatatttgagaacaacataaaattgaaacgtcagcagataaatctgtcaggaataaatatatacatatatacttgagacatgagaatagattgagttgatagaacaagaggatttatatattaaaaaaaagaagaagagtacacgaaaatacttttacttagagtccacacactgctaaaaaaaggaatatatataatattacatatatgttacaaacatatactgataaaagaaaaaggataaatattatacatatattacatagattcaaacaaacgaaaaaagagagaaaagtgatacaaagtagcaaactacgtgctactattacaaaaaatatgtatggtacatatattttaaagaaaaaaaaaactaagtacataaaaataggggtcatataattcattctagtgtgctagacggcccggctcctgctgtatgatctccagagaacatgggaacttcataaatgttatcaaatggagtaccccgattattatggatgggagatgttagcgagacaagatgtctagcatccaaatattgacgaaaccatatttggatttcagtctttaacatcttcatattcctattaaattgatcgcaaaggacatgcacatttctgtcatgctcgatgaggacatgcctcatctcgacatcttttctagaaataatagtcgatgcctgcagtagttcgtttctaagaaacggtgttctcgaagacaactcttcaacacgatcagttaggccgtctagttgacgtatatgatcatgacactccataacttgttcttgattaacatcctctgaattagaaagagagtgctccaaacaatatactttatttcgtaaatcgttaaggtacgaaagagcgttaagagggagttcttttagttcagtaatgtgattcatgttgtgtgcaaaatgaggagatgaattgtggcctccagaagacatacctaacgattgatattcaaaaaaaaaaagaagaggcaaaagggaggttgcatgggaaaaatgaaggagatgtatggaaatgaaagaaaaatgtggtaatttataggcagaagagcatccttcccatgcctccacatagtaaaaaattgaagagatgagtaatcacattgaacagtaaaaagattagtatgatgcatgggagtgaaaagattgatgagcaatcatctttgagcaataaaagattggtgtgatacatggaagtcaaagaggagcatgatgatccatagactggaggaacaccaacacttcacgtagtcaaaatagagatgtgagtaatcaactttgaacaataaaaaaattgtttgtgtggagaaaaaatattgagcatttttttcttaaacacaaacaagggggctaatgttgatgagttatcccaagttttgcactatgacatggcatcacatgctggtgacacgtggacctaattccccatatctgtccgagagagatgctccgagtagggcacagcatacacctgcacggacagtgtcttttcaatcgagttgtggataagccgagcaacaaatcaacacttagcaattccagattttgcatcgtgaagcacaagagcaatccctataaatctgagattatatcacagagatatggcaagctgtccaaatcccacaatctgtatattctaaatatgtaatatatattcttaccaattatagatattataagcaaaagggaaaccttccctcaagcatgtagccctataaatagtgatccattctcactcataaaggggtcgaaagaattactttagaaagatctaagagagcatactcagagatttcattgtaagagctttaagagaggaaacactgtgttctttgttcttgagttaatataaatcaaggggactaggctattaccgaactgcacagggctgaacctctttagaaaccttgtgttctttacctatttgcttatattatacttgagtactatttctttatcgcttattattagactcattgtcgttggctaaaagcgaggtcaacaatgagtaaaaataaaaaagaaaagaaagattgtgtaataaaataaaataataacagtaaaagaagcaaaatagtaaaaaactgtgtataaaacgaaaaagatatgaatagtagccgcacaaaacctgagatgaatnnnnacctgggtttaggtgtgaatgcattgaggtaaaagcagctgccacttgattcttttacaaagataatgttcacctcgaagaggcacgataagctacctctataaataggaaaagaaggc

SEQ ID NO: 28737 - DNA, 1724 bp, Cannabis sativa
  modified_base (879)..(880): a, c, t, g, unknown or other
aaagtcttttatcacggacatgtaagcatatcactcataatattacatatgcatatttacaaattacgttgttgtgtatattaatctattataataagtaatttttttttcaaaaaacaacatacatatatatatttatttatacagaatccgagttgaaatattctctcatatatatttgtttttgtttcataaaatttttaatattgataatttggttgtaaactatggtttgatgctttcttacgcgtattttgctcacctacaacgtaatcaaaaatttaaaaatgaaaaaataaatatttaacaacacacttcattgaaaaaaaaaaacttcattacaatgatcacaagtaattgatctagtcttactgaattctctacacttgtacaaggggtaggtaggtcaagataagaacattgactctagtgtgtgtacataatatattttatttataattaacaatttttccttttttatttttatttcttttggaaatctggtaagtcaagttttccaacttcgaactatactaataaataagttgctatacatatgttgttgtggttgctgttaattttaaataccaaaaaaaaataaggaactgctttaagagtaaaaaaagaaaaacttcttaatttgtttataattatctatatatactttaagccaaccttgtaattattaattgtagaatataataattaattaatcctcttatgcctagctctgtaatgatcgatatatcggttaggtgaatgtgaaagcaacactagctatagttagtcccttttgaaattattatatattcttatttatgtgttcgatcgactagctgcagcttgtacttgtagtggtgtatatatatatatatatanntatacatatatatattatatatagataagctattttaaacgacatgtacaaacttatcgtcaagatcttcatcaactaccactgcagcccactacaaaagagacagatcagatttccatagatgtacttcattttgaggttgaacttaattgataattagtccgcacaagtaaagtaacaatagataagcagagaataatatacgcacgagaaatatcatcatcggtataggattttaaaatcgaaatggatatcgatcattaattagctcaaagattaaagattatggattaattatacatagagaccagagagtaaatgatatacatgtatatataattcaaaacatatgtaccaaagtaatcaactactaacacatatatatatatatatatattaaaaatatacttgttgcatatatgttgtgtgtcacatatataatccccctctctttatataaaaggtgccaaaatatgaaagttaattaaatttgcttttctttttatttcaaagtactaatcgatattaaaaaaaccgacgtcgatagagtttttatagcgtcagttattatacaaaatttaatatcataaagtacttatgactattattattattaaataatcaacgtcataaggtttcttataattttttttttcaactttaaaatttagtgtaataatatatattttttcattaatttaattttatttaaaatttaatttttttcatatatattattttatcattcatatatattgttaatgctgttattaccggttcttaagtgtacaagtgtcagttagttagttgggtctagctgactttctgttatgtttgtttcaac

SEQ ID NO: 28738 - DNA, 1756 bp, Cannabis sativa
aaagtttatataagaaataaattattaggtgactatcaggttataagttaattattatttatttttattctattctaaattaattacaatcatttaatagtaatctaatagctacaaaatataaccatgatgattacatatttaatgtaactattgaaatctccttcatattttacatgtaaatttttaaataatgaatattcattaagacataatccgttcgatatctaagcgtgccttggaattttccatgttggctgaagtaaacaacaactatgatccccgcgttatcctggaacctgatcaggtgcagcagcagtcgaatgttgaggcttctgctggttgtttccaagtggatgcctcgtttgctgatgggattgcagggattggagtagtggtgaaaaggcctggggcagctgatagtgaatcctgtcagtcttcttgtttagctcacaatgtccttgaagctgaacttgtggcaattttatctgccctggagtatgcttggaatgctcggattcaatctatagtcattcaatcggactccaagattgttgtggatgctctaaatctgagggagttgccaatggcgtggggcacttaccctgttttctcgaagtgtttagcttttatacctaagtttatttcagttgtttttacttttattcctcgcaatctgaacagtttggcggatttcctggcctctcaagccagagcaaatcatctgtgccaatcttctctggtttaggggagtctcccccccttcttgtgggtgaccttgttggttttcgattttcttttgtttctaatgaaggcaagttttaataaaaaaaaaagaatattcattaagagtttaatactttatataaagaaaaataatggaaatcatccatctaagaggaccaaaattagttcattatttactttgagtgtacgaactgctaattattatgtgcggcgaatataaattagagatactttaggagaattgaactacaaactagcaatatttatgttatattaaatgtgactatattacagaaactattgttcttttttaaaaacattacaatttaaatttaaaacatactacacatatctatcttattatttatcttatattaaatgtagctatataatataaagaattttttctaatattgcaattcaagtttaaagccattgcgcatatttaaaaaaaatctttctattattattttttttatttcatccacatgtttaaaaaaaatatcaattattattatctttttaaacaataatataaaaaaagtgtttatgtttctgaaaaatcactattgtgaacattttttattgcggttactaaaaaaatatctttctattattattttttaaaaaataaaatagaaaaaatgtatgatatttctaaaaaaaaaaatatatattataaaattaaaagtattacggttagactaaaattataattaacaacaaataatgaatattattatattttatttttataaataatacttaaattaaatatatttttttaataaatactactgaaaaattgagtttttttagctgttttaaacagtcagataaagtatttttatttctctctaagactaacgcctattcgactgttgcaacactgggtagaatatgcatctgtagaaaacatcgagaaaagttttctcaattgtgcaaaaccatcgataatataaagtagcattgttgaaagtttttcacgacctataatataggtgacggt

SEQ ID NO: 28739 - DNA, 3930 bp, Cannabis sativa
  modified_base (2808)..(2819): a, c, t, g, unknown or other
aggaattattaaaaattgaattcagatcatatctaaaaaatacaaaattaattttattattcgacaaaatagaaaatctaatcaataaactttactaaacataaaatttaaaataatattaaccattaaataattaatggtgttaattagggattaatggtttaattaattaagattaagaatacgagtattgttattaggtaccaataatacttaaaattttctaaaaagttattacattaaattatattagacccgatacttaatttgacaaatatcaatattggtgaaaaattgactactatgccttttaacatttctttaaaattatatatgtatatatatgtgggaaaaaagaaaggacacctggctaacatgcagatggtataatgggacccattgcgatcccgacgcatttgtattttagtgtttaccaattttgtccttgactttagctttgtaattataatttgtatattttttcaaaataaaaataaaaaaattaattataataaaaattgaagcataaattccaaaattttatatttgatgcgcactaatagttaagagataagttgaggaatgcatatctattaatcaaaaatatttttatattatattttatttatattaattgaaaaagtataataaggatattatttataaaagttgatatattttaaaaaagatataaaaattaaaataaataaataaaataagtatacaatgtaattttttcaatagttagttcgttagtccgttactatttttgttagtccattagtacataagttaaatgagataagttgaaaactacccctagcatttttattacacattaattaaatataactctaaattaatttaaattaataaatactctcttttataatcaaaatatcaaatataatctcacataacttatcaaaattagagtttctattgcacattatggaaatatgacctataaaattaggtataaattaaagagtagtaaaataaaaataaaaattaaaatagaaaatagaaaataaaaaataaaaaatgagcataaaatataattttcccaagttaaataggctgttaattgttattaaaattatctaatgtcaaagcaatattagtacacttaataaatatattaaaaaaacaataattagaaattatataaaaaaaattaaaactttaatgttgtttattttattttctctgttattaaaattaaaaaatatatatatattatctaaaaaaattaaaactaaatcattttattaattcctattggacaatattgtctcacatggattaaatgtaaacgtattgagtcatatataagaacatggttactccactcatcaccaattagttttgagatggaaccccataattttcaacaatccccaagccccatcttgatcttcttcttctacttcttcaaagaatctaattaatttttcagcaaaaaaaaatataataaattaaaacaaaaattaagattcaatatctaactcatcacttacgatcctattatctctcacaaactcaccatcatcatcatcttataaatagaaatttatgaattttttcctttttcatattccttcacaaagttagaaccatcatcaactccttcaaattcccaaaacttaaaatcaaattccttaacatacaactatatcttaaaactacttaacttatggatgggttttgtctacacaagccttttgtgattcgtagaaggttatagatgataatggcatcaaaaaccatggctctggtcatcgatgacaaaaaccaacccagaacaggctctgaaacgacattaacatggttttgatctcaaatttgagcatgatgtgggtgagaatttttttttgttcttgttgtggggaaattgtaagagaagaagagagtgaataaaatggagggtgaggctttgacaatagatcatttttaaacctctctctaaagacctattttgttcaaaatgtttcagatttgtgtagcgagaagggcagcatgtgaaagggaggcatgtggacgacagtgtgatcttggggtagtctagcttgaacgaatttgagagaagtggagctcgaagggtggtaatgttggcggccctgggttgaagggaaaagaagaaccttaggacgacgacttggatttttgggtgatgcgatggtgtagggctggtgattgggttcaagtgagataggatggtgagcaggaaaggcataaacgatggtcaaagcttctagccatggtggctatggagattcaggcgtagaaggacgaaaacaaaagggggagataagagaaagggtaggggctgagaatgaaaaaagaaaaaagaaaaaaagaaaaaaaattaattttaaaattaaatttatttgttttcttaaagaaaaattgttttaaattaaaattatgatttcgatcaataatttgtcaatacatgacattttttagaagatcaaacaaataagttaactacaacttataaaaatcttgatattgaggattattatcgctaatttttgaggttggggacttatttgcatcaaatataaatttctagggacttatagcgtaattttccctcaatcatatgatttatttttgagtaacttgctttataaatactcaagtttaaccccggttgcattaaatactttaagtttaatttttgatagtaataatacttcagttatatttttgaaacttccgtaggtacttgttcataaagtgtcaagtcaatgactacgtggcaactcctaattagtccatattattaaatttttatttttnnnnnnnnnnnnatttaaatataccaataagaaaaaaaaaacacgtagataatgactaaacatttaatagttagatacatacggaagttacagaaatatatcttaagtattaatactgtaaaaaaaattatacttaaatatttatctgcaaccgagaataaatttaagtatttgttctgtaaattaattttaattttttaaattttactataagattttggaaatattaaatttctcaatatcaaatataatatttagatataattacgaaaaatacaaatacaggacttaattgtcggagtctcttaaatagacacgatcactgtaaattttagtctttacaacataataataaaaaatgacgcaaatatatcataaaataatacttttttttttattattttttctattttattatgaataatgaataaattctcaacaaaatttagattttataagttagaattagccatataatagtagggacacgattttgtcccatgatgtacttttacggaatgtatttacattagataggtctcagggtatattagatgagtgtcagggtacgttactattttttaaacctaattacccctagattaatctcagtcctcatatcaaataacttcctcatctaacagatgacgtacatcacggaatacattccgtgaaagtacaatcacgggacaaaatcatgtctttataatagtaaatatatataataagaggcttaatcgcctcctgcttatttgacccttataacctctgttttaattattttacaattaattacaaagagaaatggtattgcaaattttaagttgtagacaatcttagattttacacttacaggaaattctatttcttatttgttggtctcatattgtgtttatagaagaggttgaatgcaaatacatcaacaattagagaaattttataaatacgctttaacataatctttaaagtgttcgtttttttctcccaaaatattgtcattagtcaatctcaatatagcttttaaaatagagagacattatgttgggttttatgccctaaataaaactctttacaacctgattagttatcaatataagaaatttaaagtgattgatgtttgcat

SEQ ID NO: 28740 - DNA, 3339 bp, Cannabis sativa
  modified_base (2185)..(2185): a, c, t, g, unknown or other
  modified_base (2969)..(2979): a, c, t, g, unknown or other
aaaatacagtatttttgtaaagattttcgtgtggcagtatttttgtaaaaattaacccaaatttcagtatttttgtaagtttcccttgtaatatataattgcttaaatcaaaaaaagaagtaaacccatctcaagctaatctaaagtcttgggccaaaaaatctaattgagcttttttatatgagaaaagctatatgtttttatatttaatagtaaaaattgaaaatatagtatttcaaaaaataattggattttattattaataaaatattaaataaagtagttttttttaaaaaaaaaaaaaaatagacctttttcagaaaataattatattttttaataaataataataaaaattttaaaaaaatagtatttttaaaattcaaattggaattttttattaaaagatacatgaaagaaccaatccaacaacagtgaaattatgtcattattgacactataaaatcaaaaaatcatcaacaacacaatcaattaatttatatttcaacgattcagctcatcataacactataaaattatcaatacaatatcaacttttcaaatatatacaaaatatattaaccttaattatatatctgttaaattcagcacaaaataatattaataaaaacacagcagaaataagaataataataatgataaatatatttgcaatgaaggatagaggaaatctataactaacataatacaaaatataagagtaattaataattattggtaagtaagattgtaaaaagaagatttgatttgcttactttgataatttggtcgatggaagaacctgtttttagtattttatatattttgatagaaatgggaatattttttctaattatattgaaatgaaaacatcacatatatataggcctaaacaagatatatgaaaatcccaaaaatacccctacagaaagtagttggcccatatttttattatgctctttatcttttacatcatattgcttttatatctcacacgtggagctgtattttatttatggtattttaaaaaaaatatataatttaatttgtatatatgataagatatatacggttaggattgagacgaatacgatacgattttttataaattggttaaggttaagaaagttattagatacgagttaaaaaatagatcgacacgtctgatacgaaatataaaagcagatcatataaaatatgacacgaacacaatacggtgacacgttttgccacccctatagatatattagagtcatatccattgcgggcaagtgatcctatccaatctgcacctatacagataatgaccatgtttactctgattggtaagtaaaaaaaaaagtcaccatcttgagggagaatattatggacgtttatctcacattgaataaatggtaaaatattgagtcatatataagaacatgggctaccttctcattagcaattggaattgagatggaacctcatgattctcaataaaattatgtttgacactttaattatatataaaaaaatatttattaattaaaattatttaataattatatttagttgatgtataataataaaaaaatagttctcaagttattccaaaatttattagttaatttttaaaagaaaatgtaattttattttttttttaagggaaatatgtgtgcgcaggcctaacctgttttgggcctcgcatgtgataaatttgaggaaattatattgtatatccactttactttatttgttttgaattttacctccatttttattttctttaatatatacccacttttatagattatgtccctattataccccttaagttaatgtaaattatatgctagacttaagtgtaaggtggaggtatatttggtaactcactcaaaaaagtggatatatttcaatgaaatataatgtaagagtatttttgattaatggacacaaaaaagggtaatttttaacttatcccgataaatatttaaaaatttacaaaaatactaaaatttcagttaacttttacaaaaatactgttacacagaatttttttaaaataaaatactgtatttttataaaacaacagtggaacacaaaacagaacaactaaaaaataacagtaaaacaactaaaaaacaaccgtggaacaacagtaaaaacttaatacagtattttaaaaaaaatatacagtatttttganaaaaaaaaaaaaaaatctatcttacagtaaaaatatacaaaaaaaattgaaaatttcaaaatgtagtgtaaataatccataaatatttctctaatccatagagagataaagttatatttttctaatattattgttcattaatattgttgactttatttgtatttttttgaaaaaaaaaaaaatttgttggttatcaacaccacgtgagcttattcttttggatccaaccatgtgatggcatgtgtcttagctgtcaaatctactaatattttaaaataatgtgtgttaacaaattttttattatttaaaaatataatattttattactaaaaaaatataatattttattttattttttttataatatttttaacatttatttattcttaatgttaagtatttctaaaaattattaaaataatattatattattatttcatataaatcattattttttttattttataataaaataataattacaaaaataatattattgtatgacatttttttaaaaattatttttcattctaataataaatatttattaaaaaatactaaaaatatattaatattattaagtattctttaaagcattttcattgaaagtagtcttacaaatatgaacgaataattaaaaaagaaaaagtagtgtcttctttctcaattatctttattaagtctttttttaataaataaataaataatttatccttataaactataaagtctttggaagagtacctttcaaaagtgaaagtcttttattattattattattatnnnnnnnnnnnttattattattattattaagaattatttcacaaatatacaaaaataataaaaaaaaaattacaaaaatacggtttcatagaattttaaacatttttttcgatttttctaattttatttacagaaaatgcggtcttttttattatatacttgttaatttattgttaattttttattatatgtatgttattttcatgttacttttatgtacttttcttgttgttttcgtgttgtttttatggaaaattgtaaaaatacaaaaaaatttatgtaaacgtaaaaatataattttttttagggttatttgcggcaaaacctcctaaagtggacaggtttttgcaactaaccccctaatctaaaat

SEQ ID NO: 28741 - DNA, 2331 bp, Cannabis sativa
cttgggtcccgggttcggtcctagtcttagttcccgggtcccgatccgggttcggggccaggtcctggtcagggttcagggccgggtcgggttcgggtttgggtcccggtccgggtttcgggcccgagtgctgggtccggttcgggtctggttttaggttctcgagtcccgatctcgcctcggttcgggttcaggttcaagttcgggtccgaatcccaagtcttgggttcgattccgggtcccggtccaggtttagggttggggtctagaccaagtatgggtcccaagtcccaggtccgggtttgggtcctgggtcccgagtctggtttcgggtcttgggtctaggttcgggtctgggtcttggtccaaagtcccggtctgggtccaggtcccaagggatccgagtcttgaattaagttttttttaaataaattgaaatcgggtcggattagatctgatccagatccaataagtatctgaatgtttcggatcagaggtgatctgtctgatcagagcttcaacccgctcctactaaatggatctttttgacatccctatacaacaagcatcaccctacaaggagagtgtctcctgtgtctggtcggacaatgtatgcccaagaggcatgaagaaattgccttcaaccttttgtcatctcttgatgtgatgatcgtaactatcaccaccgatctagtcggagtttgatgatgttgaaactttgactccgaggagtgacttgattgtctttccttggaggattcagaagaaattaaaggcttgcttgaagatgaagatgagctacttgcgtggaaggttgaattattcccaaaaattaattcgagcaaattgtcgtcaatctaatgttcaccttcccaggattcaacatggttcatctacaaaatagggaggacaaaaaggtaaaacattaaattgcttggacagtgccttattaagaaaaatgcttccaactctctgacaaagtgaaaaagaggatctagcaataagatttttgactttttgatgaaatttcaaaagataaaggcttttgggatttaggagaaactaaaatttctaagaaaattaaaattgggctttaaaggtagtttttaagggcatacatcggcagttgtgacgaaattcatgaccgaccctatttcaggggtctctaaaggatggtgagaaaatcgaaggtatagaccccatctatgtcgtaaattattataaaataatcgatcacatatgaggggtcttattttgtaaaccctccaatggcatcaattattacaaaaaataacgttgtatgtagttaaagcgtcattttttttaataaccgacataaaaaatgtgatatatattttttaattttgaaatcattaatttttatttaaaatcaaaatttatatttatattatatttagaaattatatttttttcatatttatattttttattttgattaatatatttatactaatttcatataactaaaattgataatctaaataaatgtatatatttatattactcaaagtaaatatattacacaaacattttacaattactctaagtatttatgaattatctaattaaacataaaaaaaaaaaaaagtaagagaaaaaaaaaatacttatacaattgttctactcatcatttccatgaatcacccaagcaattttgctaaccaatcttgttgtagcggtaacaactatttgtttgtaatttttttttttgcgtatttccatacctaaaatatactagttctattttttggagaatttgtttccctaacagtggcaaaggagccatacctccctcttcagtacaatcgaatgttttttttcttccgtctatcaagatgatctttaggcaagtactatatatgaccaatataacacatcttgtgtccatttggcaagcaatgagcccaagtgatagtgcaataaatcaaaatatctttgtaacattttgtgcttaagcctaataaattattgtaaactagaaaaccactaacagtctacaataacactgcctttagattaaagaattatttcttaaaaccatcataggcctgaacaccaatctcatataattttatctaatcatcaattaatggttccaaatatacatcgatattttgtccaggttgttgtgggtgtgatatcattaaagaaagcatattaaatttctttttcatcattaacaatggaggaagattgtacataacaagaaagatagaccacgaactatgacgactacttagagatctatgtggatttactccatccgcagacagaccgagacgaatgtgtcttggttcagatttgaattca

SEQ ID NO: 28742 - DNA, 1030 bp, Cannabis sativa
aaaacaaaattaccaggagcaatcttgagaagcgacaatggaggagggcagtcacagacgcaaggagcacaagaggctttttgatcctcaacgcttatacccttcttgaacctccaatacagagccggaccacacacggcaagagccgaaaccacagcaaaaaccactagacaacacctcaagcaggtcccagatcgcctcgacatctctctctctctctttcactctctatatggagtgaacgagtgagtatattatagtgagatccaggaaaatggagtaatgggttgaaatgaatctaccagtagtgggtgggtttgggtgtaaatatttattttctagtatgaaagtgtaagaagaagaagaagaaggagagggaggagaagtaagaaagtggtgtaacaataatccaaaaaagggtcacattcgacaaaattaactcttccaatggggtaccaatgccactaatgccacatgtgacatttatttatatttatattataacttaccacttatttattcaactatagtgttctaaattagtgatacatttctttacgagtgagaaaaagaccctacatcattgatagaagtgttcataaaatatataatttaattcaatttacacaatttcatctaatttaatttataaagtatgatatttgtacttttctaaattagattaaattaaaaaatttaactctaagatatggagagagatatgatactctaaaatttattcaaataactctctttaattctctcattttttttatgtagcctcaaaacaagaaacgaactcggcctccatagtagaagtagcagtcaaagtttgtttgttacttctccaagacacagctctaccaacaaacataaacacgtaaccataagcaaaatctcaatttgagtagccaactacttttagattgtaagtctgtttgaacattagtttgtaatccttagtaccttaaagatacctcattaccttctttgcagctttccaatagtctatccccgagttactctgaaa

SEQ ID NO: 28743 - DNA, 1247 bp, Cannabis sativa
tcttgggccagcctccactagatggagtctgtaaaatacacattgtttattcaattagagagtaactaagttaatgaggttccttcaattccatatcatctgctgtaaaacaagattcctgtaaaattcattttcataagctgtgccttaaactcattttggtttgcatgatgtttaatggttaggcaaagctgataccggtagtgatagcgacagttctgacaccaaaacggttaggacaagctctaaaatgctgtcactgtggaagcgtgcgcttgaatcgaacaaagcaatgttgttggatcaagttgatattggtcctgatgctcttttgaagatagtggaggaatttgagggcattgcacaggccacagagcactcctatccggctttaattgtgtcaagtgaagatggcaccagcagctcaagagctgagtcgcaggattttactcagactgatagttccggtgaggcagatatctttaccaacaacgacgaatatgatgattatgaagatgatagtgatgatgatgatgatgatttttatgacagtgattcctcacttcccatggggtcattaggcattgatgaaattgcaaaaaagctgagtcaggataatatttaataacagtaatgtgtattgtgtattagttgcccttccggggatagtaaatatgcatatataccatatcagcaaaatggatactctgtaaaacagttatggtatttaccaatcttcactataaagatgagattatcttcaaggaaaaataaaatattcgttataccaatgatttgcctttccagtaagaaaataataataataataataataataaaaaaaaaacaattagaaatgatatttgtgataaggcgtggatgatgtaatcaaatcctagttttttcttttaatcaaatcttagttaataccatattttaggtttttttttgaaaaatattttaggctaaattgtgttagtaacgtaataatgtaataatgtaatatcaccactccaacccttccattctagctttctttttaaataaaaactcataaaacatacatagattttttaaattgataaaagaaattaagaaaaaaaacatatcttactttatactttctttttctactatatagtttctactaaaacaataatgttacatgcagagatatatttattaatttattaagtgcaactttgacttccaaaatgatgttatattaaagactaattaggattttt

SEQ ID NO: 28744 - DNA, 1558 bp, Cannabis sativa
tatgggcattttagactttttaccctaagagattagtcactccatttaggagggataggtggttgtggcgcatccttttgatgatgaacaactgcttaggaagcaaacaaaaaggaaaatcaaagtaaaaaggaaccaaaaataaaaaccaaaatcaaaagcgaaaaggaaagtaaaaaaaaacaccaaataaccttctatttctctctctccttcgaggcttctgaaacaagacaaaaacacaagaattttctaccattttcaaacataattcttgctgaatttgatcaaggagttcaacccctagctcctccaaacttccaaggtaaaacctaacttgaaatttattagttttctagggtttttgttagtttttagtggttgtttatagtagaacatgttgaagaagtttaggaagattaggaatggatttttaaggttatttaggactatttataagtattttggttggttgtagcaaaatttatgcaagtttgagttcaaagaacttaaacttgactttgttgtgataatttgaattctgttgtgaattggatttaggattctgcatgaaaaatgttcattataatgtttataggctctctgcaaaatttggtaaggattgtctcattattggatgagttatgtgatatccaaactcagacatggaggtttaataccgtctgatttaggcagttttaggacggccatttaatttaatttttgttgataatttgattaaggttccttcataaaaaaatgttcattatgatatttttaggcactctgaaaattttggtaaggtttggatttgaatttaatgagttatgccagttttaaaatcgggtagtggagttcggatcgtccgatttaggcagaatttgggggtccatttttaaagcagaccatctgttttgaggattttctcgggaccccaatgtagtgttttctcaagacttagggtattgccttgatttttatcgataggaaaacttttagttttgaatttacgtccccaaaagtgttagggtaacacttattggttttctagaattgtgacttagggcctctgattacccgtagctatttctattcaggttgaccatacacctgaaatcaaaattgaggtaagactagtataacacacaaacatatgtacatgtttatgatttccatatatatgacatatcaattagaacgatagttggtgtatatatgattgcatcttgatatcgtgaatatgtgtttggctattcagaaagtatgaaccaatgctaccaatactcgcatgctagagtaatgagtgcatgtagtattatggttggctgtacttctaaaagtatgaactagtgataccaacactagtacaccaaagtactaaatgcatgtgttattatggctagttgtacttatagtatggattgatgctaccaacactagtaggactagagtactgagtgcatgtggtattatggtcaattgtactatggtaaagaacatttgagactaaattatacatctttgacattgttgaccgagattttcggcaactaataaa

SEQ ID NO: 28745 - DNA, 2461 bp, Cannabis sativa
cgatgcttttttttgttcaacccaattgttgacttaatgaattcattacaaaaattcatacactcatatgcaagataggactctgcaatacaaccttcaggccttgctcgatttctgacatatgcttttggtgtcttcatatgtctatcacatcaaatattagaacatcaataataaattattaaaatatcataaataatattgaaaatataaactttcataacgacttacctctcaaagggatacatctatcaaaattgaacaggtccacataatcgtgcttctcggccaatatgaatcacccaatgaatcgatcaaaaaagaacggcgaaaagaatctctcaagcaagcataatgtttcagcaacttcatcttcaagagcaattaagctctctcaatcaataactcgttgatagatttaattaaagaatttacataatcttaatatagcaacccttggacctttaggcatcaatcctcttattgccataggtagtaattgttgcatcaatatgtgacaatcatgtgacttaaggcccataagcttgcattcttccattaaaacacaattttgaatatttaaactatacccatcaggtacttttaacaaagacaaacgttcacaaaataagtgtttctcgtcctttgatagtgtatgtatggctggaggaagatacttcttagtccctcgctcttgagggtgtagtccactcctaatacccatttcttgtaaatctaaccgagcttttagtccatcttttgtcttaccagccacatttagcagtgtattaatgatgctttcacacacattcttctctatgtgcatcacatccaaattgtgacgaacatgtaactctttccaataaggtaactcaaaaaagattgatcgttttttccacctttcttgatcatcactactcctttttcttttctttgacttggatttaccccatacatttgcaaaatttttgagatgttcaaaaattgtgctcccattcattatccttggtgcatggctatgctcttcttttccatcaaaccaattctttttagttcgaaaatgatggtttgttggaagaaattttcgatggcctcgaaatgaaaactttgagctatgcttaagccactctaaatgtgtatcgttaccacataaaggacaactacaataccctttagttttacatccagcaaggttcccataggctggaaaatcttggatggtccacatcaaaattgctctcaatgtaaaagttttgtttacaaaagcatcatggagctcaactccctcattccataatgtattcaagtcctcgatgagtggttctaaatatacatcaatgtcattcccaggttgcttcggtcctggaattaacaatgacaataaaatattttcttttttcatgcataaccatgggggtaagttatacataacgatcatcacaggccaaacactatgtttactactcaaattactaaaaggattaaaaccatcggtagaaagtccaagtctgagatttcgttcttctttggaaaaagcaggccatctctcattcactaattcccaagcaacagaatctaccgggtgacgcattttcccatcgttactcttattattgtgatgccatcgtaaatccttagccattctttcagatttaaacattcgtttgaaccttggaattataggaaaatacctcaaaacttttgctggaataccttttcgaaccttgttagtaagtttatctgtcgcccaacgagaagttccacatgttggacattcttctaacttctccttatcttttctaaacaaacaacaattatttacacaagcatgaatcttttcatatcctaagtcaaatgtttgaagatatttcctaactgagtacgtggacttgagaagcacgttatcacatggaagcatatcatgaaaaagattgagaatctcatcaaaactcttgtcagaccatccattagttgtcttaaccttatataaagcaataatagctgacaacttagtgtaatttgtgcactgtggatataatgcgatttgtgcatcttctaattttttgatgaagttgtcatcagggccttctacaggttcttcagaatcacaaacatcaatatttgtagcactaaacaaattaaaagcatcaaaagaattcatttcctcaatatcatcacttctaggtgcttcttccccgtgatgaaaccaaattgtgtatgtaggatcaattccatttatgaccaagtgctcataaagcaaattgaccttttggtgacttaagtttcgacaaaatttacatggacataataacttttctggataattagcctctttctctattgtctctacaaaactcctagcaccttccttatactcatttgaggctctacaattgaatgaaatatatatatattaaaaaatattagagaaatgcataatctagttgaatctatacattta

SEQ ID NO: 28746 - DNA, 2089 bp, Cannabis sativa
ttagggcacaaaacccaacacgtccttatggagcaaaaccatcaggaggtgttggcggccagagatgagatcattactgcggccaggagggatcttagagattccaaagaagaagttcaagaactcactgccaagttacgatctttggaggagctgcaccaaaatcacttaaatacgacagctagtttgattgtcgaagtgaaggagctccgtgagttcaaggaaaggcctgcaaggaggcggccaaggccaaaagggatgccctcctgaatcttgccacctgtcaacactgctagaagcgctttgatgatggagtttttatgtgctggacagctaacaactttgaccttcgtcttcctttttactccaagcctgaggaagttctagcccatttttggtagaaaaagaagaggcttgatgcggtattggaagagcgcagggatcctcgtcttcctgcccgggttgattaagtaatgtttatatttattttttcttttgtccttcccctcatttataagacaattctattttcttttgaggggagattttttatggcccagcccttggcctttactttttttttcttttgaataatttgtacgtcttttcgattaatttagccttttactttcttatgttcatcctgttttttgcccgtatgttatgccttaataccccctaagtgacatgaaaataagtttttaggtcacttatctttgaaaattacacaggagattgcatatatttgtccggcacaagttattttacagaatataaacttcgtttttaactactgataatattttcggaggtggtcagcattccaggccctaggcactgtggatccatccattctttttagcttataggtcccgcactccaggttcttgggcggctggaaagaccctttgtaggactagttcgccaatggtgaattttctatctttgaccttggcattgaaatatttatccacctttctttgataagctgccctccgtacctgagactcatcccggagctcatttatttgatccactgcttcttgtaataaagctttgttcgttgcaggatcatatgttgcccttctgtgagatgggaataaggtttccgccggtaccatagcttcacatccgtacaccattgagagtggggagtgtcaattttttattcttggagtggtctgataggcctataagactcattgcagttcttcaggccagttgtttttgtaagctagcagctttttctttagggtgacttttagtattttgttgacggcctccgcctgtgcatttgtttgcggccttgcaaccgtggagaagcttttgacgactccgtgttgattgcagaagtttatgaattcttcgtagtcaaactgctttctattgtttgagactattttgtcaggcaagccgtatcgacacacgatgtttttgataacaaagtctaatgctttcttagcagttatggtcttcataggctcggtgtctgtccattttgtgaaatagtctacgaccactatggcatactttacccctccctttcttgtttgtaaggatccaatgagatctattccccacactgcaaagggccaggggctagtcatcaaggtaattttgttgggcggggatctccagtatgtttgcaaatctttggcacgaatcacattttaagacatagtctacacaatccttcttcattgttggccaaaagtaatcttgtcttaatattttctccgagagactcagacctccggtgtgatctccacagaacccttcatggacttcctgcatgatccatctagcttcagggtctgaaaaacatcttaagtatggcatgttaagccctctgcgatgaaggacattatccatcattacgtatcgatgcgtctgatactgtaacctcctggatacaaccatttcctgaggcaactctccttgtgttacatatttgatgatggagtccatccaactcggtcctttctcattagtagctaccgtctctttcgctttgatgcttggctccacgaggtgttcgacaggtactaccccagtctttctatttcgctgtccgaggctagcttagcca

SEQ ID NO: 28747 - DNA, 4878 bp, Cannabis sativa
acaagtttttgtgggaaatggtactggcctaggcattgacaacattggtaactctacccttatctctccttttacatccagagccttatctcttactaatcttcttcatgttccctcaattacaaaaaatcttcttagtgtttctcaatttgctaaagacaattctgttttctttgaatttcacctgactatttgttatgtcaaagaacaggattccaagaagatcttgttggttgggaagcttgagaatgggctatacaaattctcttctacacaactatctcatctacctcctactgccagtattaataacgaacctactcattcatgctttaccaatcatgtgtctagtgtagattctaaatttgctttatggcacagtaggcttggccaccctactgcaagaattgtaaaacaggctttacaatcttgtaatatctctatagacaataaaactcatgttgatttttgcaatgcctgctgtcttggtaaacatcacaaaatgccctttactttttctacgactgtttatcatgctcctttatagctcttacactccaatttatggggtcatgcccctatcaactcttcaaatggctatagatactacattagttttgtcgatgcctattctcgatacacatggatttacatgctaagaactagagatgaggccttaccaacctttaccaagttcaaaacccaagttgaattacaactaggccaccaaatcaagactttacagtctgattggggaggcgaatttggatcattcaccaaccttcttgagcaatgtggcattgttcataggcttgcttgtccccatactgatgaacaaaacggggtagttgagagaaaacatcgacatgtagtggaaacgggtttaacactacttgctcatgcctttctacccttaaccttttgggatgaagcctttcgcactgccacttttctcatcaaccgaatgcccactgctgtcattcagcacataacccctctgcaaaaattgtttcactccccactcgattactccctcctcaaaatctttggctgcctatgctatccgaaccttagaccatacaataaaaacaagatgcaatataggtccacaccttgtgtgtttcttgggtatagcatgtcccacaaaggttataagtgtatgtccaaagataaaaggatttacatctctcgagatgtcatctttaatgagtttcagttcccctatgccgagtctcacaaacgatccattgacactcattttcatgttcacacaccaggtttaccacctctatcctctctacttcacactcaaaacctgccacctgactctcctatgcctcaatcacctgctcaatcaaccgacagtaccccaaccatatctcccagccccaatcacactgctcttatcagcagcagccaacttgatgatgttgttgtacaatctacttccaacttaccccctctcactacaacaacacctgttactgttaccactttacctgtgaatactaatgtttccaatgcagataacaccaggcctaccaatactaccagcaacaagctctcacccaatgataacacggattaaagcaggtatttgaaagcctaaagcatttttgcttcctgcactcccggaacagtaaaggctgcacttcaaatgcccaaatggaatggtgcaatgactcaagaattcaaagctctcaccaataacaatacttggattttagtcagacttcctcccaacagaaaacctattggctggaaatgggttctaagagtcaaacacaacaaagatggctcagttgaaagattcaaagcaaggttagtagcaaaagggtttcatcaacaagctgggttcgattttgatgaaacattcagtcatgttgtcaaaccaataactatccgagttgtcttaaccatagctgtaacccggggttggtcaataaggcaattggatgtcaacaatgccttcttgaatggagagctccaagaagaaatttacatgcaacaaccacctggttttgtcagtaaagagcatcccgactatgtatgtaagctcaacaaggctatttatggccttaaacaagctccaagagcttggtttgagaaactctctacagtcctaatcaacatggggttccactcatctcaagctgaccactctctattcattaaagtcacaaccacatactgcatctacatactagtgtatgtagatgatatattaatcatgggcaacaatgctaatgttgttaactcaactatttctggtttaaatgaaacatttgctcttaaagatctcgggctggtggattattttttgggaatacaagttactaaaacagagtagggccttcatctcacacaaaccaaatatctacaagacttactcacaaaggctgaaatgcagaatgtcaagactcaaaatactcatatgaacaacgatttgaaattgtctaattatggaagtgagccaatggaagatgtcacactttataggtccatagttgggggattacaatatgctactatagcacgacctgagctttcataatgtgtaaacaaggtgtgccaattcatgcaaacaccattacaacaacactggatggctgtaaaaagaatacttcgctacatagcaggcacacttgactacgggctacatcttcaacctgccccagatttttccattgaagcatcttgtgatgccgattgggctgcaaaccctgatgatcgtaggtctacaaccggttactgcatctacttaggagggaatcttgttgcctggaagtcacaaaaataagtaaccatatctagatcatcaaccgaagctgaattttgaagccttgccagcactgtcagtgaaatcagctggattcaaagtctccttactgaactgcacattcatcaacccagcattcctactgtgtggtgtgacaaccaaagcatagtacttcttgctgcgaaccctgtcctccatgctcgcacgaaacacatcgaaatcgacttatactttgttcgagacaaagtactgcagcatcaactacaagtgcgacatgtccctgctgctgcgcaaattgttgattgcttaaccaaaccagtgtccaactccaagtttcctgatcttagatccaaactcactgttgtttctcaacataccttgagtttgaagggggctgttaagggatgtgacaattagctttttacagttagttagttgagtttgttaatttctgttatgacttgtttgtggcttataactcttgtgtatatatactctgtactgaactcaacatcaataacagactttcaattcatttcaatctttgtctctttctttctctcgttctctctctctctacatctatgaaacataacaatagtaataatttttaattttagtttcatttgtaaaaataataagataaagtaagaacattattttttttcgagtaataggatcataaaataatgaaagggtgagagttgtgataatcactaactttttaattaaaaaatgctatattattattaaataataaaatgaagaaaaaaataatgatagaatgagaattatgataatgaaatttactgatttttaattaaataatgcataaaaaattgagataaaagaagagaaagatttaggaattgattattagaatattatatacctaatgtcttgttttaaatgttacattattttaaatgatgattaaataataaaataataataataattaatatagttgagaaaaggtgaaaaaaaaaaatgaaaactctttaggtggcatttggttgagaaaaatgaaaacatattaatagaaatgtgaatgggaataagaataaaataaaatttaaaagacataaaaaattgataaaagattattaaatttgttttcatcatgaatgctttctcttttcatttcaaaataaaataatcattccactaaaatagttaaaatgtcattttgaaattctaatactttaatatacaactaaacaatagaatagaataaaataaaaattgttttgtttccatttcattttattttattacatctaacttaaccaaacactaacttatagaatgccatgtatatgtaggaggacccattcatataattgatgtcggtcactagttatataacggattttgaaataaatatcattttttttttatatataattaaaataaaatttgaagaagtgaacctaacaatgctctttgcagctattctctaaacatctctctcattatcttgattcctgtattttttaattcaaatgattatttagaaatttgtatggaaagatgataatgctgggacagtgatgggtggtttaatgataagtaatgctaatttgtatttattataatcttcacttatggccacagatatatcaacaacagaataaattgtggtctccattatccctcaattcattatctttaaacaaaagtaaaagatgggataagatacatgaaaggccaattatataaaaccacattatataagttgaaggatgtgaaacctccatatcatttgagtcattagatggatatagaatatgtatttttggatatgtgtttattaaaagtaagggcatgaaatttaactaaaattagtaaccgatcatacattatcctttttttttaaaaaaaaaaaaaatcataaaatcttttaattaataaattcgttcaaaacaatagaacgcaattcaaaaaaacaatcctccaactgaagcacacgacctgtaaagaaacaagagtctctggccaaataatgagccaacttatttgcaaatcgttttacaaaacataaatcaacaaaagataaagccaaaaacaaatttcgaacatcttgaacaataagacca

SEQ ID NO: 28748 - DNA, 4533 bp, Cannabis sativa
aaaaaaaaaaaagctaatacatgttataccccaaattcattacttactgatcttctcatctctatcatcttcaaaattttcttcttcttgtttcaaagattgatccacatttttttttaattatagttaccataagttcttgttcttctcatctccatcatcttcaaaatttacttcagcttcttaagcttcttttttagttttttttgtacatgttcagtctcagatatcaatttaggattttgttcatcactttatgattttattaaatgtatgttttattgttctgtatgtgctgttcgatatttagtattatatacttgatttttacattttttaacggttgtttttggttgttatgaatattttttttaatgtattcagggtataaggagaaattttcctaggtgaaggttccctttcttgatgttatagtagtctccactggaaaaagagttattgaggtatatttttttgtgattttatttggttattttattttgtagttttactattgttttagtgattttttatattatttttttaggattggaattttaaatacttacgttttgactggaaaaatagttgttttctggctgtgttggtgttgctttggtggttcggtccgtaattgttgaagatggaggcttcgtatgtattttggagtgtgtatagtataaaagaaaaaaaaaattaaaatgtagacaatattttgtaaaaatttctgtgtagcagtaaaattataaaactacccctaaaattcaatattttttataaaatctccttattttaaactttattgtttgcacagtaatttttttttttttttaaaaaaaaaaaaaagctagaatatttgttctaactacaatatttttgaaagaatagtgataatttctttatgtgcttttagatgcactccaaacaatagtgataaaaatagtatgtagtataagagcatctttaacaagaacatccttatgataattatacatgacaccatttttataaaagaattaaatttttaagtttaaagaatttttttatatttttacagttttttataaaagcagcacgaaaacaacaaaaaaattacataaaagtaatagaaaaataacatccgaataacatcagaataagaatagaaaataacatacagataacaaaaaatcaacaagaaattaataagagtacaacttcaaaaaaccgtattttctgtaaataaaattataaaaatcgtaaaaatatttaaaattctatatacctgtatttttgtaatttttttgtggttttgatgtatttgtgaaataatcccttatatataagtgtcaaaattatacacattcacaattttttttctcattcatgtaagatttgtcatcttttctaccaaaatgctctaatatagtcaacctcaaaaattatcaaaagtacacacatttattttttttatttgaaaagttaattttttttttttattttgaaaagttaattttttattgaaaacaaattaatgaaataatgaaaaggtgataacatggacgttgaccaacacgcaaattaatttcaactctcacttttcttaaaaattataccaaatttctttcaaaaaaaaaaaaaaattataccaaattgaacatgtagcatgaatactattttgaacgatcctcattagagatgctttaaagtcctctgtcaatatatttaaaaatttataaaaggggtagcaattaccattttttttttttttttttttttttgtattagttgtcttctcatgtcactaaaacaaagaaaaaataattccccaagttgacaagatcgatcatcttttattcctattgtaattagaagggaaaaaaaaacacgttgtcgtagacaaacatcttccaaaaatccaattgcaaatatttaaaaatggaaaaggaaaatatatatatatatatattcttgctattctcatcatgtcaataaaattacattccagataagataagcacctacaaaataatgacatgtatttaaccccatataatgatatatattcaaccctatatgtctatgaagatctcattagtgattaagataaaaattcattgagtgattaactcaactcactatgacttttctctcaataacaagatgggggcatttggagggagccaaccatctcctttgatagtacaaaaatgatatgccaaccatgtatatagtacacaattaatattctcaacatcatacttttctttgcctataaaatgcctcgttaccctagcttctcataaaacacattgatgtaccacaagtgagagagaaacatcatataataatactctcttcttcttcttcttcttcttctgcatcttcttctcttcccctatcttttgacattttcttcttcttcttcttcttctgcatcttcttctcttcccctatcttttgacattttcttcttcttcttcttcttcttcttaaaaagatgtcaagatcagggacagaaccactaagtgttggaagagtagtgagtgatgttgtggacagttttgtcccaagtgtaaaaatgactgtcttttacaacaacaaacaagttgttaatggtcatgagttcactccttcccttattatgtcaaaacctagagttgaaattggtggagaagatatgagaacatcttatacactcgtaagctttcatcatcaatttcaattttttttcttaaataaaaaagttgtttatatattatataatttattttatttcttgaagataatgacagatccagatgccccaaatcctagtgatccgtacttaaaagaacacctttattggtttgtaataatgtttctcttcctcctttttttttccttttatacaaaattatatatttatttattcttacttatatatatgtaaatatatatgtatatatttcttattttcaggatggtcacagacattcctggtacaactgatgcatcttttggtgagtttctcaaacaacaccttactaattttttcttttttctattaacattaccaaattttctaattgggatttttttttaaacaggaaaggaaattgtgagttatgaagctccaaaaccaatggtgggaattcacagatttgtatttatattatttaagcagaatggaggaagacaaacagtgagggctccaaccataagagactatttcagtacaaaagtgttctctcaagacaataatcttgaccaaccagttgctgcagtatacatcaacgcacagaaaaaacctgcggctagaagaaggtcataaataataaatcaaattattcatttttactaaatgaataattttttttaatctccaactcaagaacaacaaagacaataatctcttcttcttcttcttcttcctttttatcttttttttgggtcaatgtcatggtctattatgttaaacaaaacaagtgtctgcagtcgaaaaataataaatattttgtctttttttgtttttgtttatttactggttttatttatgatttggcatttgggtctcttgttgtaatagaactaccttaaacaggtttagtttgtttgtctccttctttcatgttggatatatggtgtttttatctaagagaatgatcaagagttcttcaaacatgcttacacgaaaaaaaaaaaagttaatgaaatattaataaaactaggcaaaactcgccaatcaaacaaacaaaatctaaaaaaaataaataaaactaggcaaaatagagcgactatattaataagaaataattatttttaatatattaaatagttactttttaaaataattctaatatataataatagttaagttatattatctaattccacattattattataattttatttattaaaaaatgaatctccataaattatataaaaaaaattctctaatattattaagaataattagaatttatccctcagccttgtagagttttgcctcttcaatttttttatgtaacaaaaattctcattgaaatataaaaattgttgcaaatatctctttctaattgtattctagtcatttatttaaataatttgttgatatgttaatctagccaaattcaagagtctaaagaaaaaataaatacatacataggaatctaataatgaattatgggagtattgggaatatctatgtgagaactactgtttatatgtttaattgtcaataaactatatttttggtaatttaataatatcctgcaattgtagctgtaattcatagccacttacatatatgcaaattgttttttaacaaaaaaaaaaatgcacaaaatgtaattccaagggaatatttgcaacgatttatataatttagaaaaaatttaagtgagaaaagttttaggggcaaaattctacaaagatcataatttaggagataaaaattctatttactatattattaattattttatttggagttaattattgtgaagttaaaatttatgttagataaattaacaattaacccaagatctatttgtatataacatagaacac

SEQ ID NO: 28749 - DNA, 1320 bp, Cannabis sativa
  modified_base (294)..(298): a, c, t, g, unknown or other
cccactattatctaagtatgtatggcgaaagataattcaggttttcaggtcaggtcgagaccgttctaacaggtgacccctgagccaatttactctgggtgtattccagtgaatctaaatgcacaacatcaaaatttacaattttattttctatttttcattcaatcttttacatagttattaaatttttctcatgtatgttatagttacactcgtgactattttattttatatgcatgtgaaataaactgtttgaacctttctatattataatttttttaaaattttataaannnnnttaaataattataacgtacacaaatatgaaaaaaaaaattaattaaaaaattattctaaatacctaaataagtaaatggtacatcacataccttttaaggagataactgtaaaaatatccaataaattataaatcacaaattaagatataaaacattatacatagtttttcatcaatacaaaatgattagcataagcaatttttttttcttttctaaaaaatgcatatataaaaatatacatttttgaaaagttgtttgatatcatatatgcttcgtgtttttgtaaaaatagcctttatcaaattttttattagcaaaataatgaatttactacgaccataattaattattattatcgcaaaacgattatagatataatattttactatacgcatatcatgatcacatagaataaattaaatgtagcttttttacaaattttaatattttacattgctagtttgacaaatatcatgtttttagtgcagaaagagatactttgcactgtaatgtcatcagggtcggcctaaacattttggggatcttgtgcaaaattttaaaattgtgttttttttttatatataaaaaaaaccgtatacattaaaattataattttattactagtttttttttttaagatttgttcataaattttcaattataaattttttatttatgtatatataatagaaaaaaatagacctttttcaaaaaaaaaataaataaattggaccttaaaaaacatgggggccttgtgcagtggcccaagctgctcaatgcttgggccgaccctgagtgtcatacaaaacataaaaataagcaccaaacctaattcatttcagaatacataatcctactggcccaattgttggcaaatatcattatacatagcaagtaaaacacatagaggaaaaagcagaaaacctaattgagtttaggtccaagtcggaatttgggttcgaattcgaatttgaggaagtctaaagaccgactgtactagtaaaaatataaaatataatat

SEQ ID NO: 28750 - DNA, 3110 bp, Cannabis sativa
  modified_base (1775)..(1777): a, c, t, g, unknown or other
  modified_base (3072)..(3075): a, c, t, g, unknown or other
aaaaaaaaaaaaaaaggaaaacatacagtaagtattaatgcaaattttgttgagaacctaaaaaaacgataaaacaaccatacctcaacacaaacaacatgacaatctgtaggctcaacattttcagaaactggaaactggttaccagaatcaccaccaattccctctgaagacatctgtttatatatcttaaaaaaataattagaaaaaatctaaacaatcacaaccattaaacaaccaaaaaacaacaaacaatcaacattaccataagctcaactgctttcacaccagactgaacagttgcctcaacatttatttgagtagctccgtcattgaaatcgacaaaattcttgataaagaaaaaatacaagcaaaaaaaaaaaggttatttttttaaaaaagagttaaaaaaaaactaagaaacaactacagaaaaactaagtaacaatataaaaacataaaattaaaaataaaaagatcaacaataattgcaaacaccataatctataatatagtcataaaaaacataagaaatacaaataaatagtctgaatattagtagcaaattaatacaaaaaaaagactaaaaaataaaaaaaggacataataacaacatagaagtacaaatccattacctaaatggacttacaacaaaataaaatatacaaagtaactaaaatctagttacattatctaattatctaccttcttctcactatcagtgcattcatcatcactgcccttatcatctttttctttgcactaagaattttcatcagcatcaccatccttctcttctccttcactaccctcctcctcttcatcacctgcagcattttcttcttcaatgtcttcttcattatcacttccaccatcatcattggaaaagtcactccctttgtcctataaaaaaatataattaaaaacaagtgacaacaacataaaaaaaaactaaataacaaccattaaaaaattaacatatcttagcaatagaatcggcgaaaacagtagaaaactttgtctgcgttgaagccatctgagcagcaaaggaaacaaactgtgcagacataaactctttcaactcaaccaaaacagaagaaatcttctgttgggaagtatgcagcaaatcaatcttcacctccaaaccatcaaactttttagaaaaaccatcaagcttgacagaaatgtcactctcaaccgcagaaggttcttctggaacaggagtactcttgtaagaattgtagtcagtgtcaaacttaaaactgctcaatttcaaagctttgaactcagcagcagtgggtctcatatttgatagttccagctgatgaaaaaacaagaaaatgaaaatttcaataagagagtgtattaataataaaaaacaactaataaaaaaccaaaaaacaacaaacagaaataccttgtctttggaaacatcaaaaatagtagtcttcaaaactttgaaagtcggctgactgttacaagtccactgaataatccttggaatacgagaattttccttttggaaatacttacatttcatgtacttacaacactcataaaaccaaacttgaaatacatgaggaaaaccaatcaaagtgtaagaaacactcggcctcttccttgaactctttgcctttctaacactttcaaccaaactctcaagcttacccttcaaggacgaaatagtcaattcaaaagaactgtgtccccaagcaaattcatcgtacctcccactgtctacaacatctaaaatagacctaggtacatttttatgnnnagtaccactaagcaaaaaccattctacgataaaaaactacgaacttaacaacatcctcatcagaatcactctacctctttgtggtgaaatattccctaacagattctttaataatagaggatgaagttggccaatatttcttacaaagactattaacaacttgcttaaaatccaacacactacaatcaccttcacaatctaaaccagttatcaatgcaaactcttcaatactaaacctaatcctaacaccatgtatcataacccacaattcaacatcattaggctgctgaacctcccgtaacaacaacccatgaagaacttgtggttgaacttcgaactcacgaagcttaatgaaatgtccaaaacacgttttggaaaacatttcaagttgttcaggtgaaaggcaagacttaatattatctataacctggaatgtagcagtggagacggctttcgcaataaacagattcttcttatcatatatgtaatcccattcctgcagcagttcaaaaaaaaacatgaggagaaaaacaaaagactaaaaaactaaaatacaaaatacaaacaaaacaataaacaaaaatagaattgtactaataaaaacaacacacaaaaaaaagacaccttaggagggttttttttggtaagtcaaagtcttcaaacttctctgagctcttagcatggactgcaagagggaaaaataaaaataaaaataaaaataaaaaacataagcaacaaatttgaacaactaaaataataaattgcaagcaacaaatacaaggcaaatagaaaaataagcaacaagtacaaggcaagttattaaataagcaaccaggaaaaaaccaaaacataacctaaaaccaacatttaaagaacaagtccaatatgctaaccctaaacgataaacaacttcaaagcaatattgtaaccacactgtaacaacttcaaaaaaatgaaattaaaaaactatttgtcaatccagaaattatattaaacaactaaaaaaactaaaaataaacagttaaacgactgttgataacaaggctataaatcactgtaaaaccaataacgctatgaactgtttaatataaaaaaacaacccaaaaaacaactcaataacaacacaaaaacaacatcaacaagaaatacataaaagaaatacaaaaaaaatgacacaaaacataaaaccgtcatgataaacgggtaaaacattgacaaaaaaacaaagagttgctgtaaaaataaactcaataaaatgataaaaatcaaggtaataataccttggatttaacttnnnncttttctcccccatcatgcacttcatcctcaaaat

SEQ ID NO: 28751 - DNA, 1935 bp, Cannabis sativa
ataacacaataaacaatttttctctttttttttttatttctgggttaaaatggaaaattcatgatccgttatttttaccacaactaaaaagtattaacaaaattgatttactttggtgggcttttatatttgtgtagcagttagcaaagtgggccgcgtataggttagatttgtctttgcattaaaacgacgacgttggggtcattgatatggttaatttaataatgaatattatttatattaataatattattattaggttatatgtttggtttaggtttggtcgagggtacactacagtggccagtcaggagaaggcagtgagtggtttggttttgtctgtatttgtgttttgggtattggaaagggccataatgggccccactgggcctaaaaaagaaggcccacaacgattttgttctgactgcgattgcaattgattgatttatcagaatgagatggagatagaaagaaagaaagaaacaacagttccaaggcgtgagagaagagagagaagagaacccaatacaaacttcatttccaactcaactcaattccacctccacttccatctgcaaactatattattatttataaatgaaaatgaaatgaaattaatcatggcttcgttgggaattctttaatcattatttcaccttttctttacttgtccaatttcttcttctttctttctatgtagtgattgtacaatgtggatgtgttgggaatgaaaaataatgattatatgatttttagtctattaaacgcatcatgattcattatattgtttttctaggtttctcaagctcaacaacaaataagcaaatttacattcataaataacaaatacaaattgcaacaaatacaaattgtccaattcataaatctttgtgcatttcaaaatatatataatacttggttttttaagcaacatgtattcaatattagtgtgtccaatacttactataagattttacctttagagtgattaataatattttatttaaaaatttacggtttgaatttctaaagtgttttttctaatgatttctatttaggttgagatttaagttttccggttaattgtagtaaagatttttatgtagaattctgtaaaaataaaaaaaaatatatatattttgaagtataaaaatgattttttttatttactgaattgccactatagaagtattttttttttaattattaaaaaacaatataaagtagcgttaagtgtttgatcctttctaacttttcttaaaaaatataaaaatttcttcattggacaaatcaagacacatctactttgaaagcatacgaaatgttaatgtaattcatgacctcacatagatgtctttgtgtgaggccaacaatatgttttcttagggttgttgttgttttttatttatttaaaggtttatttattgtgatttattttagaactgttatttattgtgattttaatgtgctaatatgggtggtgtggtgggataaggacaacaaatttctcttcttagatgtagacgtggtggagacacttcacaccctaaaaaagcactttttttttttattccaataataattttattacagaagctaattcagtaatttgtgtcatagtgaaaattaattttccggataaataattaagtttaattttggacgataataatacttaacttatatttctggaacttctgtagtatagtatgaagtcaatagacatgtggtaggtatttcctgacatagctataaatatgtgcgtgtcttgctagcttaacccatatttttcatactttttaaaatacgaatcgtgccgtgccagaccataaaataatatgagtcgtgccgtattataaaaaatatgaattgtgtcgtgtcaaatcataaaaaaatatagatcgtatctcgtactgtgacataaaaagttatggg

SEQ ID NO: 28752 - DNA, 1614 bp, Cannabis sativa
tggacccaatttgaataaaataaaaaaaaaataaataagaatgagtttgaaggttatataatacacttttgttttttatttttaaaattaaaaaacaaaagtggttataaaatacattttttaaaaaaataaaattttaaaaacacaaattttatttttatttttgtgattaaaaattaaaaaataaaaatattatcaaacactcccatataattttaaaaatacaaattttaattaattcgtaaagtactttttaattaagtttttctaaaaaaaaatggatgatgagaattagttttaagtacttttgtatttcgcaggtactaggttttattaaattaagatagtataaacgaattgtttatttattttaatattattcttacgtagattacttgtaaaagtgtcaaggctagctagtgccaaagtcaaagcatatatatctttattgccaatagatcttgtgtcatcaaaatgcagtgatgatgcattttattttaaattttatgtatatttttgaaaaataaaatatgacaaatcgtcatcttaaataattttatttattaattagtcctcttgatgaaatttgggtctatcttttaaatatctaaatatgttttagatggtgatgtgattattaagatcatgcttgtctaattatagttttttatattatttttttaaaaaaaaaaattatttagaagcacacatatttttcaaatcatactttgcaaattattttgctttgtcggattataaggagagttgtcacttgtcaggaaaatcttgtttgcaaaagcatgatgggcctattgtaaatatttttcaatttgtgggctttatttttgtaatacacttttaatgagttctgatttgcctttttttcttagtggactttcatatatattctcctaaattataaataaaatgaataaacatgatttctatatttatccaaaaaaaaaaaaaatgaagaagaagagcatgattcctaagtaaactaataataatttctaaggacaattaccactagagagaagttccagatcgtatattttgttgttctcaattttattttccactcacaattcaattacactcgagttaatttttaaccaatcatatatttcaaaatgggatccaacttgtggttaaaacttaaacatacatgcaaaactactatctagtacaacattagaggtgtagtagttgaaatatatgttatttagttttattttcaaaaaactccatttcattttggccttcaaaataaatgtccattttgaagacattatagtaagatgtcaccttatatatacattgggtaatttatttttattttttaaaatacatttacattattgtaattaatatgacttcatctctccccttttgtatctactatatatcaataatacccttaattagaccctttttcattttccgctaagttgtacaactttcttcttctttcttttgctatgatgtactactaatattagtaataaactaagtacaaatctttgatatgtaattgtattgatcagatttcataactatctatatctcttaagtaccaataaataactatttgtggcacctctctctctctct

SEQ ID NO: 28753 - DNA, 1090 bp, Cannabis sativa
gtcacgacaacaaatagaatgagttttggattgtaccgaaatgttttagtatgcttgagttgtcgggttatttgggctagatagctttgaccaaaatactcctaagttataaagttacataagtgttgaattaaggataaaataataacttcacttagttctattcttttattttattcgatttttcttgtaaacccaaggctgaaggaaataagattttaatttcctcaataatttaatgttattatcttagttatattagtgagataagatcaaatagaattatcacacaaaaatctctttctctctcttttcatttttggctcaacgaaacccaacagaaccaacacaaactcaatatcattttcatcattttcttgtcaattccttcaccttagaagttgtcctatcttgaggtaagttttaccctttgttcttatggtttctatatatttgagttgagtttttttgagaaatttgggtgaatttgggtttataggttttggtaggttcagagcttattcttaagtttaatttaaggttgtttaagttttaattttatgattttaagactgttatactttaattgggtgggttgagttcaagaactcactcaacaatggtaattttgcaatcttgaggtatacatgtattttgaatgtttggatatgttgtttgtatttttataaactgatttggaaagttttattcggtttggaagagttctggttaagtttgaagtgagaaacacgaagtaggctatttttgtaggaaaaatggtagtttgtttttagaaaacagtagaccgttttggggtgtttccaacaactaggtttttgtgttttgtcaatagttaggctataatttcataccaattatcgatatggggttgtctagttttgagtttaactcttagaacgaaattgattaatttatttactaatttaccattgttatgatatagggcccccgagattgtcgaatgttattccactcaggtcggccaacacatttaaacttagatttaaggtaagaaaagtcagttgtaccactttacatgtctaattgggatacgataatgagtgttagt

SEQ ID NO: 28754 - DNA, 2932 bp, Cannabis sativa
  modified_base (2799)..(2805): a, c, t, g, unknown or other
  modified_base (2892)..(2907): a, c, t, g, unknown or other
aaaaaaaaaaaaaaggagagagattcatacattcaacttaaaaaaaacccctatcttcaaaaaagaaaaaaagaattaaaaaattacctttatgtcattttactaaacttgcttgaaaaagaagagaaatactactactgtagggctgtccaaaaaattccaaacagttcaatctgaataaatcgttcaaatcatacggaataaattagcgaaaatcgcaacaataaagcaatataaatttaaaccacctaataaatatagtgaatttgaatagattaaaagttattttaaattacttaattaacttgaataaatcgatttatatagattttaggatatgtatataatatattacataaattacattttattagttaaattattttgtgtttaaaatctagactgtatagtgttcaatttaaaatttaaattttattgttaaaagtttttattgtatttaaatagtaaagtgaatatttaaaatttacatcatattattattattaatttttaaatttgaaatataaaaagtaatttgtggtataaatacttaagtttaacacataattataaataaatacttaagtttaatttctagcggtaataatacttaagttataatctgtaacttctgtaggtaacaactataattgaacgtttccaaaagtttaattagttacaaaaatttgtcatccatataactgcagtacatatttcattacgaataaatatttaagatattcaaactcatctaatatgcatattccatctcatctaactgcagtatgatatatatcgcaaaatctattttactacggatgaatatttaagatattcaaactctcctaattattaataattaataacaaacgttaatgaatatatacctctagctaaatgccgatcaacactaaagaaatcagatctttacaaattggcctcacaacttacaatgtaaagaaatactacaaaaataaaaatttaattatttaactacatactaattgtataatttaagagtaactagttaatttattcctaactagtgaagttagaatttattactaatagtaactagttagtaaaattagtgtaactagttactaataaaatcacgtgaatgagaatgaaaattactaactagttagtagttgtaactaattatttactagtaaaaaaaataaaaacacataaatagtaatgaacatggaaaatagaaaaaaaaaagtaaattaaatttaatatgcatataaaaaaatagataaagagttaattttttttttctcatcttacatttacatctattttgaaaaaaaaaaattacatatagatttataataaattatatctcactaacatattttttaaaacctaatttttaaaatttattttattactctcctatctcattcttaatctctctttttatctttcaatcacaatatttaatatattaatattaaagaaaaataataaatttataacaaagtgtaacacaaaaacaatcactaatcaaaaaattattccaataaaaaaataataacaaaattcttaaaaattagattttttacttattgccgaaattcgacaccaatgccgacaaaaaatctagccaccaaccccaacccccaaaaaactcacaatcttaacaagaaaaatcctaaaaaaaattataacaccaaaaacaatgtaatgtacctcaataaaactactaaaaatcaaatttataccttaataaatgttaaggttcaacgttttaatgtctaaatttcggtcgtcagagctacaaccaccacagtcgcaccaacacacttattctgcgcttacaagactaaatattattattctaatatcagtaataatcttttttggtattgaaaatgaacaaatttgcaaaaaaaaaaaaatgaaagaaaatggtggagaaatggggttataactaagtattttgataggagatgaacgttgaaggagacgaaatgattcatttaagtcttactgaaggattttttaaggccctatggtcaacgccacaaggtcacacgtacacgtgtcccatatggctacaattattacataataactaacggcataaggccttaaaaactattattagcgagaccaaaaggctttagctaacctttttatattattcaactaagaacatctctaatatggattgctaaaaaaaagttgtgtattgctatattttaacacacttaaagaaaaataattctctaatggtgttctaaaaagtgtgctaaattttggacatgctaaaaattatgccaaatctagcacaagatatagcattgtgccaaatttagcccacaataaattttacatttttttttactatagtgccactaattattatgattcattaacttttacataactttatcttctttatttactatattaccattatttaagcaataaaaaaaataaaaaataaggatgtttgtatatttttaatacaatattaatgatgatcaatataattatatttttttacatctttacattagaatacaattataaatagtgggctaaatataacacaaacttaatttttatactaaatttagcacaaattttatattttgcattgaagatggtctaaaataattgcctttaaagactaattttatagtagtgacatgaaatcacataaaaaaaaaatcctaaatctaaaatataacataattttcttaaaaaattaaacttaagagtgatttattttataatattacataatatttatagggatatgattttgtcccgtgatgtactttnnnnnnntgtattccgtggtacattagatgggtctcaaggtacattaaataagtatcatcagggtatgcttctactttttaaccctaattaccnnnnnnnnnnnnnnnnccgtcagatcaaataactccctcat

SEQ ID NO: 28755 - DNA, 2634 bp, Cannabis sativa
  modified_base (35)..(41): a, c, t, g, unknown or other
taaatatttgttgcttataatacacttaaattttnnnnnnntaaaagcctaataattttttttttatttttttattttgggccgccagaaagtgcgggccctaggtacgggcctagcccgcctatgcctagggtcggcctgagcataagtgttgtattaaataatactaatataatacaatacaacacaatccaatataatacaatacaatacaatacaatacaacacaatccaacataatacaatacaatacaatacggcgtaccaaacacgtctttaaatcttaaaatataatccaatctattcaaatattactaattcaattggatcatattttagctgtatatacaattacacacttattaattttaatattaacttaaacatataaaaaaatgtaaaaattaaatatgaactttttttttatttattaaatttaatactttatataaataatctaatttaattagaattcaatttttaacattcatttcaatttaattgtaattaaatattcaattacaattaaaaataactattctattagattagatgttgtcaactcaagtgacaacaatttatttattaaattaatgcaaaatgttttattttatattttatatatatatatatatattttaaaatgataatgcaatgtaattagatggaattaatgtgcatcttcttattcgaatggtattatactattatgtaacttctaaccatttttctttagtttttcaataaaaggaagtaaagtcattaaagctaaattgactaaaagcagcgagactgttagtccgagtaaataaactgaatttgtgagcagtttagttaggtagataattgttactgcaaatgatgtttgacttcaatgcatgtcatgccatgccagtgcaaagtagaaggggtgacaacatatgtcatcgtgtcgtgttctgtttgtgtcatattttatgtaatttgtttttatatttcgtgtcaagtatcgacctgttttttttgactcgtctctatattctcaatcttaatttgacttataaaaaattgtgttgtatttgtgttgacttattttgacctatttttttattattaaagctaacattgtagagaaaaataatattttaaattcactattttttttatatatatgtaataaaaatcaaaatttgttaaaaaatttaattttatttaaaaaaaaataaatttaaatttttttaactttagatcactaagtatatatttttacataattatattattattaataatatttattttatttaaaaaatcgtgtcaaattcgtattaagcggatcgtgtcgtgtttgatccgttttattttgtgtcaagtcgtgtcgatccgttttcaacccgcatctaatttttttttacctaacccataagatttgtgtcgtattcgtgttcatgtatcgtgtctgaacctgttttgtcaccctaagtagaagccaactaacactatgtttggtaggaaggggagatgggtggatggagaggggtggagggagagtgatggaaggagagactaaatcacttgtttggcaagagagagaaggagggagaggagagatggagacattctccctcaaaaccttcaaaatttcatccctccaaatttaaaaggattgtaaaaaaagacaaaatacattttgcaaaatacaataactactcttaaaaaataataaaattttatttttaaaaagacaattttataattttactaatcaattttttctttcccgtcttacatctaatatcaaacaatacaaatgagattaacaatcccctctatcccttttacttcccatcctctctaacctctccatccatcctactctctctccctccaaacatggcctaacactatgtttgataggagggggagatgggtggatggagagggatggagggagagtgatggaaggagagactatattacttgtttgtcaagagggagagaaggagggagacattctccctccaaatcttcaaaatttaattcttctaaatttggaaggattgtataaaaagacaatacattttgcaaaatacaataattattcttaaaaaaataataaattttttttaaaaggacaattttataattttactaatcaattttttctccatcatttccacctcagacctaatgccaaataatacaaaggagattaacaatcctccccatccctcttactctacatcctctctaacctctccatccatcctactcttcctctctcccaccaacatagcctaaaagtataatattgccatttggatcatataattttattttattgcaattatataacttaagaaagataatatcaatgaacaatttggttactatatgatcaaagcaatgtaaaggtatcagacaatcatgtgagtgaaaagataaggataagaagacttagagattttataaaagaaaaagataaaatggcaaataatgaaccttaagataataggccttgctaatttcttcctcaggagtgacatcatagtacagtactcggtttcctttaccattgtggctctgttacctgagagtcagatgagattgagtatacttacacagagaaagatgggaaagaaaaaagtgataaga

SEQ ID NO: 28756 - DNA, 2860 bp, Cannabis sativa
  modified_base (167)..(167): a, c, t, g, unknown or other
attttttttgtaaaaaaaagttaacctaaataattcgagtatttttgtaaatttccctagattttaggcactttattttatttaaatgaaacaatgtatcatttcatattgtaccacttatatcatctaattatttaaatatcaattttattttaataattataaanaattatcaaataaaataaaatttaaatatatttattaattagacccacaaagagtactaattaaaaaaataaacccctatttcttttttcttctcaaaattaccaaaacttggtgaaaattctaaataagatatagtctatttttgaattctatttgacttattaaatcaattaattgagtttacaagatgatattatctcaaaaaaatagggagaccatgggcctatgtaaccatgctcctaataagtagatataaaatttatagagtaaatttcctaacttattaattctttttgactcaactatagagttagaattacactctttattacatagaacgctctatatactaaatataaatacgctatgaattatccattatttcaatcatatataacaatcattgatcctctatagatagtttacattaaatagagacaaaattaccgttttatccttcaatatattttgtccttaaaaaacttagctacttgtaaatgatattttgagaaactaatttagataccaaaatgagtgctctatcatttattgagccaagctctaaggaaactatcggttctcttctaaataatcataaaagctatagatgttcatatctatgattaacactctcactcaattatactaccgagttcccaagatataagtattatgcctacacgtaagatgtaatgagcaagtcaaagaacttgtgcaatacatttacgttagagcttaactatttcaggattgaggtcaaatgatctatgattaactaagtgacattgacttagaaaagatataacggtaagtttataatattttttccactatcaatagcagtccagttcgatgtataaccgatacatccgatgctagtttactttactgatgccctgaaaaagatattccacttatccaagtataagcaaacatcatcgatgattatcatgtcagtctaaattttaataatccgtatgaagtaggaaagaaacttactactgtcgacttttctctgttcaagtcatgtattgccaattccgagccctgtatttatcatacattattattgttgtaactcaattctattctgcaaccgaaatgcaactaaggttttgtaattgattttcttgaagaaactttatatctattttcttaaaaacatttaataacaatcaattattcattaatagtgatatgtggttaaacaacatttaaacatatgtaaactaacttaaatttcaaccaattgaatatatacatataattaactatgttatagaaatttctttaaagagatttttcttgtactaacaaatgaaacacctacaaatttgataaacactattattacgtttttcagtttgtagtaattcatatttcaaattcagattgtcgcaaacccttaatgaaatcataatgcaacataaaaaaccataaccatatttgaatgtatgtggctgtagatgcatgcaagtttactatacttttcgtgatttgatattaacaaattcattattggaaatctgtaaaacaacgtcaatgcaacagaataaacattagttgtagtattgatgcattttttttcctttttttgaaatatgcttaatttggatgatcagaagctccaaatctatttgttagagatctacattttataaatctaaaaattgatattaggagaattagttttttgcgaattaaactggaattcaatgttgaattttagtttcaaaccaatttttcttttcttttttctttcatcaatacgaaacaacatttgtttggaatgattcctatcttctcaagtgaagtcgctaaaaataatggtagttttctgcctgcttgagtttcgttttcggttgtcttgctgtgttgattgattgaagcttccgttggtgagatttttggttagtgcagctgaaggtttataacaagaggtataattgtaatattttatttgtgagttgtataaatatttaaaaggctaacccacaatatttttataatttagttgcctttacttaaaaaatcttttttttttatttgtcacaactagacccataaatttggtataagatgatttttttagagcattgttattggagtagttatacgattggttagcgatattctctaaaaattattttagctaatacgattgataggcagagagtcgggcaacccgagcaacctactaccttgcttccttctacccctcccgaggatgcgtgtgtaacaataattcattctgatgaagacatggctctatctcaattttttcaagcccaagaaaatttactacatgatctaaaacactttgggaagttagacttgtatgagattcataagattggaggagacattggcgtcccgacttcttcggacgtaaatgagaggaccacgccttttaagaaaagaaaatttgaagcttctgcttcactctgttctaggccgcataagattcatcgcaaatatccaggcttctttcgtgacttcccttgggacactaaacagcatgataacgagtctaaagtggtgtcggttgagccttttgagaattcatctacttctccgagccggtccggaattatgaaaaacccgcttattggttcgtttgttatagaagattctagttccagtgtgtctgcttactctcgaaaccctgtggaggagaatgtcgaatctcctc

SEQ ID NO: 28757 - DNA, 1938 bp, Cannabis sativa
gttgagagaaagcaccaacacatactaaatgttgcaagagctctagcttttcaatcttcccttgcacttgcttattggccatactttataaaaactgttgtatatctgataaacaggacacctacacctcacttacatcacaaaacacctcatgaattgctttataaaaacctcctgcttatgaccatctccgaacctttggatgcttggcttatgcatcgtccttaccaagtaagagacataaattctctcctagagcacatgcttccattttcattggctatcccaatggaatgaaagcttacactcttcttgatatagccaccaacaccattttccattctagagatgtgattttttatgagaatgttttccctctcaagggatctgctactacggatctggactcatttttttctcaacatcttgcaacaccagcagtatccaaatctctgcagtgtcctggtgctcttgatgcaacaccagcatccaaatggcaccagttatgtctaaatccaagaagtgccctgttgctcctgctgcaactccagcacccaacataaaaccagcagtgtccacgccttctaaggcacaaaatggcaccattactacagacatcgagcctggcatatcacaccagcaacattcaatatcgccaattccaggaccaaagtctgttgagcctacaacacaacataacccccctcaaatccctgttgccactacaaccaaaacaggcagacacataactaaaccatgccatctcaaggactttgtgtgtcaaacttccattgcacaccccctcgacaaatacctgtcttacaatagacttcacaaaaattttcgaaatgccatacttcaagcatacatcgaacttgaaccaacttcctatagccaagccaagcaatactctcaatggctaaaagctatggataatgagttttttgctctaaagaaaaacaatacatggaaaatagtatctcttccccctggatgccatgtaattggaaacaaatgggtgtacaaaatcaaatataactccaaaggtgaggttgaaagacataaagcgcgcttagttgcaaaaggatacaaccaacaacatggcattgattatgtagaaacttttgcacctgttgcaaagtttaacactctcaaacttctctttgccctcactaccataaataactgggaattgcatcaaatggacattaataacgcctttttacatggtgaccttaatgaagatgtttacatgtccattcccaaaggctatgtccatgatggtgatcttcctcccaatgtagtttgcaaactaaataaaagcctctatggtttaaaacaatcatccaggcagtggtttgcaaaactaagctctactctccttgccattggcttccaacagtaacccaatgaccattccctcttcattcgaactactggagacaaattcctagccctattagtttatgtcgatgacataatcattgctagcaataaccataacgatgcctctgctttcaaactatttcttcactcgaaattctatctcaaagatctaggttcccctcgatttttccttggattggaaattgttcgctcaaaaattggcatagctatctctcagaggcccttcatacttcaactcctatccgaatcaggctctcttggcactaaagttgtctctacaccaatggatgtcaatacctcacttagcagggataatggaccaccggtcgatgatgccacttcctataggagtttaattggcaaacttctatacataaccattacacgaccagacatcacctttgctgtgaatcgacttagccaattccttcaagatccgagacaacctcacatgaaagttgccatgcgaattcttcaataccttaagggcacacctggtcaaggcttatttttcagctcgagtattccaca

SEQ ID NO: 28758 - DNA, 1770 bp, Cannabis sativa
aaaatgctaactttttcatatcttcgaacctcaaccaaaacatatccaaaactcaaataaaaccattcataaacttaaattttatatctcacaaactttacacaacaattctaagccaaaacaaagctctaaatcactttcacaacatacccaaagcatgaacataatctacacattacacatgattcaagcttgaatctcaaagccttcaaaccttcgaaaggaatccaaaaattcaacatgtgaaacaaccgtaaaatcacacaaaacattcaagatgcatcatacatgaacttaataaccctattacactaaaatcaccaaaatcacacctaaatctcaacatcatgcaatccaacaacaaagagcatcaaaaacacatatgatcatcacaacattcagcatttaaatttagacataaagagataaatatagctacctcaagcttctccaaacaaaaacatgcacaagctactccaaaaccaagctctccgccaattcaacaagaatttacaaatgaaaaggatgaaggagagagaggggggttggctagagctagaaaaatccaaaaaataattttcaattttctcaaaatttgtttttttgttgaataatgctttatgtggtcaaatgaccaaattgccctcaaggcataaacaatgacatatacatttatcaagggtaaaattttcattccaatcacagatatataaaacaatattttaaatttcctcaattatcatattaatgccaaaattaaatcccaaaaatgtattttgtgcctcgaacccagtttggcccaaaatactcggttgtgactatattacgccgacttataagaaaatacctgcagatagatagaataaacatactatataataatatagttcatgagcatgatatatcataaatttacgtttacccttctcaggtcaaaattacaaaaaaaatgcccctgatacaccaatgggatcttaaatataatttatcagtatagtttcacatattaaattataaaataatataatttctcattaatacataattaaactagttaggattgctaatccagtttcataaaccttatggtattacattaaatgtcgtaaacttggttgtttaccattccaacattcaagaggtgtcttagatggaacaacatttagaatgtcattcacagtttctatagcatatccccagaaggacgttggtagagttgaataactaatcatcgacctcaccatttcaccaatgtgaaatttcaatgttctgcaacaccattttttgttgatttttatgatccaaattagagtagaaagcggaagaggtttgttataaaataattttagattatcataatatgaaccataagccctaagatctcaacaaatttactacatacattaaatctacgctacgagatagagcaaaatatacctattgattcctatcagaatttccttgattcttttcgtgtacataaacgatcatccaatccagagcattatgatatggcaagaactcacaccacatgtcttccagatcagtctcaacactcaggataactgggagcttgtagaatacaatcgcaagatgactattttctatcatggcctgcactcaactcatgagacactatgatggtagagagagcgagagagagagagcgctacatgtgtaggtgtagagagagagatggatttagctatggtggttttcaacaaaaaacttgattgtatcaaatatcatattattattcctatgtttcga

SEQ ID NO: 28759 - DNA, 1467 bp, Cannabis sativa
tatcattttgagtggatgttagaaaatcttgtaaaactcccacaaccttgatcgtaaattttaacacataatatagatgagagttttaaggattggcaactatactaatagcactaattatttatttattgaaaggaactaatagcactaattaaaacccataaaatatttcactgagaagaaacagtaagcatgaataaaggcttggttaagtgggtcggatcgggtctgtcccaacaaggtggctctgaccagaattatggttaggaaaggacccatttagtgtagcaatatttggcccatgacctgtttgaatcattcataacctaacagaatcacaggccccagacccaataatatttgtcattgatcatgaggtttggtttagatcataacaagtatataatagttctagagagtagtggccacctaccactaaatgctctcatcataacttggttggttttatacctcacctttggatatgtggccttaatttattctaatcttttttccttttatcaaacagattcatagattttctaaaataaaacaaccatattcaccaagtcaaataataaaatctatacaatctaaaaaatgataaaactaaaagaagaaaaataaaggtttttgttacttacctgaaaaggaattagtaggagatggtggttcttgctctgtagtttcagtttcagtttcagatcctcgagatgagtgggcaagtgttctaaatgagtaagaagaagaagaagaagaagaagaagaatgaagcttaattaagtgttgatgagtgtgtttatttggtatggaagatggtattggaattggtggtggtgtagaagaagggttttggtaaacacaagtgattattgctcttgaattcatagccatcttttgttctctcacttgttattattgtttcactactactaagttgagatgttttgcttttaatttccatggctacaattcactttcctatttccaaatttataataataaaattaataatgtttgtattataaacagcctcagcctcatgagtttatatgggccacaattgataaaagcatttccttccacaaatatttccacatcacctattccaatatgaagaaattaccatcactatcgaattttataagtagtttacttaaatatgataattttaaatataattaatttatatattattcttttaagtattttgatagcattttatatcccatatatatatatttatatatatatatataaattaagtttttaaatctcatatttaatgtttttatttgattaggcagttttatttgtcactgatgttgaaaagttgccggcgccgaaaaaatcaccgaaatagttgtcggtgtcagaaaaagcattggagttgctgccaacgacttttccgacaccagtagctactccggcgacttttccggcatcgacaacaaacttcgaaaaagt

SEQ ID NO: 28760 - DNA, 2005 bp, Cannabis sativa
tcgtgggtataacgtaaaaaattattgtaatgtagagaagaagtacaattttaataagagtaactactatattttggactttgagtatacatacatggttttaatcacatgaaaatatattaatgattaatttgctagtaatatttaattagctagtaattatggagccagggaattagctatagtcaatatagtactaattaagactaaaccaaagtagaataattaagtagaataaagtttgaaatatatatatgtatgtatgaaatcaaagagaagataaataaatcaaaatatggaacaaaaaattaagagaaataaaataagccaaaagtttgaaggaaaaaaagaaaagaaagaataagtctttaataagaaaaaaaacatggaatcaaaagaaagactgaatgttcgaaaaattatatagtgactttgcaaggttggttaaaacttcacaatcgaaaatcaaacatatataaatatccaaatttaaacatccaatatagttttgaggatataattaattaatatttatcaaataatacattattatattgtgtgtacgtgtaaagaatattagacttgtaaatatatccatgaattaacactaccagaggtgagcgtatttatataaaattatacaatgcaacttcttataaataatctcttcaaaatgatgcatccatatactcttatttgtttctgtattcgaaataaattttaagtcatttttttttttgatgttcatgcatatatgttataattatttagatcttataaaattttaaagagctctatttgcacctcacaactcaattaatcaaaattataaagcaatatcgactaattttattttcatcaattagtaaatattcacaatattacagaaatgtccagaagtagcttctatataggtagagatatatttatgatcatatctatacaaatcatttctataaaagcaaagcaatcattttctatacagaaaaaaaccaacaaaactaactgcatacgcaatcaattaatacaagaagaattatttcacatacgaatgttgcacataactgcattactaaaatccaatttgtttacgaaaggtgatttggtagttagacttctccatgtcttcctcttcggattgtatatttgaatgtacaaacttctgcctttcttatgctgtcgtaaacatcttcggttctctcctgactcaacacccttcttaactgtaattacgagcaactcaccgtccaacgcaacgaaacctattgatgataaggtgcaccgctcctctttcgggacatgtgactcctcctgccaacgatttgaatccatgtcgtatctgcaatgtataaacacggtaagcaaacaagcaacagagaaatccatcaagttaagaaacattagaagtaactgtaaccaatttaatcgtgtagaactgtggacaatgactcgtgtttccaagcataaagttatcatgatactttaaaatttaaaaatgttattatatcgtttcttggttccatgtatgttagttaccgacccaaaatgtagcatagtgacatagttagaaaatttcaacactaaagctgcaacagaaatacagggggagatgttttgcatgctttcttcactccaaagctttttttttttattagggtccaatatttaatgctgacaatgagctccttggcatcacaaaattcatatttctctacttcattcggacctaagtaggaataacttaagccgagcaaaatgagaccttttttttttctgtacttcttgaaaaagaaaaagaaaatagataactgaaccagggacctcataggagcaaactatggccataaggactacctaaccaagtaagatatttttagattagtcccaaaaaaagctatgtttcaggatgaacttgataagattgtgcacagaggatttttgtacaaactgtgggcacagaaaagtaaccaaaccaggaattggagattctaagaattcaatgggt

SEQ ID NO: 28761 - DNA, 4547 bp, Cannabis sativa
atttttgtttttcaaaagaaaaatttttaaaagtaaaagttttactttcattttgtgatttaaaaattagaaaacaaaagtgttaccaaacggcaccaaaattagtgtaaatgtatttatgataattatttgctgtacatggaatcaataataatttacatttttttaattcaaaagtaatgatatatatgtatgtgcatgtataatttacacctaaatttattttatgatatctgaaaatatatataattttaaataaaaagattattagttgtggttttttttttatctttaaatttaatatttatatttaaatgaataagctaagggtaattcatgtgcacatacaaacatatatttacacatctctaacatataaattatacacaaattttatacatatttgtttccaaaataatttcaattatagatctcttgttattggtgttaaatttgtgtgtgcgaatatttaattattagagaaatgttaaaaagtactgatagtgtttagtataaatattgctattagtataaataaaatatcggatttgagttttatataatttaatataataatttttaaagaaactaactaattataaagtgacacgtctaataagaatactcattaaatatttaaaaaattataaattaaaatatttacttgtatattataagatcattcgctaaaactctactttttttttttttattttagttcaaacttttacattacatcatacactagtttctttatattttccttacaattatttaaaattactttttaatacatataaaataaacaataattagatatgaataacatattatgtaaagaaacattgtagcattctttaaaatttgagctaaaatagctccagcaatttttgacatttttttttatctttctcttctctatttttaataaatgagtattatagcttacctaaatggatgtcctctaactattattattcaacatattaattattatacacattatttattattcaatatactactcattatacaaaagcataacttaaaaaattataaaaataatactaatatattaaaaaatacaaacacatattataaaatataaaatatttccgtgttttccttgtttctgccctgtttaatatttggggatgaaaaataatctctgtccctatctcgttctccatttaaatagaaattcgcgctctattagggccgagttcccacgagattatctccataagaaaatgtacatccctaattaaagaataaagagtggtgagtgagagtgtgattgggattggtttgtttatggcataggagaccaatagagtgggttggtggcatcatggagacttgtgtcagccaataatttcaaccaaaacttgcaataatctaacattttctagagacagtcaagcctttttggacttttctctcaatttttttatatagtcaacttgacataatttaataatttattttattaataacttagcctactttggtcaccatgagatttgatagtcaattttataatttagttactagattaaaatattgtaaattttttattaggtgtttttgtagtccctctcttttggtatttagaaagctttttagtttatttgttttttataatcccacgttgtaattatttaggattagctataaattttaagaaaattctgaataatttacagtacaaaaaataaaatttaaataattacttaccacacgtaaaagaaaaatccaaaaatttacaaggaattttaattaagtataacatacacgattattaaaaaaaaaaaaaattaaaaactctttaagatacctaaattgatcataaatctactaaattaaccctttaaagaagtgtactatacacataccttacaatatattattaaattgtaatatgataattttctttagtattgagtagatatacttttacatctattaagcattacatatttactaattacatggcaagttaccttcttttttagtgaaactcttcttcaattatttaagcaaaaagaaagtcttcttcaataattatgatgggttaaatgattttgtaagctatgtaaaattttggtgtaaaacatatggatgggcacatatcattacacttaaaatatcaagattgtacttccaatttagtatgaaatcataaatttgaattggtatatatgcatctcatggtggtgctaaatttatagatatttttaaatattaaatttacatttatttaaatatacatcataatttcaaataaaaaaaataaattaatttttaaatttactcatatatatttttttacattcttttgtgttaattgtaatgtatctttttatctatattactttcaaacaaaataaattaaatttacattgataaaaatagtataatttataaatgatatttatataataaaataatattgtgtagaccatgtatgaaagcatgaaagtgagagttgaaaatgctgttgaaatgggaaaagtttgcgatgagaacatcactggagaagatgaacgaaaagctttcaaaaaatggacggacggatttactcgccaagatcatcctacggtcatccaggtcatctaataatatattattggtatttttttaccaagtaataatgaaaatttatgattaattagaattaattttatgaattactatttaattaattaacaggttatattgcatggaagtaaagataaagatattagaggtgatgtaatgccaaatttgatttatgttgcaagagagaaaagaagaacatcacttcatcatttcaaagctggtgcccttaatgccctagtaagtttccatttcaaatattactttaaaatttttatgatggttttaaagcatgttgtattacatatgtgtaaatttgctagaaattttagataataatttaggtgttaataaaattatagttcaaccactttattagtttatttgtgttttttttactattcaaaacggaacacaattacaatctaatttgatatgttttcacttaacatggaatattttaagaaatgaacgtcttttttagaaaatagtttcagagaacgctactaaagaacaaagagctcagtagggccgaaagctaaagaatccattaattcgaggcatatgctaaaataaagtctctaatacaaataagataaccgtgctactacactgtatcgagatttggggaaagaatataaaaagtgttttcactatatttttgaccaaaaattgaattaattatctatttgtatttatttatatatttatttgaaaatttataaattggcatgctttaaactacaaaacaatgatcagttgattactaatattttagaagtaccttaattagatatctcactataattgctattttttccttatttttttttttaataaatgtatagaaaaagagaaatattaaatgatattaatggtatctactatctaacaacactaaagtgtcatatatcaaatctctaatttttaatataatttattattatgaaaaatgctttattcacatagtaccattgctttataaataatgctttatttcattgttaaataacatatatttttgttttgttttgtttttttttattattattgaataaagattagagtatcagccatcttgacaaactctccaataatcctgacccttgattgtgacacgtactcaaatgatccccaaacccctatgagagttctatgttacatattagacccaaaaattgaatcccaaaaagttggctatattcaatttccacaacgatttcgtggtataaataagaatgacatttatggttgtgaacacaagagattatacagtattaatccactgggaatggatgggcttttgggcccaaattatgtgggaactggatgcttctttagaagacgagcattctttgggggcccattaaagtttgtgtcaccagaaatgattgaactgagtccagataatgttgttgacaacaaggctattcactccaaacaagtaatggatttggcccactatgttgctacttctaattatgaggacaaaacccaatggggttataaggttagtactcttttgtgttgatgtttttggggataagttgagaactactttttttttattattacacattaatttaatattattgtaaaataattttaattaataaatatgttcttttataatcaaagtatcaaatataacttcacataatttattaaaattagggaccctaacgcacacgacgatatcacctataaaacttaatataaattaaagagtaataaaataaatggaaaaaaatatttttgcctataatatttaggaaaatatacacaatgcaccttaaaatggattttttttttacagattttgtatgttttacaagttgttttgatgttgctttctcgtgaaaataacgttgttttgaaaataatagaaaaataatgctctgtaattttgtaaaaaaatatattaaaatttgtaaaaatgaaaaaaaaaa

SEQ ID NO: 28762 - DNA, 1280 bp, Cannabis sativa
aagattttcgttgttaaatcttagagtattgttattaggtataagtagttttttacataattaggagttaagatgggctagttttgtgtctaagtaccagtccaaggattccaaacaaatatttttcttttaaaaatattaataaatatttaaaaaaaaaaaatcaataaagggcacaataatttcttgctaaatttcgaaagcccacccaatcttagtgtctgaacacatcatcatattaaattaggaagaatttaatttttatggtttttaagatataaattttcaaaaataagactttttcttaaaagcattattttatggtaaaattttaagaaaaattgaaaatatagaaaaaataatataaggtaattggttatactcatcttatagtaattagttactcttctagttagttacttgattacttttactattagttttctcatttttattaacttttttttttctttcaatttttttttttccattttttctaaaaaaaaaaatgaaccatatatttttgaaacccattaaattttaagcacgttttagtataaaaaccaattaaatatataatttcttctcaaattacataatgacacattttattatgtgtggaccatatatgtatgttatatataattaatggttgagatgatgatatttggatatatatgctgcaggatgatacactaagtgatacggtggcttctatggatgttgccacaaatgaaaacatgaataatctcatcaaagttggagaggctttgttgaaaaaacctgttactacggtaaatttagagacaggttcttgtgagccttgtcatcatggtgttacaaatgaagaagctatcagaaggtatatatatatatatataattatttatatcaaatatgtggtctcatatatattaataaataatgtcaatatataaatgtgaacattattatgaaataataattcttatatatatatatatacatatgtaatttgtgtgtagggttgccggaatactttccagggagaggaaggcccgtgaggcaagatcacccatgggaaaagttgccaccacaattcccaaataatatgctcatcaactattaattatatactccaatattaattatagttgatcagaaaactatcatatctatatgtgttctgattgattactattctttatgtaatatttattgtttgaaattatgaatgaataaacgtagcctaacactcatttaatgtaccttgagacccatctaatgtaccacggaataca

SEQ ID NO: 28763 - DNA, 2067 bp, Cannabis sativa
tttttttttttgaaattatccttagaaatttatctactaaactttttgagaaatgattatatttaaaagtatcttgtaaataatattaagtaacaaaatccattgccatgtacttgaagatggatatcttactttttaacaagtacaatttgtcccaaataatatagctaaaattagatgaagtggctatgaaatcatcttacttgctttagtatccaattttttttttctcagtgataagcttaggaataggagtgtaaaattggtcggtagcctttacaggcatgccagccagtttcacaaccctacatgaatcattcataagtccacttcaatccaatgagcaacattattagagtaatgtaatatagcaactcatcaacaactatttttccctaatgattaattcagtcactattttttttagtgactaaaaagtctatgtagattaacaaacgttgttattaagtattaatagtgtccaatactattttatgcattaagagccttaatgttagtataacttgatatgttacatgtaaatcaagatcctctgtccaaatttagaatctcataatgtgtctaaccaatataaatataattatgccatattatttaattgtattttatttaagtttgcacagtaaaattaacaagtcgttggtgagagtcccgtcaacactaacaactagccatttttttttggcgaataatttcctttttttttggaacatccttttagtttttgtgaacgttaattttttttttttagaatatagttttttttttcttttttttttttttaaatgttgtacaattctcttagtagaattattatataaaataaatcaaaatgaatagaattatttttttaataaacaaataataatagaaaattttaaatgcatcctcctaaaataggtgcatcggtgtacccttatttattttacatccgaaataattttgtagcttaatttttttcatggttatgtacgttgttatagtgttagggatgagacttagctacataaccctagttagactaggcttgctcatcaagtgcttcagtaaactagaaaagtccatacttctggttcgattcgactttacacatagatgttaagcccattaactattgatcactaacaatatgggctaccacagcaagactagctaggaaaacttacaaaaatactggaatttagattaatttttacaaaaatactgtcacatgattttttttttcaaaaatactgtgtttttataaaacaatagtaaaatacaaaacagaacaactaaaaaaagtagaacaactaaaaaataatcgtagaacaacagtaaaaatttaacacaatatactgtataaaacttacacattctttttgcaaaaaaaaaaaaacacagtatttttggaacaaattccgccccacagtaaataaataaaaaaattgataattttagtatgtggtgtaaataatccaaaaaactgttcaatcaatccatattttattaaaattaataaaagtaagctcaaataaaaagtctaacaattaaggttagtataagatgtgtatattttatatatttattgaattgtttattaatttttaatttatatttagtattggtgtgcattattattattgggtgattatataattcaccccttaaaagaggtacaccgatgcacctcttatttgtttcagcattcaacaaaatattatagtctaatttttttcataatcatgatgttatagttatttaagatatcttgtaaaattttgaaaaaaacttcagaataatttacaatatagaaaacagtattcaaacagtctattttacacgcgtataaaataaaagagtcattcgtgcaacaaaatgtttgaaccatgttttcgtcgtgttaaattcttttaattttttttaaaattttacagaatgctttaaataactacaacgtacataaccacaaaaaaaaaaaatactaaataattcttccaaatgacaaaacagataagagtgtaccgatacactcattttagaagggtgcattataaaattttctaa

SEQ ID NO: 28764 - DNA, 2299 bp, Cannabis sativa
tgattttgactacaatcactttgatgaagttgttgttattattattaagatcatcataatcgttgtcttgattgggttgatgaaggagtcgatatccatcattagtgtggtcaaacaatatttgtggtggatttcgaggagagagtaaagtcctatcaaaaactggtggagttgtgatggtgggtttggctcgagtaatttgagaccatgcatttacgaaatcgaaagctgaatttccatccattacaacatgtgctcctccaacacttagacaaattccaccgcatccaaaataagtaacctgtttagtaagagtgagtcatgagtgatattaattataataaaataactagttgatcagaacttttaaacaaaataacttttttctaaaaataaaataaaatgcacactacaaaataaatgtcatgtttaattagtaacaacttttacacataatataattgttttgcaactaaatgtaatttttaattacatgcaacgtgactaaaatgttgtcattagtttagttttgtgactaaaaatacatttaatcataataaattgtaatttttataattaatatttttagtcacggacttttagtcacaatgtttgaataataatttataaatagtcataatttttttacttttaatcacaaattttggtacgactaaaagaataattttgtagtgaaacatctataaatatgttgttataagtttggcaaatatctcgtactagagtccatactttcataaatatatataggctagaccaacaagtggtgtttaacaagtatagtaccaaatagtaattatcataaatatatttgaatccaaatcacgtattcaatatcatatataataatctatcgattacacacctgcaaagccagcaaagggatagaagaaatttcggtagagtagcagtcgggggccgggggactgagcttggagagatccgaagaagaggtaaaatctccaaggtcgtgtatgtgagagttagtctcggccacgacaaacaacacaccgtcgtcattgcagttaatctgaagacgacggttgtggtcgtggccaagacggcctgcaattggataaaatggaacgagaaccttagcaagagattttttgaggagagaagggtcgaaaaagtggttagatgttggaacttcttcttggttaggcttattatagaaatagaggcatgtgctcatcctctttctcatttcctcataaatcaagtccaaatctgataatggaataatgttgattgggcgaggagggccattctgatcagctggcttcactagagtcctctccttcaccttcacttccattacattcatattcatcatttgcatgccctctataatgatataagtccccaacttataagatatctatatatactagtgaaataatacgtgctctccacgtgagttactcacaaaaaaaatgggtaaatattatcttggaccctgtgttttgcaaaagttattaattagacctcgtgttttgtaaacgataaaaatgtgtatttttcaaaattatacaaataggaccctgaattaattttttgtcaaaataaaacttaataataatttgatttagatgttacgacaaatctgattatattttctatatgtgttcgtattagaaattgtcttaaagttgattatattaaaaaaaaattgttgaaaatcgagctcagggtcttatttttaccattttagaaaatacaggatctattttgtcatttaacaaaacagagagtccaatttataacttttgcaaaacaaatggtccaaaatatattcaaaaaaaaaatcataaaatacaatatttttatattaattactttctttcttaataacaagccacattattttgataatatattaaaaataaatataaaagctctattttcaaattttgcttcacattatgagattatgtttccaccaattattcgacttgtgacattgataacgttagaaataataaatgtgactaatcaaactattgatggaatagttggttgttggcggttgggacaggttagattataaatttacatataatatacataataaatatatgagaaatgaggtacaagtagtatttaacacccttctatgtgttattattgctattgatctaattaagtatcgaattccataatagtttaacgtaacaacttttagaataccacataactaacaaaaaaataaattattgttcttttatgcttccaaaaataaattaaaataaataaattaacaaattcaaaaaaaaaa

SEQ ID NO: 28765 - DNA, 2762 bp, Cannabis sativa
tattacttgtttgtgattgtgtacacttgggcaattataaatcaatataaattttcacaacatcatccattggaggcaagggcctactatttagattcaccgagatgtttgtatcagtttcaccagctattgtggctatacttatggtgcctattgtggtgataggattgaccacatctgtagtgttcataggaattctagttgtggttggaacctgagcatccaaatttgcagtctgtgggtcttgagagaggcccaaagatgtagatggtgcgactggcgttcttctcgtgttaaccatggcattgattagatacgatatcctcgctctcaatgaaagcactaaactgttaacctcaaaaattgattaaccaacatcggtgttatatagaaatgatgtttgccacatgttacataattagaatgagaaattaaagaacacacaaaattgttatagaggttcaaccccctttgatagcagataatgacctactttccttttcgttaaattgataccgaggtttaatattatccagatcattataggtggaggatttgatatagtacccttaaggaaaatcaagtggaaatcaaggttgaaaaatctcaagtgttgagatagcttgtatgggcatgtgagagagagtgatgaagagagttattagacttagagtgtttttggcctagttatgacttagcttttctaggttagagttaaggcctttatataggaagactaaaccttaatttacaatttaaaccctaggatatttatatattaaactagttaattacaaaacaccaaaatgtccttaaacatagatattttccagctattttattgggcttttaggacctaatttgcaacccaattagcagtccacatgtagaattgtataggttatcctgtcaggccttcacttagccggccagacacctgcagggagcagactagctagccatggtgttgttcagaggctggctgaccatagagccagccaggggtggccgaccaacttttgtgaggaagttggtctgtcatttgatgtcccatttgagtgtcagggtcctgtttactaagatactaacttggccttctttttggtgagttttagtgccacgtagccttgattttgtccacgtaagcactgccacgtcaggtggacaaaaattaggataacaagtttcctattttggtaggtcacgggtaaatcaccgagattggttctgtaattaaaaaaataaaaagtaaaaccatctcaaacccaaaaagaaagcaaaaaaatccattccactaaccaaatcacccactgctcttagcctctcctctcctccagaccatgcatggcttccactgcccaccatttttgctcctctcgctccaccaaagcttcaatctttaacatatattcctcctcctctaacttctttcttcatctttaaacccctaacttcatctcacttttctcatcctccatttccccaagttcaattgagttaacttgtggtgtgaacttagctttgccaatgttatgtgctagatcaacccaggttatggatcagtctttgggtttgaaagcacccgccattattgaggtcaattttggtaatcaaagttatcgaatttatattggcgctgttcttcttaatcaaccagagcttctttagaggtttgtgattatcaaaatttccatcttttggattttagaaattacctgtgttggaattgggaatttttatttaattttattatggttgagattttcttgagaatcatatatttcataaagctaaaactttaattcacgaattgttttgtttggagcttagagaattttagcctacttttggaactatagggaaaaaaaatcaaatcttcatatttaatatgaattttttattgaattaagtgtttttccatataatttttatttctccaccaaaataaacttctaatatagtatttccaatacaatatatgaattttaattctattgtgaataacatactttgattcttgatgttttaaagatgtattatatatcaattaggaaaaatacgatagtttcaactattttgtttggagttcgagtaatattatacaaaccatatatttactttaggattttgttcgatttatgtaaacaatcaccaaataaagattgaactgaactaaaatgaacacagatgaacaatatggcataaactaatgagaattaaactttaaaactataaacaacactagcaattttaagtggttcaaccatgacttttcaactcgagtccaagattcattacattaaactcaaaagtttttgtagcaaaataacagctcaaacctctccaagttctctctctctctctatatatctaaattcgctataagacattaagtagattttacacaatattgagtgtatttatagatgttgaccttaaaaactgatcaaccaatagcaaggtcgtgcagatctgatgtttgccacgtgtgtgcacaaataagtgtaagaagctacagacaacgagatttgttatagaggttcgatcccattgtgatagtgagtaataacatactccctttttagttgtattgatgctgagggaatcactaaccatatcgctataggtgggatctactatattgcccttaggattgcaatgtatgaatcgaggtttggcacaactcaagtataagacaacctagagggttgtatagcctaggcttgggcgtgtgagagaatgaaggagagagagagagagag

SEQ ID NO: 28766 - DNA, 7945 bp, Cannabis sativa
tgtaaactgattgctgctgtagtttgatgctgataattcatgttagaaattaggattgtatggtatggtgtttgggttccgtcgtctcaaaacaaatatatagtatttagtttctacacattatcaatatgagacgtatattgatggtggtattgtttttcgctcaccaactttttacgactctattacaagcgatcaactttttttgattcaccgtctctgaatcacaagtgactctttcgacttttgaattaatttttgaatttggatcgaatttaaaatttaatttgcctctgatcttatgttaaaatttatgattgtatagtaaagtatacatgaggtttcatctaaaaattaattgaaaatgagaatattagctcaaatatcgtatctatgatatttagttttaataaattatcaatgtgagactctttaacaattgtaaaacgatgcatggagaagaaagaagatctggagtactgtgtgtgaatgttctatctccatatttgtggtttggaataatagactaatttgagaatttataacaatatcaagtctataaagttttgacactttttgctttcattattaggtattgttgtacctatcttctttcgttattagcatttgtactttgacttatctatcaataatatatggccttattatgattaataataatagcatcttcaaatgtcgaatttctgagtaaaatttgtaattgtgttttaatatacctcttatcaactaactcaaaaaatcaagcaaggaatgtttaccacaaaaatatgtaagttattatctaaaaaaattatttacgttattatatttgcagcaattaaatactttaaattagttttttttagtgataagtagatttcgtccatattttggtataatttggtgctgtcttatgtttcacaaactcttcctatacgttagatcaaacctacttctaactatttttgctacaatatatccttttaattgagtactttaactgcaatattcctttcgaaaaaaagaaaactgcaatactcctttttactagatatttccactaatggcataaaacgaaaacttaacttcaaaacactttattttatattcgcaatcaaaatttatataacaatccacacagaaactaacggagtaactcaaactataaattaaaaaaaaaataaaaaaaaatatataagataatttcctttaaaaatgtaacaaaaaaaaaaagcaaaaatggaaaataaaataaggtaagtaaatcctctacgactctgtcaaattaatgcaccatatatattatatacacacactgtgtcccctttgaaaaatatgagagtgagagagaatgggaacttcatttgtgctattagtagtgacaattatgggaattttcattagaacacatgaagctcaacttgcttatgattactataagttttcctgtccatttgtagaaagcacagtgagaacagagatgttaaagattttcttgtctgatattagctccccagcagcatttgtaagactccttttccatgactgccaagttcaggtaaatactatttatgtttttgatctttttgtttgtatatgagtaaccatctcatacttgaatacttcattttgagtaatgttaattttgttttatagggatgtgatgcctctattctgttgcaatcccatgacttgagttgtaattctgaaatggaatcttctagaaattttggtgttagaaagttggatatgataaaccatatcaagactgtattggagaacaagtgtcctggtcaagtatcttgtgcagatataatagctatggctgctaaagagtctgtattttttacaggaggacctgaaattagaatccctcttggtagaaaagactcagtaatgtgtagtagttcacaacaggctgatgccaatattccaggaccaggaatatctctcaacaaattacttcacattttcacttcccatggaatgaccattgaggaatctgtttccatgttaggtaaaataaaaaatgacttattactgactagctttacttactactgatctatgatttattgattgttttaagcccctactactagggctactaggtgtcaaaagactaaagtcttgttttatatagtgatctcagaaacatgtgcataaaataaataagcaaattaatttagtggaccagtggggaaagctactataataggaaggacgacatgagatttattgaaaatgaattgctttctttttcatatccaaaagttctatacacatacaaatatatttgtggctttgaaccttagttctattcaacgattctaccactaaatagttgataaaattaatggttattatgatgtgtgttcaaacccaattcaatacgtaggaatttaaagaaataatcaaagaaaaaaggttgataaatactatatattactttaagtacagaagtttatgtctttattttttaccacgcaaaatttacatttctcccctttagattataactttttacattattctctctttcttttccaagttttccttcattttctcttttcacatttttatttcattctttcttcgattttgtttctcattctttctcctattcgtttattttatttttcactcgaggtatgactaatttttttgctaaagtacgtattatcttggatcatcttgatccaaaatatacatgttggatcagttcaagttattctagtcaccacacactcctaaagcaccaacaccataattacaatcaagaacacttggacaaaggctaatctgaatgtatgagtctttgctcttttatttttttattattaaagtgaatctatatttaaaaggctaaattcattttaatgagttggtctctatttatagagcatagagccaatgattacaaatgactatgcaaacctaattaacataacaaacagttaagcaaactgtcctaataacggcgtcactaacctatccaactaactaatgttctaactagagctagacacataggcacctagatttaacaatttctccaccttgattgctgatgtgtcttcggactagttttttgatataaaaagtaggttaaaacagtgtttgaacttggtagttggtagagccttctaaattcccatgtaggacggttgtcttcacatcaagttgctatagctcaaaatcttctgttgcaactagacacaacaacattctgaatgaagtttgcttaactacaagtgagaaaatctcattgtagtctatcacttccctctaagtatagctactaacctggccttgaatctggccccttcaaccctttgcataccttctttgtatctataaacccacttacatcctacaatcttcttcccaacaattctaggtatcataactcaggttttatttttcttcaaggagtaaatttcatttcccatggcttttgaccactttggtctatcagctgatcacattgtttcctgaaatgtccttggttcttctccaatcattttagcaacatgtagagcatagtggactatgtcagcatagccatatctaggaagagccttaactactcttctctttctatctctcaccaactgatagtcctcggtgtcatcatcattagattctcaaagagcattctcgtcgctttcttctttatccaccaagtcttcctcctttagttcagtttgtttatattgagtttcatccctgtcattctccacctccacctcaaactatatactcttatcaggtctgatatgatcttctaaacatcgtgttttaagtgtatccttgtacactttgtcttattcaaacacaacaatatctctacttgcaaagatttttgatggttttcaggctcaatgttccaaagtttgtaaccttttactcattttggatggccaaggaagatacactttctggctctttattcaagcttgtcttgcttaatgtggacaaaggctacacaagcaaatatccttacatgatcatacttagaagttcttcctatagttgaggaagggcatctattaattaaataacagtctgtggtgactgcttctgcccaaaaattcttaggcaaacatgagtatatcagcacatatctcaccttctccataattggtcttgttcattctttcagcaaaaccattttgttgaggtgttcttagcactatgaggtgtctatcaatacctactttcttgcaatattaatcaaatattccaacacaaaactctagtccattgacagttttgaattttcttatccttttaccattttgattctcaattagagttttccattctataaattgtttaaatgagtgattcttatttttcaaaatgtaaactcatacatgtttggtataatcatcaataaatgatagaagataccttgaaccacctttagattttattcttgaaggcccccacaaatctgagtgaatgtagtaaagaatcctttttgacacatgtagtcccttaccaaacttttctctagtagacttccctagtacacactgctcacagaattcgatctcttgaatttaatcctttccaaagacccatttattttttagcacatgcattcatccattgctggtatggcctaaccttctgtgttagaccattgtgggattcttagaacttttaatcacaacatttacttctgatttcttagatgtgtggccatgcaataggtaaaggccattttcttttacacctctcgtcagtaccctagagactagagtccttgacaatcttcatgattcccttctcaactttgacaacacacccatcttggtctagcatggctacttaaatcaaatttcttttgatttcaagaacgtgtatggcatgtttgagttctataatctcaacaccttttagttctaatgtaccatctagcaatgtgggcatgattttttatctctcagcttaacagtaccatcctccaattctcaataaaatttaaattgagatctatcaggccatatatggaatgaacaccctaagtcgattacccaatttgttttggtgctttcttttgagaccactagcacatttgcagtgtcataaccatcatcatcagaaactataagcatttccatccttcttctttatgtaactcttgaagattggatagtctctcttgagatgtgatggtgaattacaaaggaaacatcttctcgtgggtttagaactaggagcctttccttttttattctgatgtttcttatgatcttttttggaatgtttttctcaaatcagcaatcttttacctgagtttacttccttaagctcaaattttctcttcatctctttggacattaacgcattttgtacttcttctaatgtaagagaatctctctcatacatcattgtatccacaaaatgctcatacctttcactcggaagtgaattcagattatgattgcttgatcctcatcctcgatcttgatctctatattatcaagatcaagaattatcttattgaaatcacctaaataatcttcattacttttccttggggacatcttgaaagagtacaacttctgtttgaagaagagtcaattagccaaagacatggtcatgtacaagctctccaattttagtcagagacttgcaacagattgttccttcgagacctctctgcgtactttgtctccaagactcaaaatgatggcactatgagccttatcaagcatctgagacttctattttcctgtcaatccctctaacaaggctaaattcattctaatgagttggtctctatttatagaacataaagccaatgattacaaataactatgcaagcctaactaacggacagataagctagttgtcctaataacaattagtaactaatctatccaactaacaaatgttccaattagagttagacacatctgacaggcatctatacatatttatgtttttctaccatgatagattgaggaaattaaaacaaaaataaataactaaagctggagagactcaaaaacaatataaattaaataatttacctatgaagatttaaaaggaagtttttctttttttcttttggataaaaaaaatcaatcacatttggtatttagaaatttaaaataatttatctgacaaaaaaattaggataatcactctcatttgtgtgtaaatttattgataaattattgtcttacaggtgcacatacacttggcgtggggcattgcttaaacatcgcaagtagattatatgatggtaatcccgatgatcaaatgaatttggggtttgaagcacacctgaaatggaaatgcccaacaagagttcctctaacaaatctcacttttgtgcccattgattccaccccaattgcattcgataaccaatattttaaagatctcttaatgggtaaggccttgtttggcatcgactccaccattgcaagagatcccttgaccaaccccattgttacaaggttcgctactgatcaagactacttcttcaaagttttcagttctgccttcgtgaagctttcttctacaaaagttcttactgctaaggaaggtgaagtgaggaggcaatgctatcgtagaaactaagaaagtgagaaaatattattacatatacatcattctaaagtgtgaataatggaaaatatcttccagccttgaaaaggtaagctatggtccataataaagatatggttaaaagtaggagagtggagctaaattcttttgtactctttcatttatgtataaaatgtataattgtaataataataatgtgtaacattatggagaatcaaaacctatttttcattgctcaaaaaaaaaacctatttcacaagatctaaactatgctactccactacctaccatgtctccctcccatcttccaatatttcatttcatctggatgtatacattagatgtcgactagacgcacagtggcgctagcttttgtttcaagatctgatatagtctctagatgattttctttagtacctaaggttatgatttcaactatgttagttgacagtaaagatgtgatcaaataatcatggaggtggctctaccaatgcagacacatcatagtgaccaaccactctgtcgctcaaaaggcgcatagcagcaccctgggaaaatttccttgcgaatagaaaacaaggaacgggtgtaaaatttgaacggcaccattctgttctgaactcagtctcatagtatatatggttgaccttctgcagggttagtcagatcatttggtcaaataagaaacaagaacatcaatagaagaacagagaaatgataattttctatagaagagtacttaaataaaaagagggttctttcactcaaaaaaataaaaataaaaagagggttctttacgcagcaaataaacattttaaggtggaaaggaaatttcattatggaaccattgcaaatagttcaaccatgtagaaatacaaaggcaacaataaactacctttatttctttgatctttttagggctagcatttgcataattaaaggtaacaggatgccaatctttattctccattttatttgcagattgattccaaacagtatatgtcaatgttcttcgttcaagttcatcttcaagctgactcatctaacaaaaaattacagaacagaaacaacataaataaactcctcaactactgcaacatatagatatagacaaaccactcaaacccaataaaacacgactatgtttcagcgtaataagatagtttgatacaccaaatacacgaaaatgtgaacaaatgacttactgcaagcaatgttggcacataatgttcatctggaatacagttgtgctgcttctgaagtttctgcattcataataaagcaaaaagttcagcaacaatcactccttgatgaaaatacccattgactcaaaataaacaatcctcttcacata

SEQ ID NO: 28767 - DNA, 2761 bp, Cannabis sativa
atatcactaaaatatcaattttcacccaagcccaccaactttctctagggttaggtgcggcttgggcgggattgtgttttgctactgcaaatcaatttttacttagttttctctatatgatatgatttagagtattttagtattatatttgtgacataattttgagtgttttagtattgttcgtgtgatattattttgttttgttgttggttcttctttgttctttgatgactcacaattaaatcactattagtagttagaaataataagttatctgctaccgaaggggttgttagtagtgtagttacttaccttacacaatagttgagtgttcaagctacaatgttaaatgaatatactgcaacaatttatattgttgtgtcttttgagcgatggatgaaataggtaataagtgtttttaaggttgattgtgatgatagaatcttttcctttgatttcattttagtttttttttgttaaacgatctgagaattacacgactgattatttgacttgtttttctaattattatcttggtcgtgtttccaataagaaatatgtcctaattggattgcatactattattttaactaattgttattaataaaattccataatttattataaaagaaaatagtataaaaaattttgtaaaaaaagataaagtttttaggggttgttagaaaaaaaatctaaagaagattataataaatttaattacaagggggtgagaataaataaaccattaaagtagtaactatttatgattaaatttgctactaaaattacaaagaatcaatcataatgagaaaaattacttactaaagtcattgttatcaccttcctcaacagcatcaacagacaatggtaagtgtggtaaatcataacttttagtactaaccttagtttcatgtgattcacattttagattttgatcacattcaattactcctaaactcttagaagagtattccaagttcattgttgttgatgatgttcttatatcacttgagaaacttgtcacttccagaaaatcaccaagtgttgctcctgattcgaatcgagggctcaagtttgttgaattatttgtctccaattttgatcggtttctataagcgtcctcggtgagaatggttttagactcttcatttggtattgttagaggtgtgttctcaatctcaattagcttcttgatcacatcatttatcattgaatctagttcattatcattctcattgtcatctctgcacaacaagaattattcctttaggtttcatctcaaaattatttgtcaataagagaagtagttcatgcatcttatataagatattatattacaaatgtgagactctctaacattcctcaagatagtgactattttggttaaccattttggatggttcgatttttgccttattatctccgaaacacaaatagctctttcagctctactttatgatcggctttggattttgggtaccatgttagaaagtagaaatacaatggtggagaaagtagagtaggacttggtgtagagtaagatgtattggtaaccatctcaaaatcaatttgcaatgagaaaattagctaatgtatctttatatagagtattacattcttataaattatcaatgtgagattctctaacaactcaaattctgtaagagtcatagcatagtttaggagacaacaacgatgtatcagttttcgaatgattagttgtgtctggaagggagatcggtgttacctttcgggattcaagcctacggaaacataagttgatttcacgagatctgcaagagccgaaggttcgctcgagaaatatcctccaagtttcgaaatctcagctaaaaatgcaaagtccataacaaactgggagaagagtgaataaatattaatatgagagtacagaataagaagcataaagaaaaatgcataactacattacaatatagaataataaacctgtttgtaattaactgaattttcttgagttgaagtctcctcagaaatagcccacatatctcttttggttgaaatatgaatgaatgtggtttctacaagttccctcaataattcaagtaaccattccttttcaaaaatagagtcttcgactagtctttctagttttctcagttgagaaaataataccttataatgaatgacacaacaattaatggaaggataaggattgtataaactctaaataaaataactttttaaggacgcgtttgtaaagttatggtggaattaaatttagatgtaattagagggtaattatataatttaacatttttgtttaaccatgaaaagtgggtgtttgtaattactaaaaattttatattctaaatgataactattaaaaaataatattttgttgtgtagttattaattattttgcagaaaagacattacgaatatatatatgtaatatacaaacacattttacattttaaaatatagaacatgttcgttactatgtaattactaagtagtgtaattaatagagtagtaattacgtaaagtgtttggatatgaaatgtaattacttataaattcctaaaattttgtttaacaaattagttagtaaatttaggaaagtaattaatattatttagtagttgatatttaaaatgatcattttttattaattacattcaattttcgtaagggattatttgtgaagtgtaattagaacctctcaattaccgagaactacacagttttcaaatgcacacatagtataattatcactttgtta

SEQ ID NO: 28768 - DNA, 3567 bp, Cannabis sativa
  modified_base (412)..(412): a, c, t, g, unknown or other
  modified_base (691)..(698): a, c, t, g, unknown or other
  modified_base (1260)..(1265): a, c, t, g, unknown or other
aaaaataattatacatatttacagttaactatatacacattttaatatggaggccaccgattccatatcgtccagtacggcagcggaacggctcacgctcataaatataatatgatatattagttgaattcaaaaaaaaaaaaagaatactacagctgtatttatttcaaactcttctggaaagctagcataggtgattggtccacaaaatattttgaaattacttaaaaattggtattagactattttggttaccttatgtgtttttttagtttaaaatatttgttcttgggtagcattgtcattcaactcatttgttgatattttaatttgggggagttatatttacaccctataaaattataaatacactccattattaaaaagatataaacttaaataatttttaaanattactcttaatatttttttaaattttttttcctcacattattttatgttaatttcaatacttatgttgattttatttttataatttttctaactcatgtatatatattttttttttattttttttaaagaaaatttcatataattttttattttaatctttttgtcataatttttaaaatttaatttaattttatttgataggtatattttttaagaatataaattgaaagaaagaagttaaaaatacttagtaaaattaaagatataaattttatannnnnnnnaaattattaaaatggggtgtacttaaaaaattttgaggtgtaaataaaaattcctttgtgcacatatatttttacatatatttcccacttttaactataaataactaaaaaaaaagggaactcgtgaaaaatttgaaagcaaagcagcaggtgctgtagcgaaactgattgcaaaagaggggaaatcggccacattaaaattaccttctggggaggtccgaaatcttccctctttgccttcaattacatccgaaaacgacttgtaaaccttattatgaccgtctcgcattggttgtccgcggatcgttagaaaacacattgtttatgtagacatctaattatccatttttttttcctgtctaatctgtttatccacttatttggttttccaatgtttttatttttgttttatatttttatttcttcggtaaattattgaattatacatgaataagtaaatgtaaactagctgaataaaaatttaatcatgaaattattttaaaaataatttattgcataaatacttaaatttaactctcatttgtaaataaatacttaagtnnnnnntttagcggtaataatacctaaattataattttggaatttttgttggtacctattactttagtgttaagtaaattgctacgtgacaattcctaattagcccaagccattaaatttttaattttgtaaaaaaattaatttaaatataccaataaaaaaatgacgcgtgaataatgacttcacatttaacggtcaggtacatacagagttccaaaaatataaatgatgtattattacgccaaaaattaaatttaggtatttatttacaactgggagttaaatttaagtatttatcaactagttatgtattataacaaatacttaacgtaactagttctaagatttagtttttaatttggttaatctacataatttatttttcgatgttatatttttaactagctgataaataaaactaattttgtattgtcaaattcaaaagtccaactctgatgacaattccaacatccaatatcggtgacaacttcgatgtctaactacgatgactttttggtagcgatgactttttcgacgatgatagcaattttatcgaatattctcattctattttctacttttattgcgaaaaatattttgttttaatagacagtgattgttttgcgtagtgggttgatggtcgagtcttgaaactgctcagaaacttgtaaatgattttgattttggtcttgtgttggttttagttttggtagttagttggtggtcaagtcttagagcttctaagaagcatgtaaaatttatatatgagtttcgatatttataatactagatttttcattcagaaaccaatttttgattgtaccgaattaattagtttattaatttaatgtcttaataaaattattttagtattatttcaatttcttttagttgagataattttttttttctttattacagtatttttattttctaaaaaaaaagaatataaaaagaaaaactcaatttaaaatttatggcattcctcctttttttttttttttttcatattttaaaggtttttttaggagaataccatatttagtataattaaatttttatgttatatatcaaaatttatatttttttccctatattattgtaaatagctcttaccataaaccatttaataaatatttttggaatattatttttagtgtttttttatttttatcattatcttttttttttaattacccataagtgttaaataaataacttgtagtacaagggggaagtacaatatccctattgctagtttcaattatcatatccatatcaattttttctaaaaaaaaaaatcacccgtttttagccattgtatatgataatataagacttgatggttataatcaaagaagagtaacatgttactctatttaataggcgtgactgaatcgtttgcctaatatggaagatattatattatctttatataagtttatttgttaagctaataagttaacgaattattaagcgacaagattaaatatactactatacaaatttgattaagcatgggatgttttgctctttaaaagttttatatataaatgaacaaaatgagttatctctatacttgatcataaaatagccttgatgataatgttcttgcctataatacaatatatacttttatatagtctaaaaaaaaaaaaatagtatacttaacatttgttaatataatagaacttaacaaatatactcaaataaaactaagaatatcaaattaggcaaaatacttcaaattgtacataaaatttaaacgaatcttcataaaagaattaagattaaaataaaaattacgataaataatttaatttttatatattaaaatttaaactattgtataaattactgcaagaaaaatgcataaagatttcatctaatttttatttaaaaaaaataaaaattacaaaatattaatttaaaaatatcattacattcatcacttataaatgtttttttaaaaaaagaagaagaagaaaaagaaaaacacatataattaatgacctttaaatatacattgaactctacaaatattttttaaaaaaaaaacacaataatttaactctcatatgtaaaagtttaaactatatgtacaaaatatatttatatatttgatattgtttaggcctccaaacacatattttttttatatttatttaaaatttttgttttatatttttatatatctttatatattaaaagtgcctatttaacggcaatttttggtttaacgatgttgttttgtttcctctgttaactttaacagaatattcccaattaatttatattgtttttttaa

SEQ ID NO: 28769 - DNA, 6586 bp, Cannabis sativa
  modified_base (291)..(291): a, c, t, g, unknown or other
ttttttttttttttgaaaataactaaaacatagtataaagttgtcgttaatatatatttagtcacaacatgtacattatgacttaaaatacatttagtaacaacaaattgtaatttttgtaactaactcactttcagtaatacttctttccccctaattaaaaagagtttgccattccggagcaagttccatatgcgctctttgatatttgatatggttgaatcagtccggccctgggcataggcggactaggcccacgcctaggacttactcattttaggggcccaaatnaaaaaaataccctttaaaaaatatacatatattttttttaataaattttaaaaataccatttatctttatagtaaaggcctaattttttttttttacttatagcccatttcaactcagagccgggttgaataaaacttttttgtcacaattagatggatacttataaaaataaaagcccaagttataaatttattgtaagtaatctcaatctacattaattcatgtagctaggtatagcttatttttttattttttttattacattttacaagtatagattttttgcaaaagaaaaaatatacgtgtataatattattttcttatatattaagtgtatatgaaaaaaaatgttatacaagaaaaaatttatacacttatataattatatttcttcttataatatatattgatatattttgatattaaattttacatatctttttttatttttgaaagctgaattttacatatttttattatatgagaacccacaaattaattatagggtgttgttgtatatattgagcacctataatgcgtaccaaataaaaatgcttatgctctcaaaatatttttattaatggagaatcatcatcatgtcctatatattacatatgtaaaattaggtgcatgatcataattaaggaaatttaaagtttgtaaaagagttggggaggggacaaagaaatagagacgtggcagttctatatatgtgatacgacatggttttttctacggattttatttttatttttcattaatatatatttagtatagccaaataattaattcattatgctagctcttgagtcatgagtatccaataaccggcaaacaacttagtatagttcttattatatatgtaactgttcattggatcggttaggaattaacctatattataattgtttgttaacatagtatatatatatattataagtactcgctcgtaatacaaatgtccatttattatgcatctcaaattaaagaaatattttgtcaatatgtaataacaatgttattaataaaatgtttagattaagtgtgactagataagattaaacaaatgctcttttattgaatatgcactcccaatcaaatagtattccgtatgtaactaaaagatattgtaatattctctccctatattaaatatatatattataatgagtagtctatatcctcaccatatatagactctatccaaagcacaatgaatatgattataaaattagtgttttatatgctaagtcaaattaaattcccttttaaataagacagtagtgttaagacttcttcaatttcctaacaaacattcttctctaatgataaccggcatgcatgtctcattatattattatataagcctaaagctcaattatattataatactagctatatatattgtatatttgtttatatatatttataccactaatttcattcatactacttaaaattggaggccttacataattaattggaatgtcaactagccagcaattcgtgcagtcacgttttgtggagccccaaaaatctcaccaaaacacataatattatataaaattcatcaaacaatcacattaatcgtgttccccactttgtataattgttgatcacctatatataatttacaaaattatctaaacatcaaattaaatctttcctgataattgtacgtccatccttaatacacatgaacattatggctaatatttctctatcatctattctaatcctaatttcattcattattctatctcacattgcattatcaattcaagccaatgactactacaacaccccaaaacccatttcaaacaaagtccccaaaattagtactaaaatccccttgaacttaatcgactcatgctggcgcgccaagtcgaattgggctactaaccgccgagccttggcggattgcgccgttggctttggccgaaacgccataggaggaaaatacgggaaaacatacacagtcacaagctcatccgacgattccacaaatccgaaacctggaacacttcgttatggggtgattcaagaggaaccgctgtggatagtttttgctaaggacatggttatcaagctaaagagtgagctgattatgaataattacaagaccatagatgggagaggggctaaggtggagatagcgtacggaccatgcattacgatacaaggagttagccatgttattattcatgggattagtatccatgactgtaaggctgggacatatggccttgttaggagcactcccacccacgttgggtaccgtctaggagccgatggagacgccattagtgtgtttcaagctaaggatatatggattgaccattgttttttctcacgtagtagtgatggcctcattgatgtcatctacggttcaaatgctatcactatctccaacaactactttactcagcatgataaagtgagttttctaactatatattttataagagttacaaaaataatataaattaatgttacttaattataactgattaaacaacataattaaagatgttacacatgttaactttaccagatatagttatttaaatctagaaaacatgtacaaactattaattaataatttgctttggatcttacttttaactaattaagttttgaccattattgacaacaggtgatgctgcttggacataatgacgcattcacagcggataaagccatgaaagtcacaattgttttcaaccattttgggcctggacttatcgaaagaatgccaaggtatatatacataatattactccatattaaattgtaccaagacctaataagaatgctatgcagtatgagtagagtctcctctaacatttctcaattaattattatatatacatgatttaactaacttcatattatgtagggtgagatttggttatgcacacgtggcgaacaatagatacgatcaatggaaaatgtacgcaattggtggtagtgctaatcccaccatcttcagcgaaggaaattactatgtggcttctactacaaacccttactcccatcaggtcacaaagagagagccccaaagtggttggaaaaattggaaatggaggtcctcaaaggatgtgttcaagaatggtgcttattttgtccaatcaggttggggaagctgtaatccttattacactccaactcagtcatttaaagttgctcaaggggccatggtccctgttttgactgcctatgctggtcctctgcgttgtgttgttggtaaaccatgctaatattttaatttcaatatatatatacacacaagttggctatatatatatatatatgtcaatttactatatagtcagtaattaatggatatatagtaaatatatatgccacaatatatgtatttataaatttgaagcatatttatatatatatatgtaatgtatttagctgtaactataaaccatgcatgaattggtaagtggagaggattttgtagttcatgtataaatcatggaaaacatgagtttggaatgaactttttccctactaattatcgaaaccctgaaaaaatgtgtatatagtcttaacaaaattaagactgcaatactggaatataacttttgattttctattaatagtgattctctttttctcttttcttgtcggataatttggttgtatatattaatgatgttattagtattttttttattattactttattttggaatttaataaaaagtagttcgtatattatgaatacatggccgaccaaataaaagtaagaacatatcgttaaacgaaggcaaaatcaaatccatcaagatttggagtactattacaggttgatgaattaaaaaaacaaaaattaattaattaataaaaaatattaattaatcaaaccgtgtaagaacaagtgtattaattgttgagtactgatgatgtttactctttagaaaagcctgttgtcattggattgtaccccacatgtgactggcgcttttgctctcactttcttcaaataccaaacaccagctccaattcctaacactccagccactgatgctgcacttgctgtccctgcccatccaataattattaataaatatcttaaataattacactattactaaacttaatccaaacttcatatataattaattaacttatacctgcaatgactcctactttcctatgctgtgtaaggctgtgatctgcaacaatatcaatggtaccaaaattattattattatcaaatttagagtgaaatataaaaattaattaataattattacttaccgttgcaataagtggtaacatttgctttttcacaaaggcacaagaaatcctgtgaatgaatatcaaatccacaagttccacctcctttattcatatcttggcaacgaagacaattagtagtgactggagtttcaaaatcaaccctaaccccatattcagggacctgatcataaggctgagtttcaccagtgttcctccaatacacgctcgtataactcgtacaatacctcaacatcaacctcaacgattccgtcgctttaggatagtaagaacaacaagaagcaaaatcatcatcactgctaccacctctgaacagcaccgtcgatccacaatccggcatgtgacggcagaggtaggctgagctgtcgcacgaggagtcgcacctctccggattgcgctcgcagaaaacgggcttgggctcgatgatgacgtggctttcgctacagttaaagaagaggtactcgtttagagaggagagtgataaatgggtactcgtgtcgaggctaaagggtcttgttggacggaatttgttgccgtcttggcagttccacatgaatgggtcggtgagtagaatgtggggatcggacccgtagcttatggttcgaaccgggtaccgacccgatggagttcggagctccagatttcctgattgggaacagaccaagaggtgtcggtagtaagggctgccgcaaccgtcgtctattccaaatgggtagcttattgggactttgccgcatgaggttctgcatacgcttgcttcagctggtctgatgctataaacaatgattgttattaagaggagaataatcatagaacgtggtgaggatgatattccgatttgggagagagagattgatgttgatgacattttcagatggtgctattttgattattgaaagaaaatattgagatatgggaatggaagtggtttgatgagtaaagtagaggagagagaatctcttgggcttcactttaataatctttgacgaggcgcctttatcttttgtttttccctttatgtttgttggtgcttatagaagaaggtctactacaagtaaaagctttctcaaagaggtgatgattataaatgattataacgttataacatgtaaacatctccacccatatgatagttgcacgttaatttattaattttgttggtcgtagctacaaaaagaaatagaaaccaacaatttatttttttaataataatttgcaatctaatctagaattagaattagaattacgaactaaataatcagcggtttaattcttagtcttagattgagattgttattgtttgacaaaaaaaattaaaataaaatcggatgaaaaaaaattacagcatcacaattaatcttaagaacaattatattttatttcatccactgctcagaaaatgcaatagtagaaactgttgcaacaagttttgtgttagatgcgcaactgtactactagcaaccacttcagtcgcaaaaatttgttatttctaactactaacattgatttaatggagagtcattgaagaacaaagaaaaaccaacaacgaaataaaaccatgtcacatagacaagactaaaatactcaaaatcatgtcacacagataagactaaaatactcaaaatcacgccatagagacaaggctagaatactcaaaagcatatcgcagagacaaaactaattgttgtagcaaaaacacaacactgatcaagccacacttaagcctagggaagactagcgggcctagccagagaataaaggcaacattcgatagctatagatttaggaacgagaaactttaatttttttttcttttagctagaatagataccaacaagtttattttcgttgctaactattttttttaggaaaacttacaaaaatactataaaatgggagaatttacaaaaatactatgatacaagtttttacatttttactgtaccgactttacaaaaatactgtgtttcagtaaaataaaaaaaataactaattaactgttagagatattattac

SEQ ID NO: 28770 - DNA, 1550 bp, Cannabis sativa
  modified_base (1276)..(1297): a, c, t, g, unknown or other
agtatgagaaggggaggaaacgagtgagattcggttacctttgaagcaatacccattacttttttccaacgattccttactggaggattggtttgcaagcctggaaccatatacaatttgcacccatataacttcttcttccactctttttatattatattatttgtacttttcttattttgttataactatataatataaatattcatataataacttcttgcagctagcagtgtagactttactaatttgctaaaaacattattgttgtatctatctttaatttggtgagtgttacttagttgtgagttgtgatcagggattttatgactttatgattaaagttttattagatttaattaagaatattaattaagtggcgagttaaaattaatttggattagattaattgggggtttcttctgataataatcaagcatttcatgtgcagttgacccaccccaatttcgtatcacaacactataatcacttcttgtgaggacaaccaccccaaaaatcacgcccgactttatcatcaaattattagcttatatatttatgcatatataataatataagtaataatctatctagctatatctaatcattaagggttggtgtaaaacatgacacattttggtatatatataaatataacactacttatgtatacattattagcaaataaagcctaattatagagggaatcatagaagtaaaatttaatttttctaataggtaatacattaatcttacactatatgtatgtgctagctagctagggaggtcttaattaattttatttataacttaattagtaatttatgtttttaatttagtgtatttatttgaatgcgtccaatttggaaacatccatatctcattaatttctacaatattgggagctattaatagtttaatatatccgatgttgaatgaagtaattgactttttgacacattttaaattaaacttaattatacaactctcatgcaacatgcggccggttatactatacatgtccatgattgtgtaatagcaaccacaacaacgatggtacaaccaatacaacaatattggatttagagccattcgaatataaaaatatagatttaataaattttaattgtaatatatattgactaaaacctgtgaacatgttcaaatgtaaagcaaaaatagaccgatcaggtataaaaaatcttaaaaatgaaatataaacactcagttatttactttatatatataaatatatagatttttatatatatatatnnnnnnnnnnnnnnnnnnnnnnagagagagagagagagagtttgttgtgtatgtatactattcgggattctgttcagattacaataaccctatatatatttatgggaaaaataatatttgggtagggataaaggttagccaaagttgaaactacctctctagagatagtagttgtgcggcttagtgggaacttttggtgtacatgaaatagaaagcaagcaacgataaaaatattttatattaaatgatggacggtgaccttataaaaagggtta

SEQ ID NO: 28771 - DNA, 1877 bp, Cannabis sativa
ttagaacatttgtaatagcttaataatatgatatacaaccgagattggatgtgtactaagcttagaaaatttcctatttagagggaaatttgaaataaaggtgtttatagtcgttgaagacacacttctcgaagttaggagtgttatttcaagcacgcaggtcaaacaattcaagttaatacgatttttattttggtaataaaattttagatttcggcttcaatttgttactatcaggttacaagaatactaacttttatttgagtatacttatttttaaccgatataatcatataatgctatttaaaatttgggcttcatgaaaatgttacaatttataactaatttcattgttaacatattcaaccattagacaaaaataagattttggttacttgaggaaaaagtttgagtaactaaatgactaattctatagtgtttataaaatatttaatctaatttaagcaaaaaaaaatgcaattgtgtggattatatgttgattaacaataaaactgattcatcttatatttaaagatttataaatatattcataatattttaaagaaaaacatagtaatttaaaattaatacatatgtacatatatttacaaatttaatatatcaaatatatattaatatgttcatgcaattttttttctaatttgttattttttgtttgtcaattttaatttgttgtgagacaaataaaataataataacttattttattttgttgttagttatgtaaaaataatttaaattttaataaatattaaataatttaatattaaaaaagtaacaaattcagaataattgatccaacctgcactattacggattagattggatttgagctcttgtacggattagataggatccaaaatatgaaattcgcagttagtgcagatcgaatgtattatgaacaaaatagtacaaattgaattaaatgaacactcctaaacgtaaaagaaaggtttcggactttacaaataatactgagaaagtaaaagaaagagataggatttagacaaaaaaaaaaaaaagagagagagaagagatagaggagtgaaagtaggagtggaaattcttggtaataggtcatgttcgtgtcgtgttgaaagttaggtattacaagtaaatgtcaaactcaaacctgatctatttattagtcgtgttgaaaattaaaatacaaactcaatctgtttataaacaagtgacttgatccgacccgtttaacacatttatataaataattatgattaattctagtgttaaatgtattaatatgtttatgataagtttaaaatgtttataatttttctatgacacatgtataaattatttaacacgtgtacgtcttatttaactaaaaaaaaatagttcacatgtaataaatataataaatttaagagtgtatattcttcaatagataattgtcgtgtcatttttaaattaggcgtatcaactcgaaaataagttgtttaataaataggtatgtaggttttgaattatgttatctgattcatgttgtgagtgacaaaataaataaaataaatattgtgtacctgacacacaaatgtgaagaagacaaataaataaaatagcaagaggaaaatgtcaaaaccgaaacacatatatatagttcatatgctgattaatacttattcttttcataatgtgcatgttgatgacataatatttgacatagaatacttcctcctcaacaaaaaagtaacgaatatgccaatataattactaaattatacagctatagcaccaatgcccaatatacactaataaggcgtttggttaggaggaatgaaaatataggaatgggaatgagaataggaataagaataggaatggaatagaataaa

SEQ ID NO: 28772 - DNA, 1558 bp, Cannabis sativa
attcatatttaggatgttaactcaacatacttgttagtaaatctagatcttggtaaaatattccctacaggtcatgggtggtggtcaccaatgttcgacggtggtttcggtggtggagtttagtgagaaccaaaaagaggggaaaagagaacgagctgatgggaaagagataaccgctaagaaaatttgagtatttttttgaaatgaaaaaagtaacttagagtatacaatgaaatatacttatactataaatattaagcaacttaggtttaagttcatatttttaaaatcaaatttcgctttccaaacaaatttgaaagatcatatattttattctggtctctatctccctatgttggtacgtataggggagtggggaccatcatattgatcactcttacaatgttttatgcatatatagttttaaaaagaaaagaaacgtaattaataattaaaattaattgactttgtacttgaatagtgttacaaatacgggttagatatttttgatacaatatgaaattggcataagtttgggtggtacgagtatgatcagatattgaaaaatataagtttgagtacaacacaatataatacaatactacaaattgacacaatacgacgcagaaaatatttattaaagcacgacataacacaccaagtccgataaacacaatatgtaggtacgaatagactaaccccaaaagataataaaacacgataaacttaaaaagcacgacacattaagaagacaatggtaattaaacttaaatataaattctataattaaaaactaaaggtatatattaatttatttgtagagcatgacataaaaatttgaatatttgtaagtaaacaattaaattttaataattatattgattttctaatatgattctctgtaatatttttgaaaatttatataaaaataatttaagctatgaaagatacatataatttagtaattagcttaataattataaataataataataataataaaaaaaaggtgaacataaggaacaagttcggccatggcaagaaaatatcgaacctacaggtcgggttacgcctacctaaagttgtacattcgggtcggactttttgatacgatacaaaatcggcaagagaacatgtgacagaagtacgatacgacacgaaaaaaatataagcttggacccaacatgacacaaattaatatgggcccaggaacgccacaaaaaatatgaacttgagcagggcacgacacgacaagcacgaaaacacgaaagcacgacacgaaaatacgaatttcttatcacgacacgacacgtaagcacgaaataaaacatgaattaaaattcataaaataattttttatttaataattaatctacccatctgtataaaaatactttatttaaatattttaagattatatatattttctaaaaagataaattattttaatatatatatatatataatatatttttttactcttttgtataaaaatactttattcaaatattttgagactatatatattttctagaaagataaattattttaatatata

SEQ ID NO: 28773 - DNA, 1931 bp, Cannabis sativa
ttattaaataaatagatttgacatttaaagatttaaaattaaaatatgatatttatgaaagaaaaagatgaattattatataaatgccaaaattaaaatttagtggggtccacaatagtggccggccacttgagtgattttaagccatttttatctttttttttttttttaattccatataatttaaacttaactctagatgaaaggctataaatagaacatgacaaactcataacctgataactcttcaaaagtttattccgtcaaaaaatagaaaagagaggctcctctctaattttggagttctctccttctctctctaactttcgtccatataatgataatagtaccttacccactcatatcaagtcagtactcaatcatagtgtgaaagattgtgaaaaatttcaacactgtaaggagatccaggttcagatgttgttattactctgagacagaaaggtacaagggttagagatctgaatagaaggggccataatattctgctgccaccaatgtaaagttttctagaacttgatatatgtttaattcattattttaggaaattcatgtttagggtgttagattatagaatataatcaaacatacttgttagtaactctagatcttagtaaaacaacttctaacaaactattagtcaacaaactgagtaagataaacatacaacataaacatatagccaacccgcaactaggtgcccatacacctatcatcaagtcatgtaaaccatgtttaacatataaaactctgtctcggatgatcttggtcgtagtacaaaagaccataataccacatgcactcaataatctagtcatactagtgttggtagcatcaatccatactataagtacaagtagccataataccacatgcactcaatacaccgatgtactattgttggtagtactagatcatacattcgtaaccataactaaccataataccacatgaagtcagtgctctggcgtactagtattggtagcattggttcatactttctaaattgccaaacgcatatattcacgatatcaatatgcaatcatatcaactatcgttctataagatatgtcatacatctagaaaccataaatatgtacatatgtatgtgtattacaatagtcttacctcaattttaatttcaagtgtgtcgatcaacctgagtgaaaataggtgttggtaattgaaggccctaagtcacatttatagaaaaaccaataagtgttgccttaacatttataattaaaaactaaaaaattttctatcgataaatagcatataattaccttaaatatcgagaaaacactcaattgggtcccgagatatgactcaaaatagacaatccattttaaaatggaccctcacatttctgcctaaattggacagtccaaaactccaatgtctgattttaaagtgtgcataactcattcaattttaatccaaaccttaccaaattttgcagggtacctaaaatatcataatgaacatttttcatggaaaaaccttaacctaattcgcaacaaaattcaagttatcacaactaaacctagtttgagttctttgaactcaaacttgcagaatttttgctaaaatcacccaaagcactttaaaccacttgtaaacagtcctaaatatcctaaagaagcttttcctaacctctctaaacttcctcaataggtcctactataagtaacaattagaaaccaaactaagaccttaaaaaaactataaaataagctagggtttaccttgattaccctaggagaatgaaggagttgattcctttgggttattcttcagtgaaatgagcttcaaaaaggtgggttagctcttggttgttgagtgttcgtgagtgagaagaagagaaggatgaaatgatggtgataaagcttttttggctttttttttttttt

SEQ ID NO: 28774 - DNA, 3276 bp, Cannabis sativa
taaaagttttaatttgatacgtttatcgagaaaattctttgattggcaaagatagcactgtaattgaaaaagcactgtattgtgccttagcattagggcgttacaattttgccgccgggtttgtctaccaaagcttgccaagacatgtacaatcttcatcagagaaagctcggctcacggttcagtaagcccgtacttgtttagtatttattatatatatatttatttatttttgatatgttcttgcattattttttgcctaaaatagaaaaggtagttattgttttagtaatacccttatctgaattacttcccaaaaatgtctgaattcctaggacattttcttttctgtagaaagaatgttcatccctagttcaaaattttgggattcagtgattctagagtagaaaaacccaaaactacatgccttacccttcaaaccgcgactagaacatctaaaaaaatattaaaaataaatgacgagagaattaggttgttcaatgagaaacttgacggagaagaaacctcttctcactttaaacgttttatagacgaggtattgattggaagcgtcgccttttgttagacgggcttggccaaagtctcctagcttaacaaagtatcctttggcaagacctttatttttactcgaggttaccattgctttttccccaggtaaacgaaactttgacatcacgtcttcaaaagagcgcaagtccaaactaccccagaaccccactgtaacagcctactagattaggcgtgttgtcgttatttaaatactaattatgcaatccattgctaatcaacgagctcattgaaaatcatgtttagttataaaattttcataattaaactttgaactttatataaataaactttacatatctaggatcccgtctttaaaagttacaactgtattacaaaacatttaacaaaatctcaatacactatttgcttcttcctcactctcaaagcactacaaactcacactcactttttttttacaactcactcttcttctcacacacacactcacacaccttgctcaaacacaaaacacatatttatagagtccctaaacatggacacacaatctaaaacttggtcaccaaggctctttaaagttggccaccaagactcattttctcacaaccaatttttaccaaaaaataaattacaacttaacaaatataaataaataaattaaaagttttagtcgaactacaccaatctctttttttactaaaatttcttaaattcataactcaaaccatttataaaagtatatatgcattgagttcatactctcgttgaacttaacttgagtacttgtcttcacattctttgatctttcactaacaccttctttgttcaaacaacctttaactaaaattagatccttctttaccttgtcgcattccttcacattaactgaatgtcttttgtgacttgactccaccttcacaactcaacataaaatagtattcccaactaatttatacaaatttcattctttcttacccttcacaactaccaagccacctttcttgatagttatttcatcatcttttgccaaatatccataaccacgagtattgaaaactcccaaagagattaagctcttaatgttagaatatgtctcatatgagtcagcattctcacaacaccatcaaacatctttaccttaacaattcctataccaataacttttgagctagaatcattgccaatcaaaatagtacaaccatcatattctttataagaatcaaagcactccctatacgggcacgtgtggaatgaacaaccaaaattcaaaatctaagagtcaaaaaaattttcatcacagagagaacatcagagtaaatttcaaaaccttcaccaataacattagtggaatctaatgtgtctttgcattcttgattcctcattgcttcaagattcttggtcaactctttataattctgcctaacatctccctttgtgtgacaatagtagcactccacttcccttcaagagtgtgaatgactgcgattgtctttgctgtcatcatatatcttcctctcaatgtactcctaccactacttgattctgaccttgtcacaagagcttaatcagtatgagacatacttctttgatgcttgatactatctgtctccaaaagagcagttgacaccttatccacagttgaagtagtttttccaaccaaaagtgtagtttactaatgtctcatataattttggtaaagaagccaacataataatagcttatcttcttcatcatttttgacctccacactaaataattgagttatgcacttgttaaatttatttatatgatccctaacatgatctccttcaaacattttcaactcatataattacttcttcaaatataatttatttgttagggattttgacatataaagtttttctaacattttccataactcggacagacatgtttcattaaatacactatactttatttcaggagccaaacttaagcgaatagtgcttactgcttttacctgcagcttcttccgaacttcatcaatcatactctcacgcttcgttccctagagtgcgttaaggatcccttattgtactaacacatctttcaccatgctctaccataaactaaaattgttcttcctatctaaaagctcgatttcaaattttgtgaaagacttcatctttgatatttttagtgtagatctgaaccttggctcttaacaccacttgttggaaggaaattaattaataaacgaagaaaagaaatttaactcataaagttaccaaacccaccaagagaaatatatttcacttataactcaaaattatacactcactatatcattctctgtacccaaatctcaatacatcctttgcttcttccttactctcacaacactacaaactcacactcactttttttaacaactcactcttcctctcaaacacaaaacacatatttatagagtcctaaaacttggtcaccatgcctctttaaacatggccatgaaaacacattttctcacaactaataattacctaaaaataaattgcaacttaacaaatatggataaataaattaatctaaatcaaaatctaataaatagttcaactaagatcaatgaggatgcttggtttggccaaaatatggttgctagagatcacttgggttagcttagtagtaaagcttgaaactattctaaagatgacagagttaatgctatcagagtgaaggatagaggctcttatttggataaaaaaa

SEQ ID NO: 28775 - DNA, 5210 bp, Cannabis sativa
  modified_base (2487)..(2487): a, c, t, g, unknown or other
ttttatacaataggcccaatactatccaaacttcactttacatatcacacaaaaattcttgggcccattattgctctaatcataagtagaatgaatttgtatgttacaatcttttagtcaactttcacgtttaaaaatacatgtcagaatattttttttaatttttttttcacagaggtgttcattatgcttacaacatcatccctgtaaatttttgaaaaatttcgaataatttacagtgccaaaaatacgtttgaagttgtttgaacgcgcgtggtaaactggaatatcaggaattctattttcggtactgtaaactatttggaatttttaaaaaatttacagggatgatactgtagctataacgaataccgctatgaaaaaaatatttcggcatgtgattttaaacgtagagattgactaagaggttgtaataggagattgtaattagcatttctcatcgtttatttatagtgtttttatataacaattacatactgtgcacgaaaagtaaacaatagagaagaatattgtgcaaggaaattaaactctagtctagtgtgagaccctagggttcgctcgacggaccttgacatcactcgatgcttagcttgtgggatagcagcatgcgagtgaagtgcacctgccagggggcagcagacagcagcaacataggcacgcagcaacattggggggtgttagctgagcttggctacgtgatgggcttagatggacgtgactttgcatgggcaaaactaaaccgtgagtgtgagtgtatgtgcatactaatgggttgttgggttgactgactaaattgggatgaatctaagccatggcagaaaaaatttgagtgtgagaaattaaccttgtgacatctagaccctagtacaagattgaaacctgacatgtataccagtaccaaaaaatgcgcaggttcggtaggcactttcctacacccaaaacccaaacttggggtgcccgcttgaatatgcacacctaatttctagtttaaaagtctttgacctttttataataattttgagttgttaatttgtcattgtaactaattacctatttcataacatttattttttgttataatatgcagacagactcaaaaattatttgtgcttcgtgaatcgtgacatttttttaatgttataacaaatgttattatggcattttttttttgtgataatttttagttatagttgtaaaattatgagaaaaatacaattttataataaataaattcatatgattcttttttttattattataaatttaataatatattttttagaaaaaattgtgttattttatatttattattataaatttaataatatatttatatttatattgataacaatatataataataaaaaaaataatttgcgttataaatatttaagtttaatttttgacagtaataatatttaagttataattctaaaatttctgtaagtacctagatgttaagtgttaagtaagtttccacgtgacgatttttaattggtccaagtcatcaaatttttattttttaaaaaaagtttaaatataccaataagaaaatgacacgtgaataataacttaacatttaacgggtaggtacttatagagtttcaaaaatataagttatgtattattatcaccaaaaattaaatttaggtatttatttgcaaccagtagttaaatttagatatttataccgcaaattactcaagaaaaaaaatattatgtttatgaaaatgttgaagatttaagtaactcggtacatatacattttcattcaagaagttaaatactgaaaaaaaaaaaaaaaaagtttaattgaagaaccaaagttatcataatagactacctcaaatttgaataaaactttcatattgatatgatgtttcattatttcaattggattgaaagcatattaatcgtcgagcacatgcaatgcaatgcacattatgattctctatttcgatcgaaagtctataatcacatctcgagtcaaaacattgcatcatgaccttctgttatctaaagtttttagttgatatatttggttaagataaaaaaattaattatgtgtggtgtttttaaaataaggttgagatcttattttagtgtgaaaagatttttcaaaattaaattgtattatatttgtcaaataaataggtaatttcattatttagaatatcttatcttgattttatatgtttaagaaaattaagtattaatatatattttattttgagttttttgaagtaaaatttttctatcggtcgtttcacttgtatttacatttttaagtttaaattttagcggtaaaaccttctaaattactgaactagtagcaaatttaaggtgtcattcggttaactgtcactataggttgcttatatatacactcttgcacacatgacacatttatattagtacacctaatattattatttaaaaattatttttaaaattaaataaaattanaaaaataaaaataaaatattttaaaaaaattaaaaatattataaattttgaaataatttaatattttttaaaataataatattaggtgtaccactaaaaatttgacacatgtacaaaagtatacataaacagtctatattagtaattaactgtcaaaatatatgacaccttaaatttgcaagcaattcaatagtttgaagggagaaggttaagtgcaagtgaagtgaaggttaaccgcaaaaaaaatcttattttaactttctttaccaaggaacaatgtttgaacggatcgacaatctgtttaaatagattttgagttttcttttgaaaatatttttcatttattacatgcatgtttccttccttataaagcgcgatatgtggtgtattaattgaaaaaatattcttactcaagttgtcgttttatatggaaagaataaaattatttattatgtgataaaacactatatctatatgtggtatttcgttgtaattaattttatttattttctaatatgatgtacattaatctctctaggtaggattcatgatgaccaaggagtatttgtggggatgaacttgactttgatggagtgtagatttatgatgctgactagacaaataaggattttatctggacactttccatatatgttcaaaaaaaaattcgtcatttatagtttttcttatattagtgatgtctaaggaaaattcatgctgatgaacttggattttatagagtctagattcacaatgctaactagacagattgggaatttgtttgcacacttttcatagttgttcagatagaatatatttatttaatgagtttttgtattgaaacttttttaatgagttctctttgtattcagacctttagagctcagttacgagtgtcatttatccttataaatatcccctaaactattagcaaaaggttaaactctttcacttcttaaattcttatatttttagaaagtctttcttttgcaaatgatagttattctgctattccttggcaagtttgtgtgcctttgtgctaacttttatttaaagtttccaaagtaaagaacataaagaacaacctacgagagaaagttaatccaaatcttacataaggagaaagcaagcactgctatattggattgaagaagatttctacaagtcttgcatcgagaggaagcaagcattgctatctttggaagaaaatttctacaatacttgtatcaagaggaagcaagcactgctatctttggaagaagatttgtacgaatcttgcattgggagaaatcaagcattcattaagtaatttgaagggaattgaaaccttagtgccttaagaagattcattcagcaaagaggagtacatcaagctcgcaggaaaattattagatggagtatatgttttgtttaattcaattactttgtactagttaaaatttgactaatgaatcttatctctatggtctcgtggactagtagcaatctacaaatattgctgatattcacgtataaaatatcgtgcgccattttaatttcttcaattttactttttgtacttttattttgttctatgaggttcaacttttgagcaaattttgattttatttagaaaaatttacaacagatccgcatacaatagatccgcattaattaaattgtttgttattaaaacgtctttctttgcaaaaaatgaaggtggtgatgaaatggaaattcttgcaatgaagtttcaaaaatatatgaagaagattgggaataaaaaatttaatgttaagccttctaaacataattcttcttctctaaaaccttttcaaactaataaaagattattcaatacagagaatgtgagagttttggttacattcaatctgaatgcgtaaataccattaaaaagaacaagaaaagtatgattgctacttggagtgataattactctgaaagtagtgaagatgaagaaggtcaaagaagtcatgtgtacttgttgctttaagcactcaaaattcaaagaaaattacctttgtctatgctagaatgctttcatctcatgttcatgtgttatcttctctaaaatatgttgcatcaagtgctctagttgtttcaatagatatgttacaaccatcaggtaaatctaaaggtaagtgttatacccatattttgagcagtaatatggtgttgacatgtgaatatgaaccagcccaaattatgcaataataaatgcattcagacaactcgtctcgagaaatacaattggtagaaatatttaaactcaccctcttaaagataatggcagggcatgaataataactaccgatttatgagaccagcgagacgaacaaagaaagtcaatctcgagatgcacacaatacacaacaaaattatttgaaaatgatagataatgaattatctaaagagcttgtagctcattgacccatatacacgagagtatgttgaaagactaaatacaacaccttcggaacaattcacctcgcaattttcatgttgtgacaaacatcttgcatatgcctaactcaatattaatagagaaatgcaaggtgtactacatcacattttagatgctggtttaatataaagtgtcataaagaattgttacgctgtgaggcagttgaagcacagtcaacatcgctgcctacagataaaattaaagtgtagttatgggaagttatttgtaattatctcatgtgtgtaaatatgaaacgtga

SEQ ID NO: 28776 - DNA, 2134 bp, Cannabis sativa
actattgaccgagaacaaatttacgggagctaactttgtcaaatagaaagagaaaattaatacttctcataggtgaaaactctttatttgtgttaactgaagaagttccttagcactgaagaagtttgggcgttcacaggatactttatgattgcaggtaattttccttaaaaaatccacaatcgtttgcatttgatgtgcaaatgatatgtttgcatttgatgcgcaaatgaatttttaattgaagattaagtgttaggttgatatgagaggatgttctaaagttttaataaagatttttttttttcggaaaaagaatttcaagaactgctcaaacaaacgactttaaccaaattggaaaatcagaaaatccaaacaaaatattaacttgaaaacgtatcaagctcaaaaaaaaacaatagcgaagaaaagatcgataaaattaaaaaaacaaaataagaaagaaaataatatatccaaatgcatcctaagaaaagagtagattaatcgtttgggtttctttcaaagattcattttactcccagaatctccgatgtcagcaatgtttaaatttattcaaaattcctcaccgcagatagattaaaacacataattttaatgaaaaagtacaaaacttttgtaagggaatgaggttaggaacagaccaagaacaatgcattctaaaatataaattttctacaagaatagtagaagtaaacaaaattgatcaggagtgattaagaggtttgggtcaagttaaaaccacaagtatctactcatcgtaatctcatcaaaagacctatttatgccaaaaagaaacagcaaataaagcgaaaaaccaaggaaagctcacaattcccaacgaaaacctatcaaacaaaactatataacaattacggtaaaatagaacagataagcggaacagtggttactaatcatttctaacaaaataatttatcaaaacatgaacataactttcagattaacaaaaatataagtcaaatccataacttgaaatataaaataaaatgtaaaacaaacaacaatatgaccaaaatcttgttaaaggactccgctggagtaaacacatcaactacataaatggttccatgtctttcttctccaaatgaactaaaaactaaaataggcttaaaattgaaaggccatccaccttagaatccgagcttggtacggcgccagtgcctgcgcttggcattgtacctaatggtgttgtcggtcctcaaccggatccagtgaggaatcggcctgttctggcgcatcttcttcgccagcttcttcttgatcatgaaactcttgtgcgacggcatcttcgctgagatcggcggctgtctggctggcttgcgaggcagcagaagaaaccctagacaatcaaaaatacacaaattaaagagcgaactaaacgaatcatcagagacttaagcactaagaatcatggaataaatccatcatattattgcagttgaatgcaaatctcgaaatgaagaaggaaataaaagagagacgaacctggaggatgatacaagctagcctctcaaagttggcgaagcgccgttttatagttctagatgttgctctagagacgaaaccctaaggatcagaatgggcctcaaaaaagcccacaaatgacatgaccctctctataagcgtggccctgatcttgtagtttcagaacccaaatacccaaccaaatccattgtaaactgaggaatttaacataaagtggtggtaaaaggatgcatgataaagtggtgggtcaaaggctagtttgggcctggtgtctgttgggccgtacaaagttgagggccgagggagaggctcttttatttggggaaaattgaaaaatactttttttatttatcaattaaccaaatctacctctaatttatatttaattgaaacatacctctttttatatgtactgtactcaaaataccctgacataagagagtcacatggagagtatattaaagggacaggggcaaaattagtaaagtgtttaaaaaaaaaagtaaaaatgataagactttaaaaaagagggtaaaaataaaagatgacaatataaaaatagtatagagtctaatttcctccatttatttgttcatctgttggccac

SEQ ID NO: 28777 - DNA, 1184 bp, Cannabis sativa
ttatctgatccacgtgtcccttttcgactggtccacgcattttgggcgaattcaggggcaacactcttaatctcaaaaacatgccttacctgtttcaaattaatctccaatcctccatctaagaccaatttcattgtaccaattccaaaaatggcacaggctctattgtcaccaagcttcacagagcatgccttgatttcttgatagtcatggaattgacttctttctgggcatacatgaaaagaacaactggagtctaggatccatcctagatcagattgtccttttgaaacaccaaggaccctagcactctcaccatcactatctacacaatcagacacaatgtctgcattgccatttttattttggtatgttcttgaaaattagatagtctctcctcagatgggtagtttggttacatatgtaacatctcctcttggcctttgaatttgtcttttccttattcgagtcttgcttctcattgttttccttcttgaaggcttttcctcgaaccaccaatccttcacctgagatgtcatctttaagctttgatctcttcttgatctccttagacatatgtgtttttttttttacacttcttttaatgtcaagaaatccttgccatacatcatggtgtccacaaaatgttcataactttcagtgggcaaagagtttagagcaatgattgcttggtcctcatcttcaatcttgatctttatgttctctagatcaagaatgatcttgttgaaatcatccaaatgatcttcaacatttttcctaactgtcattttaaaagaataaagtttctatttcaagaataatctattgaccaaggattttaccatgtaaagatgttccagcttgagccaaagtttagctactgttgtttcttttgatacttctcgaagcactcactactacaaattgggctatttccaacggttaataagggggtcaattatgaaaactgttggcaaaggtaaatggttgcttttcccatcagtttagcaccgttagaaaaaaaccgttgggatagttattagtgacggtggataaccgtgagaaatactagatgatttttttcaaaaaaaaaaaggttaatcccaacggtttatgtagggagaggaacttgtgctacttgcatggtgaaggtacatacaaattattaaatgcagattttgcca

SEQ ID NO: 28778 - DNA, 3090 bp, Cannabis sativa
aacatatttgaggcaacagaatcataattggagcacttttaattttgagtacccaaagcaccaggtgcctaaattgacatattttcaaccaagggcactttcaaccacaataatgaagaactgtcccaataattttcttcgtcttcatccaaaacgagaaaacaagtgcttttattggaaaaacagattgacctagaggccaaaatggggacccaccacccagggttgacaaagtgtcaacttgggccacttccatcagcattttaggagatttcttagggccatattctctattttcatcaacaattaagatttgagtgcttttgggaaacacaatcatctcggggtcagaaatggaacccggtgcttgggttgacaactaacttggtgcgatgggttctacttatcagaatttgattctatttcgagcattcaactattttttcgtactaaatgagggatacaatttgtaataggtcaaatttacactttgatatttcaccctttatgcaaggtgcaatatcggcaaaataggggagttttaagtcttcccgatttcacaaaacagcaatatctctgagaactgttgaacaacttcaccaaaacatttaatctgactaagtcgtttcaacacatcacttaggcatcaaaaaatataagtataggatgtttcggaactcacccaacatccatgtagacgtcagaatgtcaacttgggcattgggttgttaacctagttgtagggtgttgaacaactttcagtaaaatagtcataactcactcaatatttatctgattgacgtgatttaacttgcattttgaagctatttcaaggatctatcagctcatgtctgtcacgcacatcgcacttcataatatttcgtgtccaatattcgtcctcaacaaagttgtgatttttttttcagcatgtgaccccaaaacaatccgacgaatgagatttaaaatttgaaaattgacgattatcaacaagattcaattttaccattggatcatcatgaatcatcctcaatggttgtaagaagtagtgttgaggttgagttcaggactatgatcaacagtgtgtgtgagatccttatgagtttttggggagctaaaattgcaaattggtccacctataaagttgttttgtgaaaataagattgtgataagtattgctcatagctctatacaacacgacataactaaacataggttgaccaacagttcgttcaaaaaaaatttgggggtgagagtaatttgtatcttgtttgccaaattggaggatcaaactgtagatattttgtttaaaggtttatttgaactaatagttgaatttctatttctggtacacaagtttgggcatatttgatattcttacactgacttgaggagagtgtgaattaatgtgtaaaaatatattatactcagactcaatcataagttgttatcctatatctagagttaggtgttagtttgattgatcttatttttaaggcttttatatttatgaggtgttaactattgtatactatgagccattttcactaatcaatgaataataggaaattttattatgttaaattacagttaggagtgtaacatttttcctcttaaaatatgttatgctattaaacaaaattgaaatattaaaatgtaatcacattttttagaagaaaaaacaaattagatagtgatcaataatctaacgtattgaattaagagttgtttagtaaggtgtaacaagttttacccattcctcctcctctcttcacataagacgtcacaatattttgatagacaagtataatagattagtattgatgattcataaatacaaataaatatgtagtgtcttcgtgtgcgtatataagtacatatacatacatggaccactctttcgtatgttgaccaagtttttgttgtgtaccttgaaatttttgttgaccatgttttaatctacaaattattcacttatttggataagcttgaaagcttccaataatttcattaaatagctaggtataaaaaaaggattttaacattttattttttaaaagtcatgcatattatattcatagtcacctgaacactgcacgcaattaatttagtccctatatatattattataatatatttgtatactgacatttagttgaaagtaattttaactaagtatttttattaaaaataagtcttattaaaagtaatttatcacataaatgtgtattataattgtatcattcactagctagatggattccctagtgtacaaccatagtcatttaacttaggatcaattctctattttcttttagaaatttttacataaaaacaaaaatttgaaaaaagaatatcataaaaatacattaacacggaaaaattatcatttttactattttaattttttttatttacaattcattcatagttttcatgaagttagtttagtcgttgtttttggttattttataatttatttatagttcatttatagttattgtgagattgattattcattattctttagttattttcttacctaaaaaaaattatatttttgtaattttaaaacttttgtaattttgaaactttaaaattgtattttataaataaattctttaggccgtaaaattataaataaaatattacaaaaaattgaaaaaaactctttcttttagcttcaaaatagataagcttatttgtactgtggtccctaaattatataagttggtctccaaacctttttttattagcaaattggtcaccaaaatatataaattttgataagttatatccttttttttttttttcaaattagtccccaaacttttattttcttagcaacattaagaccctcaataatggtatttttgttaatttttacttatttattttttatatattttttgtgtgttaaatttaactaatttgttttttcaaattttaataattttgtaaaataaaatgtatatattttttgaaatggctaacatatattaatgtatttattttagttttttatttttatttttgaagaattcatatatataataaaatatttaaaatatgcttacttatatgtgtcaagtc

SEQ ID NO: 28779 - DNA, 2330 bp, Cannabis sativa
  modified_base (61)..(63): a, c, t, g, unknown or other
aatacatatacatttttttctcgattttttttcagggggggcgattgccccccctcgctannntgtgggtccgcccctgtatatatggttatggttatggtccaatatttgaaatagaaaagagctgtacgtacagaaagaagaattaatggaccacttaatgttatatatagaaaagtggtgtattgaaagtgtcgataagttcaaagaaatattggctttgctttgtttgaaatgttcaaatgaaaatcttgacaggtgtccatatataaataatatctataaaaatagactaccatatatatatgcatgtaatggactatataaatagtagtactatattatataagaatataatagcacttatatatattatactgaattcataagcgcattcattcgtccactcattcaaaaaagcatatatatatatatatatatatatataatctcattactatacatataaaaggaactctataaatattatatgcatataattattcaaaataaattctccctcttgaatttatacacaatatataagctataatctcatgttaaaattttaataattaaaaaaaaatttactataattagtatgattttattaaaaacaaaaaaacgtacatgatgactcatatttagtgaaggaactcttgttataaatatatatctatatatatatacacttgctgatatataacgaatattagtttaggaagcatattttatttttgttatgtgaatatatgtctaatatatatatacgtatattacatcaactatatttatatcacgaaatatttgtcacaattaatgaccatgcataaagttcataattaagggagtggcagcatatatatatatatatttatgatgatgacaatacattacatatataaatatgtaattatatatatacacgtacgtacgtaattaatttgattaattagcaataataaaggaaagtacatatgtatattaataaatatatatatcatggatggatcgtatcttgatgaaaataacatgcactatactaatattgattttcccacctgtacgtgatggtgattactcataattaatatccatattattattatttcttatcttatatatattatgtgttcttcatgatatgatatatatttaatagtcttttcaattcaagctaagcaaactcatcatatatccgatccgaccatactaataaatacgataatcacttaacattagctacaagttaagagcacgtgacatgcacgtggactgaaaacaccacaaaatcactaatatttaacatatatgcatgcatggggtctactacgtacacaactcaatatatactcatcatcaccgtcacgtgcacttagggtaaatatatatatttttttttaataaagtgtaaatattatttaaattaatttattttctcaaataataaattagatatgtattttttaaatagtactatataaaaaacaaaaaaaaaacttaataataccgacaaaattaattatattttttttatgtctatgcgtattaaaaattatatttaagttgactatattaaaaaaaaaaattgtcaaaaaataaactcaaaattttattcttatttgtactgttttaaaaaaatattcgttctgtaatttaacaaaacaaaaagttcaataaataaattttataaaacatacatcgcctaaaatagtattaactttatatacaaatatatataagtaaaaacatttcaaaaaagcatattcttatatatatatatatagtttgtgtttgtccaataatattatatattctttcaaagttaagacggagatagatctgcatctagagctaaccaagagcccaagaattttatattttatttctttcaatattgaattaatgattttttatagtttgtgggcttttaataatgcacttttttcaaataataataataataaatataagaagaagaaaaaaagaagggttcatatcaaaccaaacacttgcttgtattttggaactagtggagatccatctaattaaactaaaagtttaagatggttgtgttttatttaattggttggttggttttatttttgtagagatttataattaattaattaataatattaagcctattatacatatatattcgatatatatatgtataacacagtgagcttagtgtgtagtcttgtcgttatgccactacctacagatatttttatgctatgccttatcgtttattgctattccaaagatttggtggaattttagggcttccaattatgataattaatatcttcagtaaaaaataaata

SEQ ID NO: 28780 - DNA, 1735 bp, Cannabis sativa
gtcttgaactaatcaccttaatttggaaaatatccctatttaagttgatccaaaattaattttcaacttaaaaatattttaaagaatatttaaataactaatattctagaagattctacttaattattaattttaaaatattcaaatttaagttaatccaaaattagtttgaaaaactaatttttaacttaaatatattttttttgaaaattcaaaaattaagtttccagaagaatctaatttgttattttttatgaataaggttcttatactgctcaaaaaacatcttacaacttacatttgattacatccaatcttccttttttttttcaactagataggcatttacacaattacaattttagcaaagaattagatattcacaatccaatttttatctacatctttagttttcctaggcataacttctataatccggagcttgctttcccattgtatgtgtttcaccattgccttgacaagtctcaccttttgattccataagacatcatttctagcctcccaaatatgatatacaagtctagccaactctactttcagcatactccttcgagttgctgaaatagccttggtactttttatgtttgtcagcaagcagtgtaaggattctactttggttctctattgcagccatgtcttgacttcttgcaagcatttcctactatagtcacaggcaaaaaataagtgcctagtcgattctttttccttcccgcataagagacaagtttcatcaacattaatatcaaatttggcaagcttttcctttgtgtttaacctgccttacatgactaactaaagtataaatttgtgttttggaatgataagtctatcccacacatctttgtaccaaggaactttctcattgttagagaataaaagatggtacccttgctgcattttatacttttgcagcaaaaaaccagcaagatcaatcttttccttcaatcggttcttaactccaacaattttcttctaataccaactacaatcattaggagcatcatactcccaccattgctgcgctttcaagtatacagactgtatccatttcacaaatagacaatctttcttacatgcaatatcccaaacatacttgctaagtgctgcaatgttctactgctggatgttactgaagcctaatcctcccgagctctttgagttgcgtgtgctatcccatgaaattaaactgagccctgcatctccatgtattcctttccataagaaggatctacaaatagcttcaatatatttgagtagtttctttggcaaaatcattatttgagagcaataagtatgaatggaaatcaagacagcattgatcaatgttactcttcccatgtaagagatgttccttccttgaactccatgaacgaacgaattctgctcaccattttctcaagaagctccttgcattcagtcttgctgatcttctttgaacatatagggattcccaaatacctgaaggggagagtgcttctcttaaaattagatgcatcaagaattctgttaacttcaacatctgccatgcccgagcaatatatagcagttttttgctcattaggaaggaggcctttgagcattaacatgatggaaacagagtctccattgcttaagattaagagatattctgcaaatcagagatgatttaatttcagacttgagcatctgtcgtggaacttgaatcctggcgattctccaatcttcttaagtattc

SEQ ID NO: 28781 - DNA, 1869 bp, Cannabis sativa
cctgccaaagcagacttagcctcaatgatcatgaatgcagtcacttctgcctctctctatctgatgtggaaaaataggaatgaccgtctttctaatgttgtttgtaatttagcttcttcttttagtaaggagataaaatgtattgttaaggctagagtctttggttttcactgtactagtcaaaagaaaaaagatcgctatgtattaagtgtagtcaatagttggagctgctcttgttcttttcgtggcggttggtttttgcctcctgcctttgtattgtatttggtttgttttgaataaagtttccttttgttaaaaaaaaaaagaggaaaatacaaattaaaacaagttataaattataatttatttttaatcagatgaaggagtgtctgattagttttgaattctaaatttttttacattttatatatacatatataaaattagatgttaacaaatgacagaacaaacaaactaaaaaattaaaatggatcttggaggaataggctttcgggaagggaaaaagtggaacaaggctcttttggcaaagcatctttgggctcttgctaagaaagaggattgttaatgggtcaaatggatcaactcaatttatttgaaagattgaaacattcgggattgcccaaagaaggatgatgtaagttggtacttcaagaaaattttgagcttaagggactgcatggatgaagcgaaacttagacaagctgttaaaggtgataaaatcagtgctaaaagatgctataacctgattgtggaagagattttggctgactatgcaggagccatatgggataaacttgttgttcctaaacataggtttatttactagcagattttaaactcccatttgctcacgagggattatttacatcggattatggcaattcctagcaatgtttgccctgtgtgtgaagctgaaatggaaacacgtgatcatttatttttcacttgcatttattctgctcagggttttgaggctgtcaacaggtggctagggggcatccaatggcctcggtcgattgttgagtttattcacggttgctgcaacatgaagcaggatctgtctaagcgcatagttaatgcagtcttggctgctgtgttatattctctttggaagaataggaacaaatgcatctttgatctttgctacgttgctcctagttgcttgagtttggaaataaggaaagttgttcagatgagaattgttagcaagggtccttttgaagattgtaaaagaaataattatttacttaatgtaatcaacaattggtaggggtgcttggcttgtggttgttgttctttttagcagttgcatctgctggtttcttgtttgtatttgtttgtcttttgaataaagcttcttcctttttttttaaaaaaaaaaatactaggtaaaatctcttatctttgctctcctaaatggtcctatttatagattcaaaataactcacaaaatttgtattttcgtgtactactttagtgggtttagtggctcaaaaagctgaggaaagtgaaacacttcttgtatatttatgccagtttggttggagagaaagcaccagctgagacacttggcagccggagagaggctcatgtcaaatggaggggactgcttatgtaaaacggagtggagaagtggtagacattcaggcatcaaccgctgaagaaaggagagaaataggtagctatgtggcagctgacaatcacttgcggagtggatgtttgatttgttgaatatcatttcatttatctcttgctcttgaaatttaaatttactttagcttcagttattgacgtggcccaatatagatggtttcctattggaggaaattatattgtatacttacttta

SEQ ID NO: 28782 - DNA, 3802 bp, Cannabis sativa
tagagagctctaatggctcgaaaatatgagtggtcacaaaagttgggagacaaaattatttttgtaccatgaacattagcgggtcagggctagcaaaaaagtggtagtgggtgtcattttgtacctcgagtgagacaaaatggggtgtctccactacttgtacctttgtacctgtcgtatgtttgctcatttctcaaaggcgtgcttattctgggaacttgtcctttatcatgtattcttttgatatctctcccataatatctaaggctcacaaggctcacaaggtgaaaacaacactaaaatatttagttaaatattggcaccttgtggagtgggtcttgttgtgtagacttagtaggaattccctcttaaacccctcttggtggtcactccctcacaacatatatattctaagtattgctccattgtgtggaacaagtagcataagatggggactatgtgtgggagattaagggagcaagagagtgaaagagagcggggagaggaggagagaaggagagtggggagaggaaaagagaaaaggagagtggggagagggagagaaaaagagagcatggagaggaggagagaaaacgagagaggaggatggaggagagaaaaggagagtagagagatggagagaaaaagagagcggggagaggaggagagaaaaggagagaggaggatggaggtgcttcgtgtgcgtggaaggcaagctgtgtggagctcaactcgcagttgatgccacctcgtgctggggtgcctcctcctttagggtaatcctctcttttttgtctctttttacacactttttcttagcacattttgggatctttcatccatttaatattttgaccccataatttacatttagtaatttttgaggggtacacttgccccctagtctataagaattctttcaagtattcttgtaaactaagtttggtgtgctttgtctccatcgcttggtcccatggttgttgttgtgggcatttatgtctcgatttctttttaagacactgagtgttggctttataaactatcttgacccattttgtggtgggtacttatcacactaaaggagtgttacctctttgagctttctcaatgtcttctataagttgtcattattttattaagggagccttctgtcacttgggctttctcaacctcttcacttatgtaacatttccattaagggagtattgactcttagagtagtctccacctcttcttagtagctcattggatataagggagcttttgatcccttaggtgacactcaatcttttttttgatatatgattttatagggggagctttggccccttaggtagcattcaacccctttcatggtataatatttgattgggggagcttttggactcttaggccttgctcaaccccttctaccacattcatggtgcttagagcgtgtttttgaatattaaaaaaattgtactccttagaaaggcatccctctcatagtcgtacttttttttttttcatttttcccttatgtggccattcaacatcgctaggtattgattggtaaacaagttgaatgaacgcgtacagaatgatgaatgccacatgtaaattgaaattttaacatttcattgatatgacaaatacataagtgcctgggtacattttctatttttggaggccaacttaggtgccctttttaatttagtacaatgtattaaagaaagactcgccattatcaggagtgctttcctcaatcgattgttggaaatagaaaaactttactttaaagaatctcttggatgtttaatgtttatgggttgtgggatggaggtttcacttgaatgtataagcttataagtgttaggggtaagcagaccttgtaagggtctaacaagcttctcaaagaacactcacttgtatcggttctcaagactctattatcctcctccacacggatgtacttctctattctttcgtagaagtcatctaggccatctaattttcttttcagcatgttccctgatagtccacttctagggcatactacaccgactacgactatcttgagttcatctttagacacttttcctactttggtaactttgatgataaagcactggatgtagcttcacaaaatttcttgttctccttgcttcacattggtgatatttgtgataggcatgatgtaataattgcaacatgatgttgttggaggaactctttcaataattgcttcgaggatgtgattgttcctgatcctaaccttttgaaccacttacatgcaactccgtttcagtgtaattgtgaagcattggcaccatgccttgcttgatacttttttcatcttcattagctcattaaaagcagtgagatggtactacaaatcagttgtatcttcatatggtgtgtcataaacaactccttgaaattgggtggaagtagttcaacttgaatctcccttgataaaggggattcttcatcaaactcatcatcatccaagtctcccttcgaggcggtagctatcttttgacgtagatcttgcatctacgcttccatctgcttcacccttttgcgcaagtcagcgagtggaaattgggtcctatttgtagttttcattaggccggcatgtaagaggtactcctcttgtcccatcaacatgtggtttcccaccaagtttgaaggataaggccttacgtttactttgcttttgagagggggccataggcaaggtgccccctagcacgagaccctttgagtgaagtctcttcataaggttatgggatgtttccctgtctcgcgatggaccccttccaccctgacctttgggggtgctatcaactgatgatgtggagtccactcggccaacatatgtggttgggacccctactcctgtcagtggcttttgtactaaaaatgtgaggcttgggttttgcctttcagtatgctactcaacacctttttcatgccaaccactgtagtttttagcctttggttcttccagtagaggtcgtttctatccttttcatagtgatgagtttaggaccttgagctcaccaaatacacttgtttctcctttacaggtccacatcttgaagtgttggggtcttgtgacacaaatggtgaagggttcgcaccagagatggcattctcagtgcttgaatgcttccattgacaagattagccatcgttgatgtcatcaagtcatgttgtgttgggggctctttttgagcattgacttggtggttcatactttggttattctccctttggtcttctttagcgacgggaggtggaggttctcttatgatgatgaccacctagttttcatttgggtgaattccattgtcttggagatattgcgaatgactacgcatagcggttggttaatactaatggaaagacgtagctatggacttgccttttccacagacgacgccaaactattgacggtaagagcccgtcaactaaactttagttagaaaattaaatgcaaaaagataaagataaaaagcttaagagaaactaagaacattaatggagtaaaataatattgtattgaatctctaagctcccttacaaataatatattccaaccccttctttaatggaaggtaagtgtatttatagggagctctaatggcttcaaaatacaagtgatcccgaaagttgagagataaaatttcttttgtacccaaaagattagcgtgtcagtggggtagtggagaagtggtggtcgggtgtcagtttgtaatagggagctctaatggcttcaaaatacaagtgattccaaaaattgggagataaaatttct

SEQ ID NO: 28783 - DNA, 2213 bp, Cannabis sativa
tatggatgaaagccgagggaatagctgtcttatcattatggataaatccggggtaaaagatgtgtttgcggaggcgagtggagttaatgtcccggaggaatctgataattgtgatgatagtggagaacaggcaaagaaggcccggttgttcttggactctttgtgatcggttgagagctctctcgaagctattcaggaaggggatgaggaaaggggtttgattcatggtaggatgaaagcccatgacttaatgccggctcttgtggatatagagaatgattcgttggcttctgatgctagagtatcacccgatgtggggaaagggactgttattcctgagtctgtgaggcaggattttcttatggccgaggaggcgggccgaaacatgccccccaaagcctcatgaagcttctttcgtggaattgccgaggacttgggagtccttcggcaaagaaagctcttagagctttggttactcaggaagatccagatgttttatttttgatggaaactaaacttagtagtcctcggatgaatgggatatggagaagcttgggatttggaggtgcttcggttgtggcggctatagggtccgcgggggggacttgtctttgctggaaagctggtgtggaattacaggttttgtctgagagtgtgggagttactaaagttgtcttttctaatattctgaatggtccggattggtacagtttctttgtgtatggtccgcctactagagctgccaggaaggatttctgggaagaaagaactatggatgttctggctttaaaccatccttggctcttgatgggtgatcttaataccatcacgggtcaacaggacaagttcggaggccgcgaggtggaggagagtgatggtagtgatctcaatgatctcctagatgccacggggggtgtggatttgggctgcgtggggaacctttttacttggactaatgggaggaactttcaagatctcattaaggagaggcttgatcgtgctttgtgtgacccggagtggatggtgtcttacccgaaggctggggtgcgcgctttggccattaaggattcggatcatgcccctctggttttggacctccttttggatcgtgagagatttcataccccgttcaggtaccttgatgcctggagcagggatgaggggtgtaaagcggttattcaacaggcttgggccattgatgttaggggggtcaggagtttccaactaattgcccgtttggacaatactcgacggtgcttggcaaaatggaataaaacgcatttcgggatgtgtaaagagaaacttaagaccctcaataatctcttgttggaagtgcaacggcgaacgccttcggagtccaatttaaagttggaggcggatattcttcttgaaattgatgaggtcgaatcgcgctatgcggaaatttggaagcaaaagtctagagaactctggtaccgcaatggggatagaaactcaaaattttttcatgctgccacggtgatcaaacgtaagaggaattttattaatgcggtctgcttgaatgggtctgattggattgaaggccgtcagctggttggtgagtattttcggtcgaattttgtgtcgattttgtcgtcgaccttcccacctgaccctttgcttgatgacttggtttcgaactcgatctcggaggaggccaatcagtcccttgtccgagttccctctgcggaggagatcaaaaaagtggtgtggtctatgccttccctcaaagccccggggccggacggtatgcctggaaaattttttaaagaccactgggagatagtgggtagttacgtggtagctatggtgatccaattctttgagaccggggagtttgtaaaggagattaatcagacttttattgtgttgattcctacgaagatcggggccaaatgttttgatgagttccgccccataagcctctgcaactttacctataagattatttctaagatcttggcgaacagacttcggcccctcctgcaggagctaattttgccttaccagtcggcctttgttccggggagatggatcgctgagagtagtataatggctcatgaagttctggattctttcaacaagttaaaggggagagctgggtttgttggtctcaagctggatatgtcaaagcttatgaccgaattgagtggagtttcctaagaagaactatggaggcttttggatttgagtcc

SEQ ID NO: 28784 - DNA, 2603 bp, Cannabis sativa
tctatctcataaatttccattaacatatataaattaataatgtgtgtaatcaagtgtacttaaagacattagttccttatttagtaaataataagcatttctctatttctacgtattagagtttttgcatgaatcaaaataaggatttttttttttaattattgtcttctgtgtcatttcttgttctaatatggctggacttttgggtagcgctctaaattatgggctgtacctttttgacataaaaaaatgggattattttacaaatatacaaaaataataaaatgattacaaaaataaggttttagagaattttaagtattttttactatttttaatattttacttacagaaaatattgtatttttatgttgtattattattaattttttgttatttatatgttattttttattgttattttcattttaatagttttcttattattttagtgtaaaacaccttaaaaatattatttattgtatttttcggcaactaaatatttttagagcttaataataagccagagatttttttaggtgtttaaggcattaactcagcttaaaattgcaggtttttatgactgcttatgttttcatccaaactgtcccgggaaacgatctatggataccgacggtcctaatgttcgtcggcggaatcatcaagtacgccgagcgaactcgcgctctctacaaggcgagcttaaacagtttccgtgaatctttactcaaaacaccagatcctggtccgaactacgctaagctgatggaggagtactcgtcaaagaaagaagctagactaccaacggtgatccagttgatcgcagagcccgatacagagtcgagagcctttagcaaagacgtggcacaaggtgacctgaaagagattgagatcgttacctgcgcccattactacttcaacatcttcaaaggtctaattgtggactccatcttcagcttcaaagagcgcgacgagagccgtgagtttttcatgattaggacggctgtggatgcttacagagtcatcgaggttgagctcaacttcatgtacgaagtgctcttcacaaaaatcgaagtggttcataacttggtcggctacatattccgtttcttagcttttggctctacctttgtcactcttggactcttttacgtttttgataaagacgatttcaagccctttgatgtcaaaactacttacagtttgcttcttggggcgatttttctggatgttgtagctctttttaatctcatcttttcggattggactgtggttggaatggagaagtacccgagaataagaaggtcgtcggtttcgagaatgtttgaatgtttcctcaaattgcagaggccatattggcatgattattgggaaagcaattttgttaaaagggggctaagaacggcactatttcggcggtggaccgaggcgataaccggctacaatttcataacttataatctaagagaacgtccggacgaacaaggcaatgatcaacctaaccaaaattgtatcaaatggtcggtaaacaagatcaactttgcctacggtgaagttttcaaatatcttaataaaatttctgagttcgtcactgataatttgggtttgacaactcttgtggacgatttgaagtacgccattagatacaaaatgaatggggaattatggaatttcatatttaaggagttacaagagaaagcagaggatgctgaagatcccgaaatcgcgaaaagaatctgcgaagcaaaaggctcttatgttcttctagaaggtactaaatacaagaacaaggaagaaaaggaaaagataaagaagttacttccttacatagatgaggtcacttatgatgagagccttctgttatggcacattgctaccgaactatgttaccagcattatattagtgaatgtagtgacaaaaaacttgatcccaagaaaaattataggtataatgaacactatcaatttagtaaagtactttcagattacatgctctatctattggtgttgcaaccaacaatgatgtctgccattgctgggattgggcaaatcaggttccgagacacgagtgaggaggcaaagaagttcttcgttcggagagggaaagggaaggggcaagagaaggaggcgtgcttggacattcttggggttgatacagaagtgaaacctgagacggtgaaaggggacaggagtaaatctgttttgtttgatgcttgtatgttggccaaagaacttgataagtttgatgagaagattaagtgggagatattgagcagtgtttgggtggagatgttgtcgtatgcggctagtcattgtcgtccggaaagtcatgctcagcaagttagtaaaggtggggagcttattactttcgtttggttgctcatgtctcatcttggattgggagatcagtttcagatcaaggagggtcatgccagagcaaaactcatcgtccaaaagtagcttcaattaattaatttaataccctagctaatataatattaatttgtatttatgattttattctcatcacattaatttcattttctcttgtttttctttttcccttgtagttcttgtaccatttctctatttctacgtattag

SEQ ID NO: 28785 - DNA, 1387 bp, Cannabis sativa
atataatttcattccaatcctattaaatagtccgatccatttaattcataataccaaacgaactctttaagtaaatattaatgttaaattataccgtgttgattagcaactctaacactcttaactagtccatcaactaaacgattaataaagaagaaaatacaataacagaaagtctcaactaaatctaacacagccaaaaaaacataccaaatagtctaatctggagggcatttgtttcttgaaaaatctttaatcacctctgataaaaagggtcacatttagccattgattctattttggtcccagtggagtgccattggaatagcctgcacttcacctgccattgcttaatgagcttggatcttcaagctccaatcataaaataataataatacacattacttactgatagtgaatgaatagtcattactcattaacacttcttaaagggtctcatgttgacaaatgggctttttgttggcacagaaaccaagtaatcttaccaaactggcccaaatgatccctttcctaaatacaaattacaaacttcttttagtttatgaaaaaaattctgtttagaaatttataataatttaatctgttaaaaataaaacccaagcttctttctattttatatatgtgtagaaaaaattatttgaattataatttttataaattatccaaatttcttaaaatttgaccaaaaatctcaaataactaaaatatagatcatcacaacaaaaaaaaaagttttttttatttttatagtttaaaataattttttttagcaattttacggaattccacgtagaaatcctaaatagcaataaaaatccacataacaactcacatacaaaccaccgaagaaactactagaacaactcaaacgataaatttaaaaaaaaaaaaaattaaaagataataattaaggtaatttcctaaaaagaaattaagataataactcttctaatatcaaaaaataaaaaataaaatacatcaatacatccgtttctagagtataatgtgaaagcatcctaataaaatgaccaaattagagtatttgatttgttttagaatatttttgggaatgtgtataatatatgggaaatttgaaaaattatccataaaacactctaaaattattttcctaaatctaaatctattaaaattgcccatatatgactacatttaatttttccccataatacccctcttatttgaaaaacaaatcccaacattctttcgtgagtctctctctccctctcgctgaccacgcacgcacgaccctctctctccctctcgctgaccatgacttttcagcgctcgaccaccacgcccggccaccgacgaccacccaccaccaccgacagcagccctcgaccac

SEQ ID NO: 28786 - DNA, 2731 bp, Cannabis sativa
actaatttaattttagtcataacaagtatattgtgaataaaaaaatatttagacaccataaattgtgatttttgtgactaatacatttagtcacagactttttagtcacaatataagaatgacgatttaaaatttgtcaattttttttttacttttagtcacaaattcagttatgattaaaaataagatttttcgtatatgtatgggaagaatgtttagaaatattgattttgctgcactaaaatccatgatattcaattgcatgtatattgatcaaaatcaattgggttttaattattttttaaacttggtttatataatcaaatttagttgatgataacaaattaaaataacaaaaaaaaaaaaaagtgtaagctaataaatcaaatccaaagtgaattatgtattttatatatgtagcaaaaggcttccaacaatattgcatattttaattaattattatcaagtttaagctaaattaatgtaattaaaacaaaaaaaaaaaaaactattttaaataggaacagtacgaacagtacttgcaggagtaggttccatctccccatcttcattctcaccagtcaactcttcaagtgattttccttttgactctggcaccaaaaaggtaaacaccattccaagaaagtttataactccaagcataattaaggcatttttaactccaataccgggtgggtaaccagcttcggtcttcgatggatctttatcttgggctgcgtacaagaacccaaaagctcccactattgctccagcttttcctgccgcagctgatatcccatgacacgtggacctcagtcgtgctgggaaaatctcagccgggacaacaaaagtggtagcattgggtccaaagttggaaaagaaaaaagtcaaagagtacataatcacgaacccgatatggttttttttccaatggtggtaaggaaaggctagggcaaacatgaacaccgtcatgaaaaagaaacccattagttgaatggcgaatcttcccatactatctataaaagcaacagtaaaccaataacctgggacagtactacacaaggcaattagggtttgggctcgggcgattctaaatacttcttcaatagcattcattgtgttggccgctggaatccaaccaatggcggtgaaaatatccttttggaagagattcgagctataaaaggcaatatctaataaaaaccaggtggatgttgttccaacaaggtggaggccatggcgacgagcaaattctttactaaagagtccataggagttacccttttgggataatttctctactttctccacatcagcttcaagctcaacttgtaacaccttagacatgtccgcagctgcttgtgcagcatttttagcaactagagctgtgtatcgagcagtttcaggcattttcatacgccaataataagtaattgcagctggaaaagcaccgaacatgagaattatacgccaaacatagtcagcttggggaacgagtgaccctgttctatcttcaatgtaagcaggaacatcatattttgctttaaaggcacctgggtcatgagtagtcacaattaatctcaagagtaaattaagtaaatttgttcataaaattattattactatgtaaaaataaattataaatagaactcaacttgcaaattttaaatatatttacaaacatattaattctaatatataatttattattattagaaatgaggattctctattgttgttccttgtggcttgtcctccatttaaatataacaccaatatatatatatacagtataatttttatctaagaatacacttgagattaagtaaattatattctaattgaaagatcataactaaatagagttatatactaggaaaaaaaatcaaaacaccaaaaaagtatcaatataacaacaataataataacaattcttaatattatatcataataaaattatttttgagtaaatataatatttttatacatgtattatagttaggaataaaaattatttattttacataaataaatttataaactatatgtatatattttattaagatataattattcttatatagagatatactttcttaatacgagacttaaaaaatatatagctaattacaatttagatgttatttttatttataattagcctaaattcatacataccagagacaatcaaagctatgattccacccccaagaattccaaacccttgcatggcgaaaacagcagctataaaagcaccacgtgtcttcttattagcatactccgacatgatggtggccgagagagggtagtcaccgccaataccaaaccctagccaaaatctaaagaagcaaagagtcgccatgacggccttagcatcttggccaaaggaaagtcccgacgcaactgaacaaataaccataacaagtagggttagtccgtacaccttcttccgccccatcttgtctccaagccacccgaaaaagagttgaccggtcaatgttccaacgaaagcaacaccgtttacggctgctgcaacgttgggaggcaagtttcctggcttatctgaggataagtccgtgtagtaaatacgaccgagaagttttgtgacgagagagatgcagaagagatcgtatgcgtcggtaaagaagcccattccggcgatgactatggcggtgaaatgatagagttgcgtcttggccatgtcgagtgcattaagcactcccatttgttc

SEQ ID NO: 28787 - DNA, 2280 bp, Cannabis sativa
ccagccattagttgttggcctttccataagaactctttgcacactctttctatatctttgataatcttctttggtagtaacataatctggctccaatatgtgtgtatggtgagtagaaccgagttgactaaaaccgctcttccagcaaaggaaatgtgtctagtactccaaattctaattctgtgagtcatcttatctaccagcaagctacactcttttgaagtaagtctcctggggctaatgggaagacccatataggtgaaggggacatcacctctctgaaaatccgaggcatcaatgatacgctggatctcagattctggcattccattacagtaaacagccgatttgttggggttatgctgcaagcctgatgattgtgagaacaatttcagcccttgtaacaagtaatagatgctcttatagtctccattgcagaaaaggagaacatcatctgcaaagatgaggtgattcaactttagttctcggcatctatcacgaaaaatgaagtctgaattttgccccaccattttcataattctagttggatattccatgctgagcacaaaaattaggggagacattgggtcaccttgcctcaaacctctctttgtcgcaaaatagccatgaagagaccaatttatcattagagagaatttaggcgaacgaatgcaaaccataatcaactttatgaatgaatcgaggaagttcagaccatgtagcatctcttcaacaaaatcccattccaccgtatcataagctttctgcaaattcagtttgattatgcagctagcttttgacattttccttccatagtgacgcacaagatcttggcaaatcattatgttgtgtgcaatgaatcgccctttaacaaaccccccttggttttgggataccaagttgggaagcagacaattgagccttgaggagattagtttagttgccactttgtacaatacattacagtaggctattggacggtaatccttcactgtgtttggacatttcagcttcggcacaagggtaagtacagtgttattgatttctttcagtagacaccctgttttgaggaaagaaatgatggcttctgcagtctcatctccaatgatttcccagtttttttttttaaaaaaaatagctcccaaatccgtctggactaggggctttaactcctggaattgccataatcactttattgacatcttctctggtgtaatcagccattagaaattcagcttggctgtttgataatgcactcccctctcttagaagtccctgctttacactaattctgtttcgcatactagtacacagtaattccaaataatagtgaatgaaagcttcaataacatctttgggttcatctactcttttcccaccagtattggtaattgaaagtacctgattatgacgccttcttccacgaatactagtgtggaataaagcagagttttcatctccatcctttgcccaagtaagcttcaccttctgctgtaaaaaagctaggagagttttatgttttgagacataaacattcctcgctgctagttcagaagcttgcagatcagtatctaaaggttgttgatgaagtttagattgacattcttcaacagcaatcctcgctttgtcttcttgagcttgaacatctgaaaatactgattatttaaatccttgaaaaccgtcttcatagccttcagcttagaaacaacacagtatatcagagtccccttgtaaaacccctgccatgtttgcttaaccaattcagtatagctaggatgagtctcccacatcttgaagtacttgaatggtttcctacctatcaccaccttattataaagagttagaacagcaggggtgtggtcaaaaaccccctcattcatgaaaactgcttcagcagtaggaaaattaatcaaccattcatggtgagcaagagcacggtcagttttggagaagattcgatcatctccaaactgcttattactccaggtatagtagtttccactaaacttaacatcatccagctgacaattagccacacaatcaatgaattcagttgatgagacatacctaactcgcttcccgattctttcttcttttgccaagatatcattgaagttccccatgacaatccaagcttctctcgtcgccaaattttgtagttccttccatagcttcttcctcccttcttcatcattaaaatcatagacgaaagtaacattaaagtgatctttgttatccaccgttgaaacaccaagatggataaattggctagaacacttc

SEQ ID NO: 28788 - DNA, 3324 bp, Cannabis sativa
tttaggatgttaataacatacttgattagtaaaactagatcctgataaaataattccaatatcaaatgtctggaatacggatcatttacgccaatattacaaataggcggtgaatgccaggtagcgactctatttagagtgcttttgtgtaaacaatttatgtatttaacttttgaacaaatggcctttaggcatcatgcaatgacagtaaaagtacttcatgtttacaatttagacttcacgttttttaggccacaagctatgttttaaataagtgaccaggaaagtggagacgtccacacttctcagatcacttggggggtatcatgcctagctgattgtgccccaaaataacgtacggtgtgccgcattttgttattttcgtttaaattattttttgcttgcttcaaataagatgtgttttcaaccaatttccttacaaaattaaaaaatcctcgaatcccttcttaaagcttaaataaatacactcaatacaaaaggagaagtgttttcagccacaactccctgcagtgggaggtactcgcttgaattcctttttggcaactttcataaaagagtcttacaaaaagattaaaactattaaggattttcttgaactcctatagatattggtgttatcctaactaggaaaacaccatctgaaatctatatagcatgtgaaagcagctttcttaggtaaaaacgtcaaaacttaaaaaaaatatcaaagctctatgatcataaggtaatccaggaacaacctagaaaattgtcgacgattttagcaactttagtttgctcaagaaatttttagaggttcaagatcaaaaccatcctgcctggcaaaaggaagtagatacctcttaaactaccacctaagctagcagagggataacaagtctatcaatgttgaaaggtgtggagtgatggtcattggaaccacacacttcaaaatatcctaagaagatatccctcaaaaaaaactacgcatgccaacgcataagactaagagttgagaatattaatgctgaaatataatgccatgtcaaaagagcgaactaagttgttcctagagacaagtatcataaacaaacttatggaccaggcataaataaatagaattctacgacataaagaagagaaaaaggaattagaattgtcctaaaagaacaagtagaagaggtgaaaaacaaaaaaaggctcttaatggtctagtgaagataaaggcgctgttgagtctgtcagggatgggacattagacgactcctctagctctgggttagattcggcagcatcttgaactggcctttccacgaccataatggaagacacctcaactcttgaagattcttgagaatatgaggcctcacactaatatcctcatcactgtcgctgttaactgtgagaggaactcctcaaggtatttgccacaatgcatggaaagtaccttcgaagtaacttcctccctttttacctcatttatatgttggagtatggaagggtccgccaacaataaattgtgaatgaccacaacgtaagacatctccatggtgcgaagacgatatctctttgccttagctggtgccttgttagccgtattaaccgcatccagaacaagttggggtgcactatccctcatcttatgcattgcggcaaaagcactttatgcctttatgccattcgagggacactggttaacttccttctacaacctattgatggtctcctgacggaggtcaatgacaagatgggatccttggtagagaagggtttgactgccacatctaacatcctaggcatccacctgcttcttctcctctttcacttcagcttcgaggctctaaatgcggaagcccttcaggtctgtgtcctcttaagggttgttgacatgctggataaggacagagatagtcccaaacttattcgcgacatgggcctcaatgacgttcttctcttttatgtctttggttaagttctctctaagggagtgtgcatccttctcagcttcttgtgttgactttaaagcctcctactcaatttgggccttgtgctctaaatacttcttcaagtatttggcatcccatttcttctcctcagctacaaacttttcttcccacccttcctgagtcatatgcttgccagaggatatttgagcctcgacccgctcagctctggtgcataaagctttatttttagcggacaaagactagaccttcgcgcgaagttggtttagctctatggccacattccctgcttccttggtggccctctccgtgaatagtgccatctaacgaaaataggaataacttaccaagatcatcctggggataaagatcttttttcaagtagagataaatgagaaggctaataattatccctgcggcttgctgcctggcagctattgacagggtgtatagatgaacactactactaaccattcacttctccaaagtaagctcgctcacactacgacctatggtgtctatcatttccacagcataaggggcaatcactctacccatcgtaggaaccagatattgactcactgtggacaggttaaacatggggcctagaggcagaggccggcgagttccctctacaatttcagccatcttaatggaagatagtcgagtggccctcttttgcaggttcacatgttcccgctctcgacccttcatcaggatggcagcctttgtgagatactcatggccgacatgtggcatcataggaaccaaaaatcccaatgagggagctttgcctcttgtgacgggctgaggaggatcaatagaggttagtctagactaagactgagttgggggtagagtagactgggacgcaactatctataattgacgaggagatagagactactattggtgcgacatggacacttgcctagacgatgagtgtggaaggtgttattattgttgttgtatgttttagtgttgttgttgttgatgttgtagttgatgttgttgctgttgctgcaatggctggtgttatcccaatttttgcactctgatgtggcatcactcgatggtgacacgtggaatcgactccgggtatccgctcaaaagagacacgccgaacatggcacctcacacattttctcagacgaagtcctctaagccgagcagtgagcaatccgtgcaaaacgccaacacttagaaaattcagcttttgcatcgtgagtcatcaaggaaatccatataacttttggatgaaattacagagatatggcaagctgtccaaatcccacgattagtgtattctgtatttactatgcaatctttcgacttatagcaattgtaacgagaagggaaa

SEQ ID NO: 28789 - DNA, 3689 bp, Cannabis sativa
tgatcatggctaagagattcaacatggtatcagagcagtgttttcctccactgtcagcaaacatggcgagtactggagttgccaacaatggaaaccagatcaattccaacaccagcagacaacagaatcaacaaagtggagcctctgccttcaatcgatcaagaaacaattctgatgaaactaatccggtatacttcaatcacaacatgtccattagattaaatgatcacaattttctcttgtggaaacaacaggtgcttgctgcaatacgtggaaatagattaatcaaatacattcaagatcgagctccaccacctcaattcttgaatgatgcagatcaagcttccaacacattcaacccagaattcttggactgggaagtgcaggatcaattgcttgtgtcttggctgctatcatcgatgactgaaagcctcctcacacgcatggtcgggtgcaatacaacacggcagatctggcatgctcttgaaaaacactttacactacaagtctcctcaaagattttagagttttgaactaagttgcagaagcttcgaaaaggatctatgtccctaaacgactatctcttaaaggttaaacaacatgttgatctccttgcatctgttggagaaactttgagtgccagggatcacattgctgcgatattcaagggcttacccagtgagtatgatacgtttatcatctcttctaatactcgtatagaggaatactctgttgctgaaatagaagcactcctgcttgcatccgaatcgcgaattgagaaaattgatccagatcaagactctgatctaagcgtcaatcttgctatgattgactccgatcaagtctcagaggctaacgttgcttatcagagttatactaatcgaagcaacaggtttcccagctacaatcggtctcctactcagtcagccacatcgcgcgaaggtggcagtggttttatgagtcgtggagttccaacaggtagcaattatggtcagtatccaggagcaaatggtcgtggtggcactgcttctaacagaggaggaggcagattcatcacaacacctaatcgggttcagtgtcagctttgccacaagctaggacacactgtgattaactatttttacaggtttgataaaagcttcacgggagtttttccaggttccaactctcctacaactcaagccaacatagcacagactacacaaacagatgacaacagctggtttcctgactctggagcaacgaatcactgcacaccaaatgttcaaaacttaacaaccagcactgaatatgaaggtccagatcagctgtatgttggagatggttcaggtctgtccattaaacacattggtcaatcctttgttcattctaattcatctcatcctcttgttttaaacaatctattacatgtgcctgaacttacaaaaaatttactcggtgtttctcgttttgcccatgacaataatgtcttttttgagtttcatgctgataattgttttatgaaagatcaggtcacacgagccatccttctcactgggatacaccagaatggcctctatacttttagtccatctcacttcagtattcgtgtcccaccatcagataactctccaagtgtcttgacagcttctttacctcagcataatgagcatgatgctcctggttgtactcattgtaataacactcacatatctgaatatgatttgtggcacaataggcttggacatccttctcaaaggattgtcaaatctgttcttgattcgtgtaatataaaaatcagcaataaaaactcacaaattaaactgtgtaaatgttattacacagatgttgcttaggcaagattcacaaattaccctttcccaaatcatcccttactgtgtatactgaacctttgcaacttgttgttgctgacctatggggtcctgccaaaactccatctgtcaacgggtacagatactatattcaattcattgatgcattttctagattcacctggctatacttactaaagaacaaatctgatgctttaagaacatttacacagtttaaaaccgaatctgaactacaattggggaagcaaatcaaatgcttacaaattgactgagggtgagtttcgtcctttttttgatctactaaaacaatttggcattgtgcacaggcacccgtgccctaccacacatgaacaaaacggtttagtagagaggaaacataggcatgtggtagaaaatggcctaactctactcgctcatgccactatgcctcttaagtattgggatgaagcctttcgaacggctgtgtatctctgaaatcgtctaccaactcctgtcctaaaccatgtctcaccaatagaaactctattttctatagcacctgactacacaatgttaaaaacatttggttgcaaatgttttcctaacattcgtccatacaacaaacacaaactacagttcaggtcttcaccttgtactttcataggatacagcctcaaccataagggatacaaatgtttagatgtctcgggtcgtgtctatatttctagggatgtcatcttcgatgaaacatcctttcctttctcaacaattcccaaacttgacactgattcttatgcctatacagacttcttcacatctgctataatccctactatcactcctgctgttaataatgagagaccaacaatcactaatccacctgtgccaacttgggcaagctgtttaattcctgtgcagggttctgggttcacaacaacaacaactgcacctactccagctgcagctactgatgtaacaacatctggacaagcaactactgaaaagactggacatgttgtgcctcaaacagttccaagagatcgagaatctatggttcctggtgctactgttccatcaactactggtgtgtcatctgttcctgcttatcttccccaaaattcacctgctgttcctactcaaactcccatgatcaactcacatcacatgcaaactcatggtaaatctggcattagaaaaccgaaggcttatgtagcaatcaaaattcctaaatcagtcaaagaagcattacaaatagagcagtggaatcaagcaatgtctgatgaaatgcttgccttaattcgcaatgcaacctacacacttgttccattgccaccagaccgagaacctataggatgcaaatggattttttgacataaagaaagctcagatggcactcataacaaattcaaggcgcgtctagttgccaaaggctttcaccaacagccaggattcgactttacagagacgtttagtcctgttgtcaaaccagtgaccatacgcattgttataactctagctttgtctcgtggctggtgcatcaaacaactagatgttaacaacgcatttttgaatggtgatcttaaaaaagaggtgtacatggtacaaccacctggatttgaaatactatcaacacctccattagtgtgcaagcttcacaaagccctctatggcctcaaacaggctcctcgagcctggtttgacaaattgcaccagtgccttcttcagttgggattcataccctccaaatcagatcactcactcttcattcaacatacttccactcatacaactttgattctaatctatgtggatgatattcttgtcactggtagtgaccccattgttgtctccaacttaattgctgctcttaatgtcaag

SEQ ID NO: 28790 - DNA, 1756 bp, Cannabis sativa
  modified_base (1669)..(1708): a, c, t, g, unknown or other
ttataaattaccttagtaaacctaatattgcatagaaattaacattaggaaaataatcatattaggccataatcaatagaaacaattgaaatcgaagcaatagtttatcttaattgtcaatcttcataaataattgcttcttactagttttcttatttttaattctttcttaatttttattttaccaaatagaagtaaaagtttaatttcaacgtacttaactataatccctgtgggatcgacctcactcctggtgagtttactacttgtaacgatacgtacacttacgtgtgcaaaatatcacaacactgagactggtgctagtctttctattgtgataagttgaacttctattaatcatactgtgttgatagctttaatagattctagtgcaacgtattcttatattttgagtagggtgtttggaaagtttgtataaagttaacgaggtgttaccaagtggttccggtaacttactgtttactagagaactagttatttgctagcaggttgttaaaatcccttcctgagttgtggaagaaagggaatgcttggttatattagttgagttaaaattagagaattttgaggatatattaggaatggattgatttgtaaagtttaatataattatcgattgtgaaagaagaatggtaattcttgaactagaaaatgaggactcgttcgtgatcatggccaaggttcagagatcctaaattccattaattttagcgttaaggcaagagatttgctgtgagatggatgtgtcattttcttagccagtgaagtagatattatgaagtatacccatgggattggaacacgttccagtggtctaagagtttctgaatgtctttctaggggagttactggggttaccaccaaagtgggagattgactttgaaatggatctggtacttggagcagaatctatatcttaaactctgtattggatggcatttgttgagttgaaatggttgaaggttcagttacaggggatgctggatgttgggcttgaaattgctaaactgagtaccccattctggagtacgccaattttgtttgtgaagaagaagaatgaaattttacaagtgtgtattgattgttggaaattaaataaattcatggtgaagagtaagtattcttgtcaaagatagaagttatgatgattaattttaaggaagaatcgtcttctctgagatcagtcttcaactggttattaccagttgaagactcaagaagaggatatttctaaaacagctattcgtacccgaaggtcttgtgaatgtttttcattaatggtattttgagttcttccaatttgaaggaggcatatgaaatgcatttttggatggtgttgcaacatctccgaaaatctaagctttatgttaagcataagaaatgtgagttttgtcgaccctaagtaagcttcttcgggcatgagatggacatagaaaatatcttgatagattcagcaatgaataaagcaatttagaattggctttaacccaaggttgtagtaatggttagaggttttctgggattgactagaagctacaagatgtttgttgaaggatttctatgctcttagtaggattaagtcaaaagttttgaaacaaaatttaattattgcaccagtgctaacatttgttggaattattttaccagnnnnnnnnnnnnnnnnnnnnnnnnnnnnnnnnnnnnnnnnaaatatgaacttctaaaacgatacaaaattaaacacataaaagtatga

SEQ ID NO: 28791 - DNA, 3469 bp, Cannabis sativa
  modified_base (464)..(468): a, c, t, g, unknown or other
aacttttacatttacataaatttagtctttctgttaagttatgtctcattattctatttaaatgctgacgtgcctttataaattagcaatttttccctctaaactttgacaactatcaaattgtactcctaaaaataaaaatgaaaaatatttatcattttttttttagtaaatcttaaaaaataaatttagatcttaagaaaagtcattttgaatgattaagaaaattaaacaataaattaaaattttaaaactaattaagtgatttaaaaaatgatttattttttattaaaaaaatcattgagatattaaaaaaatatattaaaatttaatttttgtaaaaattaaattttacgggaacaaacttgagtatatttttttttttcaaaaaatgtagagttgtttaagtaaacataacatttttttagtttaatttataatatttttttcaaaataattttatnnnnntattgaatttttaattatttttatttatttgttaagatctgagtttacaaatataaataagtttattttttttcaaaaaaaaattagtttatttaaattatttattaaattttctttaatatttgtttgactttttatgaaacgtgtttataaataaaataaagtttaaaaatatattttcttaggaataatttacgcttttttagtaaaattaattttttaatttttttaatatttttagtaacttttttaaaattttttattattttttcagaattaatagaatatgataatttttaaaattaatttttttaataaaagagaacaaaattgtgtattggtcaaagttcaggggataaaaatattaacttttaacggtaaaaaaaaaaaaagaagacaaaatctaaccgagaggacataattatgtaactgttatattttaaaaaaaaaaaaatttaacaagttgtatattttaaagaacaaaatcaaatagtaccaaaagctcaaaaagtaaaactactaattattttttattatattttatccataaaagaaaacctatgttattgataacaacaatacatgttccatgctttaagtactaagttactagaatgtaaagttgagcttctaagcaaaacatttttttcattgaaatttaggattgaagataaagattaaataaaagaaagaaaaaaaattgtggtacgagttatttgtcctatatatttattattattgatggtgactatttattattattattattggttcacttttcagttgactttttaaatatgcatttatatcgtatcattattatagatttactctatctttcttatgttgttattcatttaaacacaccaaaacacccggttcaaaaaaagaaaaaaaaaacataaattataatttcaactgaaatagcatgtcacttacgtttcctttcttgtgtgttggattttcaaattcgggtgggacctaatccaaaaaataaattatagacaatttaagtctcaactaattcgaaattgtgttcatattgtgtaatgtataacttttttttttaagagagaatagcctcagacaaacaccactcaagggaataactgcagcgcggaggactaaaagattcactaataattggtatcggctaaaataatgttttgaatacaagaagaataatcagaccaccaaatagttctagaagtagcccataaagcataataagcaagtgcatccactactccattagcatttctggggcaataagtaaaaaatacaataataaaattagaacataaatctctaatatcatcaagaagtaagcctaaagaaaagtccaaaatgagagaattgttgagtttatggatgagactttgacagtcagattcaatctggatatcgtgaatgccaaaagagatgcactgaggagggaattgcggattgcgagagcttctgcccactctagtagagggcttctgtgagctttccatactacagaagcaatgaccttgccatcatggtctctgatcaccataccaaggccgcacgagtgcgacctagagccaaaagttgcgtcagtgttggccttgagtgtgcctgaaggagggcatatataatcaagctagttctttttcttattattttattttattatttttttaaaagaaataaaattctcactaaatggcaatcaccaaaatatgagtcacaagcactcaaagaaaactgataattccagttgctaaaccatagcaatgtcaagagtagggatggaaatcgggtggatactaagtgggtaatgcaccttccaatcctattttccatttatgtcgcccatcttcgcccctccccacttaatccccgatgggttcgggataagagaatccccatttggtatccattaagattaaaataataataatataatgtaatttaaaataaaaatgaaaaataagatattgactttaaaatggctttattacatagtaaattaggaaaaattaatagtcaactttgtaagtataacgaataattttaatgcgtaatagttagaaaactatatggaaagtttagaaactatacatcattgttgaatatggagtgggtaatattgaccccaaccctgccttaaacccctttaggtatataaaactcaccccacccccgtcctattacccattaaggtggataatccctatcccatttgaggtgggtacccggccccgcaagacaaatttacatcactagcaaagagttaaaaaaatttagcaaaactatgagcaatataattattagaacgattataaaattaaaatttgactactctcattttatctttaagagccaagatctcttgtagaatcataataaactcagcaagaaatgctttaattttctctacgactcgttaacaatcagattcccctagcacatcaaagaaccttaatctagcactaattttcatcccatgaagaatagccatagcttttgtaacctatggagaagggaagtacgagaccagagaggaagcaatagcaagacattgcccgttatgatcaaggacaacaaccccatagccaagacattccatggtagctctcacatcggcatcaacattcaatttcagcctccccactggtgaaggaacccaactagaaatcacataacgaactgagacgacgtcctccaaagtagtagaccgaaagggacggccattaacctcaacaaacctctaaataaaatccatggcccatataaaaactcactccatatcgagcaccttgttctcaagaacccaatggtttctttagtaccaaaatctaccaaagaagcgaccatctcaggcttagataacaacacttcacgttcactcagaaaagattataaattagctataggcatgaaagacaatgacaacttaaacgaagtcttggcagtaatatgccaaagcctagaatattcccataaaccatgaaaagaggtttcttcattctca

SEQ ID NO: 28792 - DNA, 1251 bp, Cannabis sativa
ttttttttttaaaaaaatagtaataattaaagatttatattttatataaaataacaattattaaaattgggtgtacttatagtgcaaataaaactcctcatatgggaaatatggggtattactgatttagaaattttttttttaaggtattttaagcatattttttcaaatttctctatgtaaattggaattaatcctattttgtgttaatcaagttttaagattaaacttgtttaatcctacgtaatctttgttatgaataaaagatttttatttaaaaacaatacataaaaaatgtataattttttttcaatattattcttttcttgctataatttaataagtttatagtttcattagattttgactgaagcatttcaaacatgacttagaaattgtaaatgagtgccatcccacttgaaaatatataaatatatataaatattgatccagtctgcataaatttattttatattataaaattaataagtaatttatttcgattatgtttttcttttgcctcgagcacgattctttaaattattatgcttatcatttacgtaaggttgcaaaagaaagcttttttttactttttgtttacaactcactaatgtgatcatatttttctaaagtaacatcttatatcatcattaatcaattaattattatattgattcttcctatgaaatctcttaagttttcttaattatacatagattggtgtcactttttttttttttttttatttttagaaaaatatctcattaaaaccttcgaataaattcagtgagttggaaaaacaatgccaaaaagatacccattcatgtaaaatgtcaatctatatcacaccagaaatatacaatcgaaaaatttggggtaccaaatgtaatgaacatctaaagataaaatgaacaaaactattacaataatcaataaaatggcgaaaccaacctttatttctaggaggggccaaatataaataattttgtttcttgtacaagtgtgaattttttgtacatctaagtatattaattgtacaagagggcagacagtattttcaatggcctcgatgatgatcgtttatgttctttaactatatatggtgtggtccttgtggaaagcaagaaaaaagtctaacattcttccatttgggctacattaattttaatacatatatattatatatcaaaataattttgtttaaaaacgactcatgggttgaacaataggaaaacatttgtggccacttta

SEQ ID NO: 28793 - DNA, 1724 bp, Cannabis sativa
gtacaaatacctcagccaagtaacaatgaagacaagccgacttcaaaactacatgtggacgggtcatctacagatcaactatatggtgcagcaatcgcccttgtcacacctggggggcaacacctacacgctgcagtcaagtttggatttaaagcttccaataatgaggcaaatatgaagctttaactgctggtcttaaactagcccgagagatgaaggttgaacatatttaaatctgcagtgattcacagctggtggtaaatcatgtatctagaaaatacgaagcttggggagaaaatatgatagcatatttgagcaaagtatacgatctactcgcatagttcaaaagctacgctctcaaaaaaattctaagggcaaaaaacacgactgctgatgcattagctcggctttcgggaagtaatgtaagtgataaagcgaacatggttcctatctagtgcctcaaagaacctagcatcactggcatggaagagatcgaaatgattgatacttccccaaacttgatgacgccaatagcgacctacctcaacactagagaagtcccagataatcgaaatgaagcttgaaagatgagaaggaaggttgcacagtatatcatagtagagggaattatgtacaaatgagggttctccataccattgctcaaatgtgttacccaagaagaagttgcacgacttttgtctacaatggacgattgattttgtggaaataacgccgtcgagcagagtttatctcagaaaattataaggcaaggttattttctggcagacaatgatcgaggattcaaaggcctatgttaaaaaatgtgacaaatgccaaagatttttaaatataccgcaagttctgcccaacgagttaactagatgcaaagtccttggcctttagccatttggggaatttacttgaccgcacaattacccaagggcaaaggtggagtgcagtttgcagtggttgcggttgattatttcactaagtggaaggaagcagaaccactggcaaccattacatctaataatgttcaagactttgctgtgaagaacataatcttccggttcggattactgtacaaaatagtttcagacaatggcaaaatagtttgacacccaatcctttaatgatttttgtgcgaaccatggcatcatcaaaagtttctctgcagtggcgcatccccaagcaaatggtcaagttgaagtagtcaacaagacattgaaggatacaataaagaaaagacttaaggatgctaaaggaaactggctggaggaacttcctgaagttctatggtcgtaccgaacaactgagaaaacggtaaccagacagaccccgtttgccatgacatatggatatgaagcaatgctgcccctagaacttgagccaccatcccacagaagatggacgtatagccaagaagcaaatcacgtactccttgccgaatcacttcatgaaatcaaagagaagcaaaccacaacaaacttaaagttgatggcccatcagcaaaaagtagctcggtatttcaacaaacaattgaaggctcgagaattctttgtgggagagatggtcctaataagtgtatttctaaacaccaaagacaatatgataggtgtactcggacctaactagaaaggaccatatatgtggttgaagttctcgaatcaggagcatacaaaatgggtaagtatgattaaaaaatgcaactcgttctggtacca

SEQ ID NO: 28794 - DNA, 2999 bp, Cannabis sativa
gaggaacgacagtcttctcctccttaccagtgaggatgcccataacaaacaaggccatccccaacttgtagacatcatcaacttttgtgcagctttcaaaaactctgcacagttggcctaagctgatgaaaggattgctgttgaaatactccataatcaaccggttcgaacttcctttctctttaatttcttcttcagtaggtccggccaacaagtttaactcggtcaccaaaccaaactccaccctaccgaatctgcatctcttttttgccaagtaaaagtgtacctcatctagcttgtcagatttgattttgtgcaacattaattgatggatcaatgcccccaaaaatcgtaatggttctctctcaaagaactgtttgaaaggggattccctcaccctatcccataatctgaattcctcgaatttggccttaatctttgggtaataataactttcgctgcgccaagtgatacgacatgtgtaatgctccgagagtgaaattattagctgtggaggtctctgtaaaaaaacaagaaaatgaaagttagcaattctgtagcaacttaaaaaatatcaaaatttaagatagatgggaatcgggcccatcgtcccatcgtcctctattggacggggtattaggccatatcgggcccttctattaaaccaccattacacataccatcgggcacccccatcggacgggcatcgggcccgacctaaaaaacccatctccaacctcattgcacataccatcaggcaccccatcggacgggcatcaggcccgacctaaaaacccatcttcaacctcatttcattgggcccgacctaaaggtatattaaaataagagggagaagaagaaaaaaatgcatatagtttggtaaaaaaagacaaaaaaaaataaaaattaataaataaaagaaaaggaaataaaatgagaaattatagtttgttaaagttgcattataatgagatatgtattatatatatgatggtatgtataattaagtacatggcatgcatagacccaccataatattttattcttaaagataacaaattgaacaacacatctctgtgatttgtgcattcatgggcgacagctgctccacctcctccgccattggagaacccattctcaagcagaggagagatttagcttggactcttggagaacctctgattcactgcttggatggtagtggtgacggtagagtcggggatctcagatctctgatctcatatcgcatctctctctctctctctctctctctcctccagatctcacccctatctcgatatatggtgtggttccatctctgatttcatcttttctttcgtgttgtttctgaatttatatacgatttcaggtgattatttttgttagttgatgttgagaagtggagtagctaattttggttgtggtttaagatattggagtagctgaatctcacaataatctctaccatattaaaaggtcccaaatgaaccctaatcctttctctgcgcacttacattctagatattcatattcttgcttccctgttcatagttgctaacctattctttttttattctaatcttagaaaaattgaacctttgaatcttcttttggttgaagtgatatatatctatatattttataaatgaatattttttagggttttattattatcgcctttctatatttctaccgattaattttgttgaaaaattatatatttatttcgtttgatagattttattaggatactgatttctcgtcacgtttttctaatgtgtttatttgcttgccgggggtttcttaaattattaaatcaagtttgttgtaattcaatgtcttaactttagaatagtagagtggttggtgttcggagattaagaaaattgaattctatgttcctggggagaggctgatttaggaagtaatagttggataatcggggtagttgattatgaattaataactttgtcttgcagttgatttgtgtgtaaattttttctggtttatcttgagtttgtaaaaatgtctctaggttatttagtcttcttgcttggatgttggtttagttttgaaggggagtttttgatggtaattatagtatttggattctgggtcttttcgggcttttgcaattttagtttttaagctaaatatttttttggttttgttttgttttttaaggaatgaaagtaccaatttgatgaatgagttgcgccattatttatggctttggtacctttcaaggtttttgcgcttaatatatggctgacccttaattatttagtgtaatttgtttaaaatatcatgatatcatgaaatataaaatattatgaaatttaaagttaaaagtgtttgcacagattttactaattggttctaaaagggttaactttaataaatgtatgatttaaggaaaaatttaagtgaatttgatattatttaagaggattaaagattaaatagtaataatcgtgacttattgtgttcaaggtatgatttaagaaaatgtttaaagaattttaagtattatttaagaggattaaagatttaaatggtaatagatgtgatggcctaatctttaattaggatggattgggatctatctatttgcaaataggggaagttgtaaaaattatgagtaattagtctctaaggatataatatggaaattaattaagtaaatagagtagcataaatggctctaatagtagttatataatcaaaaaataaggacaaactaaactataatactcaaattggagtaaaatttgtcaaaatagacttttgacaaattgaaattagcaaaatagacctttcttttttattttttttattacttttattttacatttaacatttaaaaaattaatttaatattaaacaaaattaactaaaacgtcataaaacaaaatactaaccctaatttttttttacagcatcctctttctttttgttcttcttctcctcttctccacccaagtcactccttcttcttg

SEQ ID NO: 28795 - DNA, 2991 bp, Cannabis sativa
aaataaaaacctaatagttttttttatttttttattttgggcccccgaaaagtgtgggccctaggcacgggcctagcccacctatgcctagggccggccctgcatgcacccctaatataggcattttagactgtgacactttgtttctcttagaaattgccttcaaaaataaaatagaattcatagttgaatagaaaaaatttcaagaaaaattaagtaaaaagaattaagaatgtctatacctttttgtttatctgtattctaaaactctcaaagcacaacccatgatttaggattaatatttttataaggaattttctttgcctttttattatctgtctctcctccactctcaacccaatgagcttttatgttgcatcgtcattcatccatatacccttacatattcacatccatgttattgagaatgattagatcttccattggataaataaattacaatgtaataatttaaattttaattagtattttttctcaagaaattaaatttacagcaaacttttgacgaatgaccaagatatcattcttatctacattattctaattaagggtagtcagaggtatgttatctcgcacaaggtatgcaatatagttgttaaacatcttttcatatgttctatctgtactactgttagttttatgaaacttcatcggaagttgagatagtttctttgataatgcaagctctacttccacattacccccgcagtagggcccacgacccctcttcttttcactcgaactttcactctcagttctttcttgttccattatgtatatattggtttagcacattttataagattaaaatacaatacatgttagtttaacaataataaatatatatatattaaaattttaaaataaaaaatacaaacattaaagtatttttcataaaacaaaaattatttttaaaaattttattttccaattacaacatatcatcattattgactgcaaaatgatcaccactatcgctatcactgtcgaccacaatattttcttcatcatcacctactcagctaaagtgtcatcaggagtttcatcattgtcatcatcaacaacaaaacgatcataacttttaccgagtaattcattaatattggatacttcagttggataaacatctgtacattcatattgaataatatcgaatatttgaagttcaactcataactgaaatttagaagaatttacttcttcaagtattggtacatcactagtagtgacaatatcatcgatattcgtatatgagaaatcacacatttctcgaaatataaacatagacgactctccaatcaaattcatttctgatatcttgaagataatataccaactgagcttgggatgcaagtataaagggatcgaccttgtaacatttatccttgacaaagacacttgtaaaactttcatattctttagttttactagtgttgaaccatttacacttgaataacacaacactataactcatcaaatatttgaattcaataatttcttacaactctccataataattatctctttcctcacttgtaaccattacattgctaatttgagtcttcaactttttatcatgttcatggatgataaatttgaccccattaacaatcattcctagatagtaaaatactatcgaacttggtttgttggcaagagcataaaatttgtcagatattattatcggagaagactcacgcaaatgattgatctaacaatgtcaatgtaggaacgagtacaaatgatgtgttatgtaattaaatttaagtattttatgaattcatactcgagttttaaaccaatgagggaattcagcttcttgtctacgctgtgaagatttgaaatgccactttgtcgtttcaactcgtccatgtgctcagcacgattaaaaggcaagtcaattaataataaaaacatgaatgataaatacaagttgaagattggcaattaatattaaacaagtacgtaatgtagtcggatagttcaacacatttgttcaagatgtaccactctgccttttgcttttaatgtgaaggtagtagattagttattttttcctaagtagatcacaaccgaccttgaacactaaaaactcccaactagggtgagattcaactcgatcatcattaggtcgattgaactgggtttcaattccatgaaagtatattgaataaaatgttaatgtttcattcaccacataagcttcagcaatcgaaccttcgaggtatgaatgatttctaacatattgtttgtgcaccgccatacaacattcaataggatacatctatctaaagtgcaccgggctaccaagtactgcctcgttcgaaagatggataaccgaatgcaccataatatcaaaaaatgcatgagagaaaatcatttccaacttgcataaaataattacgatgtcttttttcatcttctcaagatctttcacatttaaagtttgggagcaaagttgcttgaaaaagaagcttagattagtaagtgtctttcgaacattcgtccccaaaactgatataattccaatcggaaataactgttgaatcaacacatgataatcatgagattttagcccagaaaacttgtcatgcttaacattctttgttaaattacctgcataaccatttggagacttgacagatttcacaaattcacaaaaatctcgacgctcggtgacactaagagtgtaactagcaagaggtttcttccacttgtccccaactttaaaaaagtgtagtttcttttttatcttcatatctgccagatcaagtcttacttttttggtatctttcgatctcccgtcaatacttaaaagtgtacccaacacaatatcacaaacattttttttaatatgcattacatccaaattgtgcctaagtgacaagtttttccaatattcaagtttaaagaaaatgcttctcttagaccagttgagctcgataagagttcgtttacgcttcacccccc

SEQ ID NO: 28796 - DNA, 9276 bp, Cannabis sativa
tattactttggccgatgatagagcctgagcaataagagagtatgcagcccctatgttcaatgaactcacagtcataatccttgactagctctaaccattgtctctatctgatatttaaatattttttagtaaagaagtacttgagactttggtggtctgtatagatctcacacttctccccctgtaagtaatgtcgccatatctttagggcaaacacaacaatagcaagttctaaatcatgtgttggataacgctgctcatattccttcaaccggctggaaacataggctatgacccagtcaacttgcatcagaacacacctcagaccctgtctagatgcatctcaataaacaatgaacgtttcttggtctgatggcaaagctaacattggtgttgatcatctactgtttcaacttttgaaagctcattcacacttatcggaccatacgttaccactggttcttttaagtcaattctgtcagtggcattgaaatttttgaaaatccttctgcaaatcgtcggtaataccctgtcaatctaagaaaaacttcaaacctcaataagagtccttggcctcggccaattctcaattgactcaattttcctcgaatcgaccataattctgtcttttctaacaatatgacctaaaaagaacacgtttgataaccagaattcacactttttaaaccaaccattttgtaaacgagcattccaccagctctcccttttagctaagcaatttaaaccaacgattttgtatattatggagactaaactccatgttggtgctataaataagtttcctactaagcttagtattgctaacggtcttgaagtcccatgggtcgaccttagtggcggcctccttttgttatggacttagaatgttgatgtaaccctactttcttataatataaattactttcactattatatccgttttcccaattattgtcctttcactttcactggtttttatggggcttcgcatcacactaaccgcactaacatatgacaacttcttcatcgccttggagatactattcataattcgccttgggttttaatgggcaattttaacaaatttctctcacctgctaacaaaattgggggtgatattaacaaacagccttcaatgtttttcaagaaattcctcgatacattcactcttcaccccattcatggtcatggcaacccctacacctggactaacaaacactctcatcacacccacatacaaaaaagattggactggggcatctcaaatctcatgtgggtttcttcttttcccaaggcgcatctcctccatggagacttttttggatctgaccaccgcattctaaccttttccctttatcaggatgaggatagcttacgatctcataagcagtaattccattttgataacagatggcttgcagagaatggatttgaggactgccttcgtaaggcatgggcccccaatcatgatttatgtgaccacaatcatatctctattcttacaaacaaacttcaacattgtgctgtcactctctcacagtggcagaaatcgattgggcctcctcttccgcaacaaatcaaaaatgttcaatctcagcttcaggttgcccaaagtcattcccaaccttccaattttcagcttcttctctgtcgccaacttcaaggggatcttgataggcttctctataaggaacaagagtattgtagcagcgcttcgaatcacctggcttaaacttggtgacaaaaatacttgttatttttatcaattttcctccttgcatcgccccaaaaacaaaattagtatcactcatgtgccctgatggctcaactatcaccgatactcaaagcattttgacagttattgaacaatacttcacttaacttttcaccggccgaaatcctactagagagcaaatggattatgttctttccgcaatctctgacaagcttactaatgtggaatgtttatgcttggaagctccattcacatctgatgaggtccagcaagcaaccttccaactggctggcgataaatcccccgaaccagatggctttagtggaacattcttccaaaaaaactgcatctgcttgggattgatgtcgttcaagcaactcttagcttcttgaatgacaatgcatatttatcgcctttcaataacaccatcatcgtccttattcccaaaaagagtcaccccattccctcactgattatcgaccaattggcctttgctctacaatgtatataatcatctcccgcaccctagtcaatcgcctcaagccaattctttgccatatcatttcatcagctcaaagtgctttcttactaactgcttaatttcaaacaacatcatcatcgggcaagaagtcactcactcactctttgactcatcgcaagcatggtaaagtgggttggatggctcttaaactcgacatggccaaggcttttgatcgtgttgaatgggaattcatcaagaaggtcatggaaaaatttcacttccctttgaaattcaccaaccttattttgacctgcctctccactgcttccttcatcttttctattaatcaacaacttcttagatccatcattccatcccatggcattcgtcaaggcgactcgctcttcccgtatctcttcttattatgctctgagggcctctcatcactcatcactcaaaaagttcatcaacaccttccaaggaagcatgctcttggcttaaagattgcccagacggtgccaatcatatctcatttgttcttcgctgaagataacattctttttagcgccacctctcatgttgctgccacccacatcaaggaaatccttcatgattatagcctggcttcgggctaacttgtcaattatgatatatcctcgctctatttctctccaaataccactaatgcgatcaaaaaccagatcacctctctgctcaatgtgcccattcaagactttattgagcaatacttgggtctccctcaatcttttggtcggtcaaaaaaggaaacttttacctaccttcaggatcgtgtgtggtcccatttatatggatggaactccaccttcttctcaaaaggaggcaaggaaattcttctcaaatcggtggttcaagcgatttcgtcttatgctatggcttgtttccaacttcctcactactttcacaaaaaaaatggagtccatgatggctcaattttggtggggaggaactgagcacaataggaaagttcattggaagatttggtcccacctttacaaatctaaattccatggtggcctaggtttctgatcaatgaaagctttcaatcaagcaatgttagccaaacaggcttggcgtattcttcaggctccgtcctctcttgtttcccatcttcttaaggcctggtactaccctcattctactttccttaattccagtaaagggcaccatccttctcttgtctagaatagcatttcttggggcaaaacactcctcttgtcatgtttacgtaatatagtgggtaatggtacctccatctccatcttcaaggattcctggatcccaggttacggaaaactctcctaccttcaaacaccaaatacccttgatgggaacgtgtctagccttattacaagcaacagagaatgggatataccacaaattcaaaccatttccccaagcgacgtttaccaagctatacaatccatcccactcctttgcccacttgctcaagattgaccctactggtcttacactccacatggagcctatacagtaaattctggctaccatcatgcttatgacattctccaccaatttgaacccacaccctccattacaactaaccaagcgaagtgatggaagttgatctagaatttgaagatacctttgaaaatcaaacattttatatggcgagtataccatgatgccttccctactagcgtgaacctttaccacagccgaatagtgaggtccccaatgtgttttcgatgccatagtcacgaagaaaccttagcacatgctttgtttggttgctctaccgtctaccaggtttggaaattaacaatctttcacaaaaatattagtactaaaatgcttttcttgcaatgatgctttatatgtgtactgacataatgacaatgaaagactttcagttttttatttgtttactctggaaaatttggcattaggaatgaatcactacacaacaagctagctccaaacacctttctaaccatccaatggatggaagattatctatttcaataccaacaacacaatatagggaaaatgccacacaacactcaagacgctagttgccctccattacatagccaccgcctccaggccagcttaagctcaatgttgacgctacccaaattattcaaaagaacagaatgggctttggcttaatagttcgaaatcatacctcagatattgtcgcatccttagctacaccttggaaaggcgtccaccaaccacttatgatggaagcgcattctctccaactcgccctcgaatggtgtcaaaagcactcacttatgatccgccaaatagaatttgattgtcaaattcttgttgatgttgtaattaaaggtcactccaataatattcacctataggaatttataaccaaaattaatagcttgttgtcttcatttcctcaagcttcaattagctatgttcctcgaaagtctaattatgtcgctcatcgactggccaagcaagctttagacttagaataggaggctattctcttatttgagcaaatatttcactttcttgtatcctgtctttttagaatttatcttaatggatacaactttccttaaaaaaaaaagtactaaatgaacgaggattaaatgatcgttatttatacaaaagattcaatgacacttgatcatattcaaaatgtttgtgattcttaatcttttgtgtgtgatatgcataatatatagattgtatttagaatatataactatatgtgtatgtagtatttgtgtatatacgtatataagtgtgtatatctatatacgatgcataattattattttgataaattaataagatctgtaatttatgataaaataagttgtttatttcatgagtagaaattttttgatatatttgaccatatacatctactcgccaatttatagtttttgttgtgtataactcgatctaataggattagatttccaacacttagtgcaggttttgcactttttcgtcaactcccaaccaatacttttccccgagggtgggccactcctaggaaatttcatccacggggtagcaacctaaggagggatgtagtcaatgatcaggtgtatcacttttcgtgagattattaaagcatctccaatggagatgttatgaaggatgcttgatgacatagatacatttttagtattttttatttcatacttactattagaataaaaaagaataccacaaaagaatgctataccatagcatcctttacattttctctttcttattattttatcataaagtaaaaaaaaaaattatttatttaatatatgttaaataataatataataatattttaataatttttagagatacttaccattttcttattttagaaaaaaaaaaagtgtcaaaaatattgtgaaaaagagataaaataaaataatatatttttaagtgatgtgaaaatttttgatactcttaaagaataccaccattggagatactcttaggtcttcaaattgcttgtttgtttaacttgaattttacttacctctttgttgttgatcctggttgtcaacctttgcgtactaagttgtttgtccttttttacttgcaaatcaaatggctagcagaatcctttcccaaatcatatataaactagcagtgactaccatcctagaggcctcagtggtagatgttatagtggccatggagaatcctttcataatcaaccccccctattttcccgtaggcgcctccaatagtcctggccaaggcttccacacctcagagtccaagtatgcccactcctttagacgaacaactagaagtggagagtaattcaagaaacttcccttgtagatctccctgcgacttgaataagaacaagagttagcaggaagagaatcaactaaacaatggggatgatacttccggtggagtaattagggggacttgccacagaagaacccccaattgaatagtctgaagatgccactccctctaaaatcccaattaccccggctcaccttagcaagtctcaagcagaaaagcatgttagacggttcaaatttttggtggaccgagtcaaaaaaaggagggacatcatttgagaaggttaataagctaaaataaatttgggccaagaatcctataagaacacttgaggcttcccttgttgtgacagtcactcccaccctcattaacttcgtccaagactatacaggccaagtggctgtgccattatgcttcgagatgatctcggatatgttactttcttggctagacttctcgtttctagtatcattatttatcctactcaagatccaattttcctagctcaatgcctttgttttctcgatactgcattctagatttttctctttccccttattcttaccattacactttgctcttacatgttgctgctatggttggtcgtcaccaagatagtagtatgtgtgtatgtgtatacgtagagtttcaccaagatactaatatctagcatgttatgcagtattgaatagtatagatcaatgctaccaacattggtatgactagaattcttaagttaggttggcattatggttaatcatactatgaatgtacgaatatttggatctcagtttatgcactaaattcaattaattgatttatagtaactaagtgtatgggcgcttagttacatgtcaattatttatgttattatgtgtttacgcttttcttgttgcatgtcaactcacagttatttcgcaatgtgtaagttaaagccaacgaaagctgagtaggagtgagtggaggacttcgatgaagattgtacatatttagttgccttaatttggaggattgagatcaataggagatcagttggcgaaacttttggtttgtcatatagatgtatcttttggaattaatataatatgtatgtattttataactaaataacgggatcccaaattgtaaatgtttaacgaagtttatttttaagtaaagttttaaaatgaattttatttataatcacactttttattttaaaatcatttgattagcaaaggttaacataataattagaaatcacgtaacgtgcctcaaatattagggtgttacataacatcttcgtgaatggatctgccaggttctgttccaacgatatcttaaagactgtcacatcacctttttccacaatatctctgagcagatgatatttcctctcaatgtgcttgcctctcctatggtatctttatctttagaattagctactgctccattgttgtcacagtataaaactagtggattctctatttcttgagctacttacaaatcagtgtagagttttttcaactaaactgcttctttagctacctcacaagctgctatatattcggcttccatatgatcgaatctgcaatactggatttcttaatgcttctccagattacagttccaccactaagagtgaatactgacccaaacgccgatttctaactatctttatttaattgaaaatcaaaatcagtatattcattagggttcaacgcccaacctgaataaacaagcataagatctctcgttctccggagatacttaacaatgtgctttataactattcagtgtttcaaaactagatttgattaatactgactaaccattctcattgcatagtatatgtcgggctttgtacacaacattgcatacataagactcctaactattgatgcataggtgtactttctcatatcctcctgctcttgaggtgtcttagaacattgttccttacacagagtaattgcttggttggacggtaatcttttcttggatttttcatcgagaatccttccagcaccttattaatgtaagttgcttgagaaagtgctaatgttttgttctttctatctcgaatgatacgaatccccaacatagttggcttctcccaaattcttcagttggaacttttcaaccaaccacttcattatgttgggcgatcttatttataaaaaaaatatttaaaatttaatttgacatgatagttgtgacaatttgatatgactgtttattagaagttaaaccccaaaagaaactgaccctctctctcactcttctctttttcttttgatctggttacccctccaaccatagttataaatacgtgtgtgttgtgatattccgacccatatttttgaacttttaaaattaccgatcatgtcgtcctaggccataaaaaaatataagtcgtgtcatgctatgtcataaaaaaatatagatcatgttgtgtcgtgtaataattttataaggtaggcacgccacgacccgtaagtccaataattttatgtcgtgttcaaattcgtgtcgtgctttattcaaaccggcctatttttctaaatagactaacaagctttttcatacgaactcaaatttcatatttttgcatttttgttactatttataaactaaatactaaaatacatgcgtattttattatttaaattacttttacatattttgttaataataatcacacgcaatcatataataaaataattataattattataatttttttaaggtataattattagaatttgaattattattttaattgataaataaatatttatcatgttattattatcaaattattgggtttgtcaatgtgtcatgctttcgagttaattcgtgcttacgtgtcgtgcttttgaatttatcgtgctatgtcgtgtctaagcccatattttttatatcgtgtcttacctaaatacatttttttgcagatcgtgcttgtatctctcaaactcatgtcagttttgtactatgtcaaaaaatccaactcatatttacagcactatctccaaccatcacagggttattagaaaaaactacaatccctctctatcgattacttgaaagatttaaccaacgccgaaagaaatagattttcttggtgcatttgttccattaaagtccctttctcatgttgggttagattggattggcaggtttggactatttatgcccagcgctctccctactcccacctagaaatgtccagttatactattacgagtttttttttttttgctcgccaatt

SEQ ID NO: 28797 - DNA, 5526 bp, Cannabis sativa
  modified_base (3770)..(3778): a, c, t, g, unknown or other
  modified_base (5465)..(5469): a, c, t, g, unknown or other
tggcctgaactgccacaaaggctgcagtttcgaggtacaattacttttttatcaccagacgggaaacaattctcctgtcttcttccagccttatttttccttggacgacctattggtttcttttccacaggtaccccaactttcatattcttgatgtgttcttggagaacccaatcatccttgtcaccagcaagattgatggtgttatacccgaaattgggctggcactttagaggatgacacgtgtcaaccttagagaatacgaatcaacaaatataatggcaattatattaaaagatactaaatggaataactcatttaatgcggagttaatagagcatatctataactcgctgactatatagtcttaagtaagacaaggatgtatgaagtattaattcacgtattgacgagaaaccatttcgcgtcagaagacatgatcgaaagggtgacatcgataatgcataagcaaggcatcaacctcactatgtgtaaaaaggtgttaacaagacgtgttgactgttagggcaattagcatataatacccattatactaactaagtataacatcttaaagaacctggataacgattagcgagacacccatctcactgtaggaagtcatactcctggtatcttcactaattagctctagacatctttcaatgagatccactgctccgtcacgtcagctctctctcagatagaagctgacatttaaatgaagttggctactgaagttcaccttatcaccaagaactgcgattgtcagttgagcgttatgtcctcaatcgcagaaacgatgggatttacattatcaacctcggaaagatttgggaaagcttcagctcgctgtcaagattattgttgctattcaagttcccagcgagatgccccaacgagatacactttacaacgtatctaaatccacgtaaacattgacccgttaaaagcggataaatcacagttgtgtgattttaaataattaccgcatttatttacgtgggacgtaattaaagcccacaatttcagggaaatattgttgttggattcaaatctgattgtaattaactgtcaccctaggggcagaatgtacagaaaaacggacgaaaattccttgagagaaaaaacctagtttgtatcagaataatctgaataagattgactcgtggactatgtagagttaactacaaaaccacgtaaaaactttgtgttgtttttgctttattatcttttcttaaatttcaactaatttttatgctgatcctatcacaaaataggcttattatcattaacaaaattttgcgttaatagtttggtgctttcattgagagcctacgtgaaaaaagctcagaaaaaatctgtcctaaccaaaagaagaacttttctccatggaacaatggggaaaataatgatactcatcctgaagagactactcaccgtcctggaaaagagccgacagactcacgaaggcctcccaactcacgaacaacacgatcgagacgttcaaggaggaaccaacctgaaggtggccaaaacccagaaactgggaatgaggaaactcatacagaagctgtcaacacaaaaaatgaaataagtaagcgacctcaaagatataaatcaatacaactcaaagctaagtttttgagagaagagttacttacgtatgatgcaaaatgcagttgtatttattggagaaagaccagttgtccagaagaaatccttcttaaactcggtcttgtttggtaacctcacaatgatcctacgatcatttgtgtgggtaccgagatagtaaaagccccctgcacatcgcttcctcacagggactgctttaacaaaataaatatatacaatttcaagaggagtagggcactcccattctaaattatgatacagaacctttaaccttgcaagaattttgtaagaaattggattcagttgaaagggagcaactttaaggtaattacaaaattctttgaaataatctcttcagggaagaaccgcttgagccttgatgtgttcgaggctccaagcgcctattcccgacgagtgactagtgctggctccactacactcctcgcgaattaccctcttaggagggaaacagctgaattccccaggagcaacaaacctaatgcgacatccacgcctttgttcaataccacatgattttaatatgcctccaacatatgctccaatggatctgaccttagattcaataagttcagcttcaaaggtgacattgggatcccgtggggtctttgacttacgaggcttagtagacataatgttaaattcaaggtcacctagtgaaaaagcaacaatgactttgggtaaaaatattggtctcgcgagtgaaatagaagataaatatggaggttcaggccaggctacgtctcgcaagaaacgatctttacttttagatatttcttgcagaaatcgcctataacgagtagcaacttcgtcctgattggtttttattaaatgactcctaatctttgcatcatttacttcaagtaaggattgaggtttctagattttgggtttaaatggaagagctaattccttagggcactctgctctaagaatcctggaaaataaatttcagattgggacttttttttataaaagagcaatctcaattcctggaagaaatttattaaaaccaaaaacttataaatacgataaacctaaagtttttactctatctaaaccctaaaaattacccacaaaattaaatcaaaactaccaaaaccaagcaaaaaagagcaatgatgcaattagttataaaatatatatatatatacccggaaggaagaggatgaacaacttactggtcagagatggacgtttgcgcagggaagaatcctataactaggtttgagatgaacgactaaatgaacccagtgaacttttgagattggagattaagtctgaagaaattcatagaaaataagtcaaggacaaagagggcatgcaaaattctgaagaattggaaaaagggtttttctcaaaaaagctcgaagttggttgaatgcaaaaatggtggaatgatgatttcatttcaatttttataccttgagattggtcaccgttagatgaaaaaaatagagatctaacggacaagaacaatggagaatcggaaatagatgggtcattaaatgctaataatgtgcctcaaaaccatgaaccgccaaattcaaaagcatgcaatttttcaaattgggttaagaaaaatataacctttgtaatcatttaaaaagtactttttattaaaaaaaaaagaactttttaaggggcgattgttatacccaaaatttagctgtacttcagagtgacacgtgtcaatcaagtagaatatgaaccaccagatataataacgattatatcatttaatgtaaaatagaataactcattaaatatggaattaatagagtatattcataactcgctgagtgtatagtcttaggcgagacaagaatacacaaactactaatttttgtattgacgagagaccatcttacctcggaagacacagtcccgagaacaagatttgtttttaaatagaattactcaaattaactacaggtaatatatagcgagacatccgcctcgctacatgtaaagaaatattgacgagatgaatcagttgtcgaaacacagcgtatagtccacattataataactaagtgtaacaacttggaaacatgtaggacatgattgcccagtctgcgaggccttatggttaaagagcagttcttaagtttgcnnnnnnnnntggggctcatgccattgctggaaggcatatgattaaaccaagttattattggtcatctatatgcaaagcgaggtaccactgtcccacgtcagcatcaaccgccttgaagataagaatgataagcggttgtgcggttatcaattgttatctacacgtgtttaaatgaaacgtgataaaagctcacgtgtcatgaaacagttatgtaattccaatttaaatgtaaataactgtcaacctatattcctataaatagggacagattctacagaaaaatgggacagaagatctttgagacaaaaaaagatcaataattgtaatattgtatcaaatactcagaaatatcttgaataagatagactcgtggagtatgcagatttaattgcaaaaccacgtaaaatacttggtgttattattataattattatattattaattttcctatatatctgcgtataatttatcacgaaaaaggctcaatattcatcaacgaaaatttgcgttaacaataactataaatgattatcaaataaaaatacatttaaatatatatatattacttagacccacaaagtgtcttaattaacaaataaactcctatttctcttttcttctcaaaatagcccaaacttggtgaaaattctcaaatgagattttgtatatttttgaattctaattgacttattaaatcaattaattgagtttacaagataatattatcctagataatgtggggaccatgggcctatgtaaccaagctcccaataagtagatattgaaatctatgaataaatttcttaacttataaatttctcctggctatactatagattcaaaattacactcttaattacatggaacactatatataccaaatatagataggctaaaattatccattatttcaatcaaaataatcaatgattctctatggacggtttacatcgagtaaggacaagattaccacccttcgatgtattttatccttgaagcacttagctccatataaatgataatttggtaaactattatattgccaaaattagagctcttccatttatatcatttagccaagctttaaggaaatattgtttcacttctaaacaattatagaagctatagattctatatctatgattaacgctcccactcaattatactaccatgttctcaagatgtaagtatgggctagtcctacgcgtaagctggtaacgaacaagtttaagaacacgtatagtacaattaagctaaagcttaaccatcctaggattgagatcaaatgaactaagatcaactaagtgatattgacttaaaaaagatataatggtaactttatgatatctttttcacaatgaatatcgattcagtcttatgcatagccgatacatctgatacaagtttacattgcttatgcccttgaaaagacattcaacttatccaagtctaacaaaactacatcgttgattcacattagtgtaaatccagtgcactgataaattgttagactaaatagtttgaatcatataatcacgattatttttcactgtgtagacaacactataatcacaagtaactatattttctagattttaatagaatttatatattaaacatataatcatgaaagtaatatgtgaaccaagcatcctaaaataatttttgatcttttattaaggctaattaggatttnnnnnccctgaacttttaaggtcgttaaaaatgccccctgaactattgaggttgttgaattt

SEQ ID NO: 28798 - DNA, 1448 bp, Cannabis sativa
aaaaaaattaataattccttttcatttttaaccaaaactccaaacccactcgatcgcctctctcccttaccaacggacctctctctcgctccatctcacgttgctctagtgtgagacgactccggcgtccaatagcgtttagatctcgaccggcgctaccctccttgacaccagaggccagccactctgtcgtggcgtggagtcatcaaagccagccatcatcgccgacgctgtggaccgcaacggcagccatccccagtgacgttttcacctttcttgaaggttgaaagcgtgcaggtactgggtcaacgagcttcgagattgtgtccgcatagggagccaacatcgatttatcgaaacggatcaaggtcatgacaccgttttccaaccgccaatttcgaagattttaatggtcgatttggcacttgtaatgctccacgaaaaggacattcattcagtgttttcactggtcttagttgtgattttaagagttattttatacaaattaaagttttgaggtttgttatactgtgtatataaattatactgtttatggaaattatttatttttgttgtaatatatatactgtgtggaaattattcatttctggttcaattaattaattttaaataaaaatagatttgagaattttggaaatttgatttggttgaagcatgatcggatccagggtgggtgggaatcgtaaactgttttagatggtggtggtgtgtggtgagtttttggtaggggtggtttctgggcagtgagcatgaacaagtagaaagaataaatgaaaaatgaaaaagctaaaaataaataaattaattaatctttaaatagattgatacagtggcagcgtgaagaagacaaaaaagaaaagaaaaaataataataatatttataatttcaaaataatttatttagctttttttatatttaaattatttttaattaaaattataatttagagaaataaaaaattaacatgttgcattttattagtatctaacagattagttagaaaaaattactaattgacctacgaaaataagtttatttattgtgtaatattttaataatttatttttaaaaaaattataaaaaaacaaaattgtatcttattaagaatcacaaaattagtaatattacaaaaaaaatattattttaagtaacattgattatcttattatttaagatacttttatgttacttttacttatatagtaataataagttcattaccttcaaaatttagttgtaaatttaatgataatgtacaataaaatataagtacttattaaaggacgaggcataacttggatgtcatgggatcgtatgtgcgctgtaaaggctgaaggtggcttgggctttcgtagcttgcatgactttaatcttgctatgcttgctaagcaaggttggcggcttttgtgcaaacccgattcccttg

SEQ ID NO: 28799 - DNA, 5185 bp, Cannabis sativa
aaaatatattatttaaaaaaaaattatgtgtgacagtatttttgtaaaagttaactcaaattccaatatttttgtaggtttttgaaaaaaaaaaaaaaaaacttaatggagaagtcaattttggcaagaccccaaaacttgttgtatataaatactcttgtataattattcaacgaaagagtgggaaaaaaaaaaaagatagtttttggagagaatataatgaatataacacagtggtctgatcttcccaatgacctattagagatcatcatcatcaatctccacaccaaaacagaccttaccagattcagctcagtctgcaaatcatggagactctcagctcttccttacaaaaacagaatcattttaccatccaaagtttctttcttgggtcctcttcatatcagagaatcctctcctctactcctcactgagtccacagtgtaccttctctcttccaatctatggtgttggatagtcaagattaaagaaagtcaacaacttggtcaacaccaccatatgatcataaaccctctctcaccattccaagttcaccctttgcctcacttgctccccaaagtactaaacttgttacaattccaagtctttgagttgaccaagtcttacactctccaatactctaataatctcaaccactgtcactacaaagtggctttggatccaaatcttgattgcccatctttgatgatcgtggcaggtggggttttatggcacttgaaactatcccaagataagtggagtactatagatgacatggaatctcaactctcataccaagatgttatttattgcagaggaaagttctttgctgttgatgagtttgggagagctgtggtagttgattcttctactttgaatgtcactgaaattgcttctgtgatttctgatgggaatggtgacaagaagaatttagtggagtttaatggggagcttcttttggtggataaatgtagaagtgttaaggtggaaaaattcaaactttacaagctgaatatggagaagaaaagatgggttgagatagaaagtttaggtgatcaaatattgttcttgggtgaagattgctcatacattacatctgctaagaattttagtgggtgtagagggaattgcataatctatagtgattcaagttcaaagtttacaacttggatgaccggaggtttgtaccgatgaatcaacagccggaatacattaacatcttcaatccatttcagcctccttctctgccacactatggacacaactatggttagtttaattaggctcttttgttgctttattgcttagtagacttagtgagtttgtattaatcttccaaatgggttattgttggattaatctaatgtattggaggatttagttgttcttactatgtttagatttgatgtgttttatgtcaaagacaatgttcaaaatgattgacaagttcaatttttcatgtgtttactctatctaagattagatattttagatgctgaaaaggaaattgtttgatgaaattattggagacaagagagtaacattatgtagaaacaaaacaacaacaacagcaatagaaggagaagatttttacaaacttgttttggataacatcaaaagctgaatttccttagtccaagaggggtagttcaagtgctcagtcagttcatggttttgctcccacgaagaccgagcttcgagtccctttcaaacatctaacatcaaatgctcagtaagtgaacttgagctactgaacatcaagtgctcagaagctgaagttcacccttaaaaatagattactatcttaagggtaatttgaggccaaattcccttatattttcatttttataaagttaaccccatcattcttgttttgggtggtaattaaatatttgccaatttcgtttcatgtgcacctatattgttggagttgattaggagagttggggaagaggaccctttgtatgtatgtctcttgcagaagtgctttagggtccttgttggagatttttcttacttcaaattacaatgttggtgaattgattggggtacaacatcttttcccatttgtcagtaaatatatgaatgttgtgtaagaaaattagaacaacctatttgcaggaaagtgataagaaccaaacacaacaccaattaatcgaaaccagatcagagaatgaacagcaagaaaccagaaacaaaactcgaacataaaagcataaattgaactcaagaacttacgtggttgggcaacacaatcaatggagtctttgctcatcgcataaacctctcttgagatctctcaatcaaacacacgagagtatctttcacaaccctctaaccctcaatctctcttctgtttttccttctagctaaaggcctaactaacaaaactattagtagccgttaagttggttggggacaaaactgttaaagaaactgttggtaactgagtggttcaaggggtcaaacctcaacagtagaaaaagtactattgttatcagccaaaagtttagagcttgaagatcttgacttgatgctatatggaagtgagaaggctattagttcctcttataactaaatattttggcttatttgaaatcttcccttcgaagttccctatggttttatccttttttgttgctacgtgttaaagagtcctacattgataatgtgtagaaattaaaaccaattcattaataatgacatgaaaaaatagaaaccaatgggaatcagacacatcatcaaagacttggacagagttagttaaaacagtttgtttactatttcagtagtaaatgctaaccgacatgtgcctctagttcaagactcattcgaacctttctaaaatctgtgtgttcattaaattctgtcgtttacattcttgcatttaattttgttgatttctggtttggcttctgtgtttcatgctagttgaggttgttgttgaaacaatttatatagtaggattgatcatggtctatccatgtactaatactgtgtcgtgaacaaatttgtagatgaatgaaaactctctagattgaatattcaaacttcttattggaattcttttgaggatatttgcttttggcactgattttggatgttataatatgcagattagattttattactgaaatctactagttaattagttggggttatttagtataatttttctattttattttattttttgctaatgggaatttctgtagcctaaatttgacatgtatcaaattatgtctactgaattcttttagctgttaaaaaattattcctgaactattaaaattgttagattttagatctaagaatttttgtccaatttcattcaattttactaatttacgaaattgtttgatgaaatcattggagacaagagagtaacactatgcaaagaaaacagcaacaatagaagaagattttttacaaacttgttttggataacacaaacttagaacacattcaattcaaaagccgaatttccttaatccaagaggggtagctcaaatgctcagtaagtgattttgcttccacaaaaaccgaggttcgagtctctttcgaacgcgtaacgtgataagatattctataccttccttcatttaggggtttgtgaagcattgagatgttttagaagagcattagcagattgctgggcaaaataattttgcctgagcctgacatatggtaacccaacaaatgacaaaatatcagcaggttttgagaatgaaagtatttcgtaccacacttggttcttctcatcaagctcaattgagaaccgttcttccccagcctgccaccaaaattagcaacttcactatctatattttgccatataatgccttcaaaatagactattatctttcatagtaatttgaaagtcaaacccttttatattttcatttctatagagttatactctttaatgtaggcaaatgttaacaaatttaaggtctctatccaatttggttgtttaatcgcaaattattgttatgctaatatcattttgcaaaagaactttcttctaaaatgacactaaaaaaggtaaagccaaagttgagtaaagtgagagaccagtaagtggccttgaagggtaccacttccaaagctaaaagaggaaagagattgcttttcctttcccttcttcttctcatccacatacacaaccttaagtggcatcatcacccatggcagaaactctttcacacaaacacaaaacttttctccaacttgggttcgagttttggggtccacaaatgcccaatccaacccaaaatgcctaaatatcaaattcagatgattcataacaaaaaagaaaccattttggcatttatacaaacatgttacatacatacctccaagattggagagcattcttgcccttttcatatgtgtcaatgccagaaccaaccaaaacacgtttgtggtttaaaaaaaagccatctttggagagccctttatcttgtttgagggaattaagtgggttagcactagctcctatgtattttgcatcatagttcaaagtatctgatctgggcatatacataacaatcattgtaagcttaagttgaatagtgaaaactgtaaagtttgagtctttttagtatttataattaagttacctgtcaatacaagatttccaatcctcaggagatggccgagcccagctgaagaaaaccatgttcctcaatttggttaagattaagaagtatgaacccctatctaatgatttcaagtttaaaagaaagagagaagggaatttgttgcagatgagtcaaaaaaaaaaaaattattcattagaatataaaaatctatttagaagtaatattaatagggaaatttggaaaactatacattaaaaactctaatattttatgcttaaactaatacattacaaaataaaaaatatatgacacttttattaaaaactaaagaataactctcacataacaaccgaaccctcaccattcaaaccccacctgaccaccgcgtacgacccaaactgtcacccctcaccaccgcgtacgacctaaatcgtcacacttcaccaccgcgtacgacccgattcaaaccccacctctccaccgcgttcgacccaagccgtcaccccctcaccaccgcgtacgacccgaccgccccctctgaaatttttttgggcttttttttcaatttttctgggctttta

SEQ ID NO: 28800 - DNA, 3920 bp, Cannabis sativa
tataacatttccccactatattaaataatatctcatttgtagcaaataattttgtaacacaacattttatgttattctaaccataatttccctttctcaaataataataataatagtaataataataatgaaaaccatttacattttgcacacttgtttaaatcttctttttaaaatcaatctaactaatttaacgtgttatattgtcaaattaaaatgtacctactacctaacactacacagcacataaataaatgaaaatgtagaaattgtactcttatatatgactgcactagctttaatatttgttagaacaaatgccactaatgataaagtcactgacagggagaaaacaaagttataactgcttgaacatccactgtacaagaaaagcttagtcctttaaatataataaaagttcatggcatattatatgacttaacctggttgcttatagtaaacatgaataatatataaataaacgaatcaactcaaatcacatctaatttggtagaccaaagcagtcaaagatctaagaaacttgataatcagcaaagttcaaattggtgatagatcaacgactgctgtacctcattgatttttcccataaccaacttttgcttattaattcaaaatatatttacagcagctgtcacttctttggctccttatcatcttcaacatcctgcaagtaggaattttgaaaagttgtcacaacaaatttaaaaactcgaaagatgcaacaagaaaaatggcaatgcaaaagaatcagaagatccctgtaacttactgaattatcaatcttgtcaaaatcgtcatcgaaactctcttcaccatcatctgaaatacaaataaggtataactactcaacacatttaaacataaagagaattcaaacaatgaaatcatgtgtttgaacaaatcccagttgagcatgtaagtttgagtaatggatcttgcatgacataagcaatggcaggcaaggcacattatgattatgtgccagtttaagccataagcatctaacaaaacaaggattccgtgtgtgaggattatagaactagactgcaacaaatacaatataaaaggatcagctgtatacctagtcccccatcactgtcttcaagatctcccaataggaaagtatccaagtcttgctcagctgaagaggacttggaagttttactgctcaggttcttctccatccctttttctttgtcattccctccaaccacagatgcttgtttggtctcgtcatcttttttttgctctgcttctttgagcttaacctcctccatgtattgcttctcatacctgattgcaactcataaatatgtaaatcaaagacaactcactgaggcaaagttacaaataaagattcaccaaagaacaagaccactaactagacgtgctataatttctttggccatttcatctttgtatatattactcctttgacatattaaatacttctttaaatatgattgctaaataaatagcttcctccaacattcttaagtattgccaccgtggtttgctttgcagtgataaactgatcatacagctatgctgcacaatgggatcccaacaaagctcggtcacaatggtgttaaactaagtttgctgaaataagttgctacttacggagccacatagctgctgacaagggtaaaatatatcttccagaacctcctttctttcattatacgtgggcataattcatatcttaaccttgacatttgctgcaaaaagaggttttaccagtgtgacatcagtactcatttttcagtcctttaaaaattgtcttttgttttgttataattattatcaataaaaaataacacatgaaattatcatcaaataagtgtccgatagtttgaatctaataactataactaaatcttgaacaaacaccaatgcttgttgggactttctccttaaaatgttgcatgacttctaaactgtagatgatttgaaagattctgaggccgagttgccaattcagggaaactacttgtgcgcacgattccagcacataaatttatttatcaatataataaatacacacttgtaatttttaattctacatgattgaccaatgaaacaatcaaaatctaaatacaaagataatataccatgactgactatttcatagaattgttagacaagcaaggaaattttgtaaaggaatttgaagcttcttttgtaggtaaggtatcaactatccactaagaaattcacgtcatatgtgctaaatagttttaaatacagaaagagaaacaaaaaaaaactaaaagtctcttccaatcaaagaataattgaaatgacaacccagactgaatttaattggtaacaaaataaagagaaagataaagataaaggaaattgaccttaacactagtaagaacaagatttgcatgtttctcctgccattccgtcagatctttccttatattcgaagccgtagtcgacgtttctgaatcagatccctccgcttcatctaaccaaacgaaatatttattttaaaaatgaaaaacaggaaaattacgaaaaatcagatcagaacttcagcattggaataagagttaattcagaaaccttgaatagtaaagctttggaatgtagtagaagtgagtcctttgacaaagtcagtgagatcttcattgattccaaacttgaggaggtcggactgcgagacctcgccggtggatgaggaggaagaagaagggaatgagctggtgatggaaagagaggaaagagtgggaggattgacaatgatatcggaggagaaagacttgatctgatcggcttgcttaagggcggcagttttgatgagatcggctcgcttggaggcctcggcggccaactccctggatctcttagcggtttcggagactaagtcggagattttggcagaggttgtcagtgactgagatgttttcgcggcttcttcagccaatcccttagctcgtttccaaaaactctccattgttgtttgtatgcaattcttcttcgaaatctctcagctattttctaagggctcaattctgccgttttcttcgccttcttcgagtgtgatgataaaagtgataatgatacgagatttactactaatgccactccttacgtcttttagcttagcgggaagatgtcttaatacgacgtcgttgccgaatgaattgacattgacggccctatttagcggggaaataaatgtttgctctataagcttgagcgtgacttttttttatcttggagaaatttacatttttatttttgaaataaaaatataaaaatgtgacagatgtcccatgaacttagtcattgtcatttttatccaaattttttttccttatcttttgtgagttttcaccttaaattatgtttgttaatgactaatgagtaatggattttagttagttttcgtgtcttacaatacatagctaatagaaaaataatttaggactttgagcactcatatgatattattacattagctaaatttaattagaaattattttagaagtaaaaagaaatgaaaaaaatttatcttaaaagattaaaaaattaaaattttattttcttattaaaaattctcattttctctttttcttttcttatatttcttttctttgacttaacactattacaaaaagatccatttgcgtccatataacctatgtatattttacaaaacacaaaaaaagtgaatatttacaccaattattaaccggtagttctgattgtttgaacctattctcaaccgacacaaacatgcatataattaatttttatacatctttctatcgtttatcactaacacataaaaaaataggtctaaattacacgagcccaaatcttcaccacaatcaaatatcgcaatgaacccgtatctcagattggatcagatacttagtgaa

SEQ ID NO: 28801 - DNA, 1738 bp, Cannabis sativa
gttgaacatgtcccttcaacatccaacccacggcgaaccaccccatagacccccaccgacccaaggcgcaccccaccgacccacgatgctcccccaccaacccacgatgcacccctactaacccacaacgcacccacgatgcacccccaaccaaatcggacacaatgtcaaaggtgagtttgtgttccattttttagttttttattgattttgttttgtgattttagtgttaaagatagattttgttagatttagggatatatttaagttttagaatctcagatctgtgatctggacaaggtccgatgtaggtccgatgcggttaataaatttgtaagtttgcaaggtaggagacgtatctccgatggggggtccgataggtctgattgttccaattgtatccgatgtggggggtccgattgtataaatgggagtactttagagatatcataaaagttttcatatcctacaaaaattagttattatgagtttagggggaaaattgtaagcacatgtaagcatagaaaatcaaattttcctaacatacttttttcttttgaatttaacattatctattttgccaaatttaactgatatcctttttttaatagatttttttttttactaacaaaccgtatgtacctctacaacgaatcaacttagtaaaatgaatattcaatgtcgcataatatatttagttatgttacttaattaaattagaataattcatatttttgtgttctagactttttacactactaaattgtactccttgttattaatacccctcaaaatataacttttacaataaagttttatagtgaaatgagtaaagtggtagatgataattaataaatggatacaaactaaataccttttactcttttttacgttggtaaataataaaataaaatacttgttttttacaatatataatttatattattatttttagttttttttatttattttgtatctatttattaattattatccgccacgtcaatcaatttacgataaaattgaatagaatatgatggaatgattatattactgtaaaaattatattttaaaaagtataattaacgagctgtataataaacataatttataatgtaaagaatttatggacaaaaatattaattattaattaaattatatcgttgaacacaaaaatgtgatacattattttgaataatttatactataagtggtatcaattgtatcatagaaaaacatttagattaccatttacatggacaaattactccatatctaagatgttctgaacaaacatcaactcaaaattggcttgagccatagtactcgaaaagataagatagggtgattacacactattattccataacctaagtataagaaaaactaaaatctcataacaaaatcaagtgatataattgaaacatatatatacctgtgatatcattatccatgtcaaatatatatgctggctacagatgcaatcatcttgcataaacatacaatagccaataaaataaagttaaaaccacctttgttaaattttatcttacctgaacaaaaattataatttcatacaagactacatctttttttttctttcattcataattgtttggtagagaagaaagggaactgggaagaaaatagcagagtgaagtgtagacaaaaaaaaaatattaggagagagtacaaaattgagtaaaaaaatattgatgacccgaacaattaatttttt

SEQ ID NO: 28802 - DNA, 2734 bp, Cannabis sativa
caagtgttatagtttcattgctcttagaaaaaatctcaaaaaaatcctccctttacaatggacatgagagtcgtatttatagtcagccccattcttcttgcaccctcaacatgcccccatactccctatgtccagtcactttcgtctatcatgatgacattgtatcctaagtgacctgacatatctagaatcctaaattacactaataatgtcccttccattttgtacctcagacgaactgaagtttgttcccgttatgtaagcgtattgtgctgtcgttatccctcctgacatcttcttattaaatctgctggtgtcaggaaggaaaagtggataagcagagtgttgaaacagcaggcaccggcattgtgtacgggtgaaggtgcgcgggtgcgggcgtggcgtggcgtgggcgcaggcaggggcgaggtgcgggcgaggcacgagcaaggcgcaggcgtggcgcgggtgcaaatgcttttcaagagataatttgatttgactaaaggagattcacaaacaaaggaggcggggccgctttttgtccttttttgtttgtatggaatatcttgtacctctccgtttgctatttatagaaatattttacttcttctatttttgtggttaacacttgccccccagtctaaaagatgactttttagttatctttttcactgtaagtgaactgtcttctctacttttgttgtgagcctcatccagcgttatgtctagaactacgcattgccacattgatgggattcttcaatatggtaggtgggcacatgtgatctttcatgggcatgcgcgtttgatcttaatcgttgatcttatttcgatcctacggtgatgaacctcctataaatagccttatcttctttcatagtttggcttcaccttcacctttctaaactcgcttccacagtctagtctttatttccttcgagctatacttatgtccttaggctttcgacacatgttctccttgcgacttttgacgcaataggcttacctttgcctacatctattctgataggtaccttctcaacccatcgacttgtttcatttcttatatctgtatttttgctacacttgtggttactcatttaccttatatagcctgcctatgagtcttctagtagttagttacccactagagtatttttctttcctcctactcatggcaaatcatagatcaccttatgtccccgagggagttcccttcatcgaactttcatccgattcggacaaggaaggtcccaatccttggacgcgataccaccaattgatgttcgagcgcctaaagtgcttggaagcaattagtgaatcaagaacgtttggctaggcttaaaagagagattaagcttttggagaattaaggcatgcccacacgcatgcctgtttgtcccatctcacgcagatttatgctgacatagcgagtaaccttactcagttagggcgcatgttctcgcctgagccatcttcccccagttgctcaccaagggtggccttgagttgaaatgggccggcaaaaaaaaaattttgggcccttacgataaagataaatattatttttaaaaattattaaaatatatatatattttttaaaaggcaatttttttatttgggcccctaaaatgagtgggccctaggcgcgagcctaccccgcatatgcccagcgccggccctattgctcacccatacccttggttgtggagccacccgtccgtcgagtagagggtagagctcccaccaagcctaagtcgagccggaaggctcttgcccgttggatgaaaggaatgaagtgcattgtgtcccgttctaactttccttgtgcttttgcagatatggacaaaccacacgaatcgagtaagcctagcgcgcctcttcccaccaaagacccctcaatctcgtatgggatggctgatgtcaagagcaccataacaaagtcaaacattaagaggatagtcaacgaatacgctgtggagcggggcttcaaacccttttcggaggattttaacgttaaaatttgaattttaggttttaggtttaggttagaatttctttttcattttgttttgtttatttttgtgtttgttttttttttctttttttaaatgcagtttaatttctgtctatttttattttttatttgtttttcaaaatattgtctatgtagacatgtgtatactgtgtctatgtggacaataccatatgtacacatagatagctaacttgagagttaattgtttaaaatagatggaaaagactaaatgttaatataatgcgagttttgaattttaaaattaattgctaagatagtgagtattaagggttataccgcaataagtcattaaggctagcttactggtgaggaagagataggaaaaatgaatctcctattaaaaattggtgtcttatattgtgttaaatcaattaaaatttaatactttaactaatctaatttatattaaatatgttaactactcaattagtggtttaattttttcataaataaaaaattacattttgggacaccactttttaataggagatcttgattagaattatgggttctaacccaaaacttttaagctattaaactattaatttgattctaaaataagttataccacaatctatctatatatctatatataatataaaggaaagcatcaacaagtttaggtggcactctatatgagttttttcatctattcttaattttctcatattt

SEQ ID NO: 28803 - DNA, 5180 bp, Cannabis sativa
  modified_base (27)..(33): a, c, t, g, unknown or other
aggatgttaatgaaacatacatggtannnnnnntagatcctggtaaaatatatctaacacttatatgctctattgtctgtgacttcgaccacctgatattgtcattcccagttaggtcagagcacgctggccgcactatcttttgtgtttaggaatactcttctgaggaccatatctcccacaaaaaaatttcttgccctcactttcttgttgaagtaccgagctaccttttgctgatgagccactagctttaggtttgccgaggttcatttttcttcaatctcgtcaagtgattatgctaagagggcatgattagctccttgatcgtaggttaatattctgtgggatagaggctctaattccacgggcaacatggcttcataaccataggccatagcaaatggtgtttgctcagttgctattttctctgttttttggtatgacgacaatacttctagtagttcctccggccagtttcctttagcttcttcaagtcatttttttagggtgtctttaattgtcttgttgactgccttgacctgaccatttgattgaggtgtgctactgtagagaaactttttatgattccatgtgtcacacagaaatttgtaaacatctggctatcaaactgtttgcctttgtccgaaacgatcttgtgcaaaagtccaaaccgacatattatgttcttcaccacaaagtctagtacttttttagaagtgatcattgctaaaggctcggcctctatcctctttgtaaaatgattcacggcgaccactgcatattgtactctgcccttgcccttgggcaattgtctgatcagatctattccccaaatggaaaaaggccaaggactttgcatctgcattagctcgttaggcagtgcacgggtgatcttcaaaaatctctggagtttgtcatatttcttaggcctttgaatcttccatcattgtcagccagaaatatccttgccttagtattttctttgataggctttgtcctattgcgtggttgccacagaatccgtcatgtatctcggactggagtcgtgcaacttcttcttttgttacacatctaagtaatggaatagagaaaccttttctatacatcacaccttctactatgatataccgtgcagctttcatcatcatcttccgagcttcgctcctgtcatttggaagtactccagtgttgaggtaggctactatgggtgtcatccagtttggtgttgtgtctatcattttgacttcttcagcacaattgatattgggttcttctaagaattagattgggactaggttggccttatctgttactatgctgctcgcaagctgggctaaggcgtcaacaattgtattttcttctcttggaatctacctgagggtgtaacccttgaattgtgcgagtaggtcttgtatcttgcttatattggccatcattttctctcctcgggcctcgtactctcctgaaacatgactcactaccagctccgaatcactacagagtacagacctcaatgtactcagcatgcacttcccgagcaagttttagtccagctatgagggcttcatattctgctttgttgttggaggccttgaacccaaattttatttttgcatgtaggtgttgctccccaggtgtgacaagggcaattcttgcaccaaaaagttggtatgtggctgatccgtccacgtgcaattttaaggtatgtctatcttcgttgttttctgccagggactcttgtactggctccgggatgtccgttatgttgctttcttctttgcctgtgcactctactacaaagtctgccaaggcttgtcccttaactttggtacagggttgaaagattgttttgtactgacccaactctattgcctatttaactaaccgcccagaggcatcaggcttttgcaatacttggcacaatggttagtcggtgtatactcaaatagtgtgagcttggaaatagggccttttgctaagatcaggcagtaagtgagcttttctattaagggatattgtcattcagcttcaacgagtcttttgctgatataatagactggatgctagacgttgttttcttctcttatcagcatgtcgcttacaacatattcggcgacagccaagtatattcctaactcttctccatctaggggttttgagagtacgggaggctttgtaagttgtctttttaattcttggaaggcgttctcgcattcctctgtccactcaaactttttattacctcagaggatgttgaagaaaggaacacactaatctgttgattttgaaacgattgctaagtggggctatctgaccagtcaagctttggacttctttcgtctttgttggcaatttcatgtccaggagggcttgtattttctctgaattagcctctatcccctgagcattgacaatgaaactaagaaacttacccgagctaaccccaaaggaacactttaagggattgagtttcatgttgtattttctgaggattttaaagcattcatccagatcctctatgtgcccctagccttcttggatttaacgagcatatcatctacatatacctccatatttcgttcgatctagtctttaaacattttgttttactagtctctagtaggtagctccaacattcttcagaccgaacgacataaccttgtaacagtacagaccaatatctattcgaaaacttgtatgttcttggtctggtggatgcattttgattttattgtaccccaaataggcatccatgaagctcaagatttcatgcccggctgttgcatccacaagttgaacaatatttagaagtggaaaacagtctttggggcacgccttgttgaggtcagtgaaatcaatacatacttcccattttttgttaggcttgggtactagtatgaggttagctacccaagctgggtagaaagcttcaatgatgaacctatttttgcgctgtctctctacctctactttcaatgcttgcgcccattctttgttcagtagtattctcttttgttggatgggacgaaagtttgggtcaatgtttagggcatgagacattatagtgggatcaatactgaccatatcctcatgtgaccaggcaaaaacgtccaggtttactctctgaaatgttattaaagctaattttatttcgagcaataaccctttaccaattttgagtttcctagttaggatatttgggtcgatttccacttcttctagttctcacattggccctacatttgcgtttgattccccaagttggggatccatgtcttcgtccttgtcttgggaaacttcctattgggtcatgccttttcccttgtccgaactctagccggaggtattttccttcttgaccttagttagagcaaggttgtagcattctcgagcaattctttggtttcccctgagacaccccaccccattcttttgttgggaacttgaagcacaagtgtaaaattgatgtaatagcttttaagtcagatcgggtcggtcgtcctaacatgacaataaaagctgatggaacatcaattatcaagaattgtgccatcacagttttgctccttggagcttgtccaacggcgaggggcatgcaaatttgtcccagaggtgcaatgctctggttggagaaaccatatatgagctgggtgtaggggattagatctttaagctggagttccatcttctcataagttgttttaaacaggatgtttgaggaagctccattgtctatcatagtctgtgcaactgacttatctgcaatttgcacttctacaaccaaggggtcattgtgcgggaaatggacgtgactagtatttgcttcagtgaatgttattattggctcccctacccgtggtatttttggttttctctcttccaaagccaagatcgtttgctcgtactgtaaggctctctcgagctttgcctgagtctccagcaagatgtggaaccccaattatgacctgtaaatgcctgtccacttgtggaggcatcaaatggttctagttattgtcttcttgggcagcccttggttttggtcgaccttgacaaacttctataactgcgggttattctttctgatcaaaagctaaatttaccactttaggttattacattccttcgtgtcatggtcgtagtccgcatgaaaatggaaaaacttggatgtatctcttttacttacatccttcttcatgagagatggtttcttgtacgggaccatggactgagttgttgcatagattgtctctaggttgtttgttaggactaagaaggcagtgaattttgaggcattttccctggggtgctattcgatattgctagttaatttgtcttttttttccattaccttgcctattgccgttgtgagacctcttcccatttgaatttgagctgctagggtattatggattctaaatggatgttcctaccgaggtgacacgttgctggcttttttttgtccgacagttccacacgttgaacagcttcttcgagcttcatgaacccatttgcttaatctagaaatccagccattgaccccacggttagcctctttatgtccttccacagttcttcgagtggcttaatgcccctagtattgtggccagccttccttcttcagtcaaccccttaacttttgtagcttcgatcataaacctacttatataagctttgatgggttctcttggcatttgctttactttgactaggtcttctagatgcgagggaagttgacgggaggaggaaaaatgttcatcgaacttcgaggagaaggcattccatgagttagacctccctaggggcaacttgaaataccactgctgggcggcctctacgagtgtggcaggaattagctgcatcagacatcacttctttccccctgtaggtctatttgcatctcaaaatacttcagatgtgataaaggatcttctttccttgtatacattttccaggttggcatcttaaatttaggggtagtttaaggacttcaatctcaggggagaagggtgatccgcgtgctcggtcaagtttgagatcaatgagttttgacccggtcaggccttgtaccatgtttttaagttgatccagttgtgcttgcacaaatggatgaacttgttcagctagttgatcggcttgtctcacattgggatctctttggactggatcctgaatgcggatac

SEQ ID NO: 28804 - DNA, 1772 bp, Cannabis sativa
tgaattaagaggaaccattacacatactttgttaactcgtatagttatcgagaaacaaccaacaaaaaagagctggtcagtgctagttcaaatcaaaatactagtacttttctttaacagcattcacatgttctcacaccttttagacaggtttttattaatcgaatgacctatatggttttaacttattttagatttgtgtgttatttggtggtgaatttacggagttaaatttacaggttttacttctaatgagagttcatcacagaaacttgactagtctcattggatattgcattgaagacaactgtatggggcttatctacgagtacatggctaatggaaacctgaaacaacatctctcaggttcacattttctcattaggcactaaagtctactctcatattatactattttaaatcaacaatacgagacattccttttgaagtccattaaaaaacaagtgaagggatcaaactatatattttaaatattttggtttgcagaaaaaaacacttgtattttaagttgggaggatagactaaaaatcgcagtggatgcagcacaaggttagttgtgtatataaatagtacataatgtgtgtatatataaattttgttgaaactaattgtgtggttgagtttggtgaaaatgacaggcttagagtatctgcaccatggttgtaagcccccaatcatccacagggatgtgaaaactcccaacatcttgttgaatgaaaaattcgaagcaaaacttgctgattttggactctcaagagcttttccaattgaaggtggaactcatgtgtcaactgtagttgctggcactcctggttatcttgatcctgagtaagttctttttgcatgtgaacacataatacttacacttgtgtattagtaattctcatgtatctttaacttatcaatttggtttttgctttttcatgtaaaataggtacttccaatcaaattggttaaacgaaaagagtgatattttcagttttggagtagttctgttagagatcattacaagtcggcctgttcttgcaagagacagtgataatgagaacattcatgtatcacaatgggttgaatttatggttggaaagggagaaattgagagcattgttgatccaaggctacaaggagagttccaagtcaactctgcatggaaatatgtggaaatagctacagcttgtgtaagtctaaattccagtgaaaggccaacaatgactcaagttgtaatggaattgaatgagtgtttgtcattagcaatcgacaaggatgaccctttaccaaaatcgataaatagtctcaacgtggatactgatataaacccttcgccaagataggctttagtgtggagcaactatctatgggtgtcagtcaaattagttttcatttctttgcgcataatttttatttataaggcgaggtaattatgtataattttttgttattatatttggaaaaaacattagtaattacatagtaaaatagtattatgtagtaattactatttttaacaacactttttagtaagtacattataattatggagattttataaaaatactaattttttttagtcattttttatatttttatttttattgtaatattttttttttttacatttttaccgtactaaatttttaaaaatattgtattaaagttttaaagttacaaagatactatgttttagtaaaatataaaaaaacaacttaaaaataactctaaaacaacttaacaaaacaacataaaaataaata

SEQ ID NO: 28805 - DNA, 3648 bp, Cannabis sativa
caatcgatttccacatgtttggtgcgtgatagacggggttctcactgatgtgaatgtcagcggtgttatcacagtacattcgtgcgggagtgattggagtgacaccaaaatctttgaggagtgcattaatccaagtgagttcggaggttgcatttgccatagctctgtatttggcttcagcggaggagcgggagactacttgttgtttctttgatttccatgagatgagggagctgtcgaggaagatgcaaaaaccagagacggatcgtcgtgtcttggcaactgccccaattagcatcagcaaaaaaggacaactgaacattggctgaagagaggtttgtttcagcataagctgtgagtttgggactggtttttgcaagaaaaataagcccttgactgggggtctttttgagatattgtagtatgcgctgtgtggcatggaatgagggactcgtggagacgagagaaattgacttaggtggttaaccgcataggaaatatcaggcctagtgatggtgagatatattaatttgccaatgaggctgcggtaagtagtgggatctttgagcaactcacctttgtctttgcttagctttaggtttgtttccattggtgtggaaacaggtttagcacccaagtaacccgtgtcttttagtaattgtagtgtaaaaggtctttgggagattgatatgccttgactagttctaccgatttcaagaccaaggaagaaccgaagaatgccaaggttcttgagtttaaatttcttgtccaaggattcggtaaatatggctatgttggatgcattgttgctagcaacaatgatatcatcaacatatatcaaaatatccaagaaatcagttgctgtgtgtttgataaacaacgagttatcagacatggattgagaaaaaccatcttgaagcagggtggtgctaagtttagagtaccattgccgggatgcttgtttgaggccatagatacttttttgaagtttgcatactgtgtttggcggagctttatagccagggggaattttcatgtaaacttcttcatggaggtccccatggagaaaggcattgttgatgtccaattggtggacatgccaattatacatggcagcaagagctaaaaatatttttagagtattgaacttggcaacaggggcaaaggtttgagaaaaatcgatgccttgtctttgatttaagcctttggcaacgagacgggctttaaaccgttcaacatctccatgttcgttgtacttaactttgtaaacccacttgcaaccaattgttttttggcccggtgggagtttggtaataattcaagtgtgatttttttctaaggcttgggtttcattgtccatagcctcgagccaatgctgaaataaggaagcttcagcatagtttttggtctcagtttgagtgtaggcagccagaacagtagctcgaaaaatagggtgaagttttagataagagagatatgtggatgagctgtggtagatgcatgacatacataatcgagtaagtgtgttggttttttgcttgttcttccactaaaggtagtgtgattgttggaatggttggatgcaatggtattattgttgttgctgtgatttataacagcagcaggttgtgggatggcaacattaggtggctggggtgtatgagcatcctgttgattagcagtattgctggtgagctcacttacatcaagaagttgctggtgtgtaggagtaatgtgctgatgttcagcttgagatagctggtttacatcaggaagttgttgatgcagatcatgggattggtgatctgtatcgttattttttgaagtggcagcaggaacttgctgagtagtagtgatatgctgattttcagcatgaactggtggagttgcagcaggtatttgttgaggtgcaacgtgacattgtatacctgtatggtgattatttgagtgtacagcctgaagttgctgatggacagcaggaggaggctggtttgtagcggggatttgagtccctttttgttgagttattggtttgaagcaaggtaaaattgcttggtttaggcagctgtcaatctcagagtgagtattgagagttgaaaagggaaatatgtgttcataaaacacaacatcgcaagaggtgtagatttgtttggactcgatatcaaggagtaaatatgctttcattcccgaaggatatccaaggaatatagatgctctactacgaggggaaaacttgtgtcgtttggatgtgagagtagatctataggcaaggcatccaaaggaccttaagtggtcatatagaggtggtttattgtgtagtaattcaaaggaagtggtgcctttgaaaagagcagatggggttctattgaggagataagtggctgtctggataagataaggccagtagattaagggaaggtgagattgaaagcccaaggctcttgcaacattgaggatatgttgatgtttgcgttcaaccactgaattttgttgaggtctttcaacacaagagtggtagtgtgtgattcctttagaggcaaaaaggaatgcatatttagttctttggcattatcggaccgtacagctttaatattatgggaaaattgtgtacaaaccatgttataaaacgatggtatgatatgttgaacctcgaattttgctttgagcatataagtctaagtaaatcttgatttgtcatcaacaatggtaagaaagaatttatatccttctgtactaattatatgaaaggggccccatatgtccatatgaactaagtcaaaaatgttatttgcaaagttgtgatttgcaacaaaggatagttttttttgctttgccaatgacatatatgacagtaagtagaagaggaaatagtagaaggggaaccaatctttttattgataacattggaaatgtacatagatgggtgaccaaggcgattgtgccaatggtcaacactagttttattaaatggaaaaaagcttggagaagcagcagcaaaggatgtcttctgttgcagaagatagagttttccatgctttttagctattccaatctccacattctgagaaggatcctggattacacaagtattattgtcaagatttattgtaaaagcagtgctgtccaatagttcatttatggataaaagattgattttaaaactgggaacaaagaggacattatgtaaagtcagagaagagtttatcttgacagtacctatgttttccacaggaactttatggcgagtgggtaggataacatctttgggatatgtagtgttaaaaaaagaactaaagcaagatttgtgtgcacacatatggtgtgttgcaccagtgtcgataatccaagtaaaatcagagagaaaggaatttttactagccaaattggaggcagcagcaggttgttggtccgattccacgtgagcagtggtgtttgtgagctgctgacttaggagggagatcaattgctgacattgagcagtgatatcagttgggttggcaggagtataaccattggtggaagcagaggcttggtgagctttagctttgcctttgtcttgcttctttttatctccatatccgggtgggaagccatgaaggaagaagcatttatcaaccaaatgcccaggttttccacagtttgaacaag

SEQ ID NO: 28806 - DNA, 2319 bp, Cannabis sativa
  modified_base (149)..(153): a, c, t, g, unknown or other
atttacggtttgggttgctctagtggtttctccggtagtttctatgtgagttgctatacggattttggttacgatttaagttgctcagttagttgctataggggttttgtgtgaaattttgtaaaaatacaaaaaaaactgttttgaannnnnaaaataaaaaaaaaaaaaatactcatttttttaatacgggacttagaaaatatataactaattataatttaaaggttattcttatttatatacggttcaaattgggatttaatttttttttttatagcaaattagaaattatgcttgaatagagtattcttatataaaagttctattctacatgctgtaaaattcttccacttgaaaaggaaactatttgagaagcaacaatgccggagtatcttgaggataaataccctagaacaaaatcctattgtaaggatgagtgagtaagcacttatgaaagagtaataagctgcataaaatatgaaaattattaaataaaatattacatgaagaggcatattgattattcttaacaactttaatacttagcaaaagttgttaagctattttcataatggcaacaaagatgaaggaaaaaataaaacaagatgaaaattaacaaattgcaattttgaatggtttattagtgaagagtgaattatgagtacaaacttatgaggttctaatattaattaaggcctaaaagaattctcaaattacattgaaaattagtagaaatgtttaaggatgcctttccccttaagacatagattgccctatattattagttctaatgttcaatactaagcttattgtgtgatttgatttcttaaattaaaagttacatagttcttgatgtacagaatgaaattttactttggtccactttaaaagattttagttctcatagaaattataaatggttagcaataaaagtaagtttcccgcctttttgtttttcataatttcattatggagaaatacgaaactagtaatgaatttcttgttttaaaatttcttctaaaaagtttaaaatgtaaatgtgaagaagagatatactggatgaacgaggaagacgacgtgacgtatctattttttttttgtctaaattcaattgatgaaatgagaaaacaaaagaatcggttatcttaaagtctttctgtttttcataatttcattatggaggaagacgaagctagtaatgaatttcttgtttcaaaatttctaccaaaaaatttaaatggtaaatgtgaagaggagatatactggatgaaagagaaaggagacatatctgtttttcgtctcaattcacttgatgaaatgaaaaaaaaaaaagaatcagttgtcttaaagtctttctgtttttcataatttcattatggaagaagacgaagctagcaatgaatttcttgtttcaaaatttcttccaaacaattaaaaatgtaaatctgtaaaagaagatatactggatgaacgaggaaggcgacgtatctgtttttcgtctcaaatcacttgatgaaatgaaaaaaaaatccgttgtcgtaaagcctttctgtttttcataaagtcattatagagaaagacgaagctagcaatgaattttcttgtttcaaaattttttctaaaaattttgaagtgtaaatgtgaagaggagatatactagatgaacgaggaaggcgacgtacctatttttcgtctcaattcactcgatgaaatgaaaaaaaaaaagaatcggttgtcttaaagtctttctgtttttcataattatggaggaagacgaagctaacaatgaatttcttgtttcaaaatttcttctaaaaaatttaaaaattaaatctgaagaggagataaactggatgaatgaggaaggtgatgtatttatttttcgtctcaattcacttgatgaaatgaaaaaaaaaaaaaaactggttgtcgtaaagtctttctgtttttcataaattcattataggggaagaggaagctagcaatgaatttcttgtttcaaactttcttctaaaaaatttgaagtgtaaatgtgaagaagagatatactagatgaacgaggaatgcgacatatttatttttcgtctcaattcacttgatgaaatgaaaaaaaaaactggttgtcttaaagtctttctatttttcataatttcattatggaggaagacgaagctagcaatgaattttttgtttaaaaatttcttccaaacaaatttaaaatataaatgtaaagaggagatatactggatgaacgaggaagatgacgtatctatttttcgtctcaattcacttgatgaaatgaaaaagaaataatcg

SEQ ID NO: 28807 - DNA, 3151 bp, Cannabis sativa
  modified_base (677)..(679): a, c, t, g, unknown or other
tttaggggaaaaattttaagtatatgtaagcataaaaaaatcaaatttctctttaaaattaacctattaatttaaaatagttttaaattatgaattaaagagttgattccgatttaatgattatgacaaaaaatttatttataaattgaggtttttattataaataaattaatcataattattaaagtggttaacatgtattgattaataaaacaaacacattaacctaaaatagtgagtgggagaaggagtacatgtcaatgtaacctacgaaatctattattgttcaacactgaaggagtataaactggcctcgagatggcttagattcattcccctaaggaagagatgtgtctatactgttgttcaaggttgatctattgactaagataaaagctgaagtgatgtattttagtgcgatactgatccttaaggtgtcgctactaagttaagtcatgaaatctgatatattgggttatagtcacaaagtacaacttagttttatggtggttagttgttaatttagtcaaaaagcagtactttatagaaaaagaaatatgaaatatttaagtttcaaaataataaagatgagaatcgtctcatagactcaatgagattgactcgatactgatcctatggcagtgatcaattgtcaaagagttttatcgtggaataannnaacaagattttatgtattttacttatatgcactcatgcattacatttatagtagttctgaaatgatatttattattctagtataatcattatgtcacttaatttatttcagtcatgtttaccatgctaaatcccttactactttactagcatttgaaaaactgaatggtgataacttttataaatagaaattgaatctaaatttaatgctagtttgtgagaactacaaatttatcctaactgaggatcgtcttgaggagcccgctgccaatactccaaaaaatatttgggacatatattatacttggtaacaatctaacaataaggccaaatatttaatgcttgtaagcatgaatgatgtgatgtgtaagacgtatgaagatatggagaatgtatctcaaataatgaattctctacaagccatatttgggaagcagtctaatcaaacaagacatgatactgctctagctacatgaattgtaagatgaagaagggtgtccctgttagaagtcatgtattggacatggttaagctaatgcatgaggtagagacacacgagaccatcattgacgagatgactcaagtgagtatgatccttgagctgctatctccttgcttcaaggctttcaccacaaactatgtgatgaacaagctagagttcaacatgactcaattattgaacgagttgaccgtgtttaaaaatcttaacaaggataaatctaaggaaggtgaatcaaacattgttgaaaaaaaatctagctctccttcttcgtctgacaagattagaaagtggaacagtaaggacaacaacggttgcgagcccaaaggtaagaagtcacccaaagctaagaagaacaaagtcagccccaagtccaaggacaaaaaggcaaaagggaagtgttattattgtggcgtaatgagacactgaaagagaaactgtaacaagtatttcttcgagcttaagaaagataaatgcgatttatttgttcttgaagctaacttagtggaggatgataaatccttatggattgttgattctagagccactaatcacatttgttcttctatagatacttgaatcgtcaagggagttggccaatagggaggtgactatgcgcgtggggaatggagcacaagtatttatcaagggtgttggcagagtctgtttgaaatttaataataattttttgttattgaaaaatatttattttattcttgaatgtaccatgaacattttttctttatctcttttgcatgaaaaaattttcaatattggttttatcaataatgagattattagtttcaagaatggtacacctatttgttctgcaaaacagagtaaggtgagcaattaattttaaatatgaattatttagagtagcattgtctcaacaaaataagaggcaaaaggtttttgatgatgatgaaacgtatctatggaatctacgtttaggccatctagacaaaataaaccagtcaacaaaggatgatcctttgagagagctaaaagttagaactcttctggtgtgcaaatcatgtctagaaggcaagatggctacaaacctttttctgtaaaaggcaatagagccaaagaacaacttgagctaattcacattgatgtatttggacctattaatattcaagcttaaggtggttatgaatacttcgtcacttttattgacaattattcaagatacagtcatacttacctaatggctaagaagtctgaaactttcaaaaaatttaaagacttcaaagctacgagtgacaagcaattaggtaaatcattgaagacacttcgatcaaatcatggtggagagtatttggattcagaattcaaagactatttgctagaagaatggatcttgtcccaatttacagcacctggaacacctcagaagaatggtattgtagagagaagaaaatggaccttattagacatggtcaaatctatgatgtgctactcatctctgcagctactaaacttgtggggatatgcacttctagcggctacctagattttgaatgtagtaccctcaaagagcataagcaatactttaatagaattatagaatgggacaaaacccaatttgaaagatttccgtatttagggttgtcctgctcatgttcttaaaccgaagactaggaaactggctcctagatctgaactgtgtatgtttgtaggatattcagatgaaactcaaggtgcttatttctacaatcatcaagacaacaaagtatttgtatcgataaatgctatttttcttgaacgtgactatataaaaagtcacaagcaacgcagtcaagtggttattgaggaaatcagaattaatcagatttctaaaccaacaatttctgcatcattagttgaacaaccgacatcggtcaccactgttgcccctgatttttcccaatatacgtggaccaaccgaataaggacacgtggatcaagcaatgtacaatccaaaatatt

SEQ ID NO: 28808 - DNA, 2272 bp, Cannabis sativa
agcagttgagttatgctcaaaagggtacaatcctaccaacttgaacatttccatagttacaatctttagggcatacttctcgactgctggcatggctgtcaaaactgtcgcatgttgtatcatctcctcagttgggtttggtctgagatatgtacatgtatggttgaaagcacggtgggtagtgtccatgggggtcgtaaaaaagtaggatgatcaatgtttttcttcgcaagatgtgctactaataccagagacatacggttgacccgttctcggttcatgaagtagaagtttccgagtggttcgtagatgggaaagtctggaaggaaaggaggtaatgaatttcgtgaggagagggtcttccccatcctttctggtgatataggatgaacaaagcagataaagccaggtacccatgaggagcaatttgaactggggaaacgtcaaagtagttcgccacatctcaaaagtaatcattgtgcggcaaggtcgccctagcctcaatgtggtattttgtccaggcacatgaattatctgggatagagccagcactgtgacctttctttgccaaaactatcttcaccccctcaccaagagggtaccgaaaggggtaaccctgcacatcggacaactcgaaattgcggtttggacgtttaattgagatgttgggatcccaagtactagggtcatacgatgctttcatctctaaggtggtcactatgtgttgagccatcacctcttgttgtgtccacttcctttgtctcttagtcaccatgtgttgagccatcgcctcttgttgagttcgcttcctttgagtaagggggatttggaggggcaatatgagcttcgatttcctttgggccgttttgggaggaaggattagccatttctgcaatagcaagaggggtggagcactctccttcgtgtaggaagtataaggcccaacatggaaggattttttttcaatctcttcactctatgaataggataggcagtctcgtgagacccgctagatggctcactaatacctaaaggactaagtgaagacaacgaatcagatgaatttggaggtgatcgatagtctgagtatagacgagctaggaggtcgtcgtcaatgtggttgtcgcatccgtagtggtcacaagcatacatctacaaacacgagtagggaaagtgagcatacaaacatgaaatgaggtaaccaaaaataaataaaaaatactaaatgaaattcacttgataaagtatttaggctagttaattaaaataaattggataaaaactaattcaattacaaaaattaggtgcgaactaaatttgattaaatcaaattggaaaaatttaattttgttaaattgaattgagacaaatctagtttaatttaaccaagctaaatgaatttaactaaaagaagtattttattttttggtttattttagatatatcacaatttcactttaaaaatttggaagcattagttttttcttttttataatgaatccttactatatacataaaaaaaaatgtgtgtgtgctcgagcttctcagatgacctcttttgtctacaaaaagaagagagttgattggctccaacaaaagtgtcgaatgacaccaaaggagtcaattggcatggctccataagctcctaaggcaaatgaggtattttggtcaaaaggggacctaattggcataattttttattttatttaaaaaaagaaaaaaaatacaaaaagacatgagcaggtgagtgaggatatatgtttatgcatataacatatacatatatgtatgcataagagaactcatcaattcctacttttttttttttttctacttttagtctactctacttttgtctttactccattaagcctaaatagccacaaacacattttttttcctcaattttaattttttttttggatcaaactagggacttcaaatgttcatcactatcatcatcatgttcttcattttttctcaaaaagtttatccaaattacaccaaatatataaacctctatcatttctaaaataaagagtggattaagagaactcatagcctacattagtaagttccactcatagattccaaaaattacaaactaaatttcacaacattagcaaaaagtaaatatgtaaaaagagggttttatgaaaaagtttaaagaatacttatattcatgctttctatgtatttcaacatgggaaatagaattgaatagtaaatgtgtggaaataacttactcaatagtgatgttcaagcttgaatc

SEQ ID NO: 28809 - DNA, 3003 bp, Cannabis sativa
ttggttgatgttcttttgaagttttataagagtgaagatcatcataagttcacattaactagggacaatcttaaagcagtcatttttgtaagttctctatatatacatagatattattatcaatctttgtgaaatttaattaacattcttaattggtgacaaaattttcagaacatatttggagcggggagtgacacatcagcaacaactatagactgggctatggcagaactgatgagaaatccaagagtaatgaaaaaagctcaagatgaggttagacaagtctttcgcgaaaaaggattagtggatgaatcttcaatcaatgagatgaaatacttaaaatcagttgttaaagaaactctaaggttgcatcctccagctgccttgttaattccaagagaaagtagagaaaagtgtgagattaatggttatgaaatacctacaaaaactcggataattgtaaatgcatgggcaattggaagagatcctaaatattggattgaacttgagagttttatgccagagagatttgttgatagctctattgatttcaagggaaataattttgagtatatcccatttggtgctggaaggagaatatgtcctggtatatcatttgctctcattaatgttgagtttcctctagcatttttgctataccattttgattggaacctccccaatggaatgaaaaatgaacatttggacatgacagagaaatttggtattacaatctgtagaaaaaaggatttgtacgtaattccttccaagtatgatccaccttctatggtcaaagcacagaagatataaagtaaagtagtttgccctaggttggtttttcttcttttttattgtgttgaactatattacttacacttttacatgttgactgaaataaaccaaaaagcatattggagatctagtaactttgtaatattaagtaaatgatctgtatcagttgaaataattatatcaataaatatttactaaataaaagtaatattacatacttttttttgaaatttttacatcaaaaatattaaatggtttttttattatacatatacctgcgcacacgacctgagttactcttttacactgtcacactctcatgccagagtactatagacctggttgacacctatcaatccaatctctctctcttttttccttccttttttgttttctttcaattttattttttaaaattttttccataaccgatctccttccctccccaagatcaaaaccaaccactacccaaagattttttgtcattttcttttctaacttcccttaaccgattgtcttctatttctttgggtctaaacttatatatattcatggctatttactcgatcatcattgtccccttctcaattgcaattttttttttgaaattaggtgttaaatctgtagcaaataagttcaaaggatgtcctgttgtagaagatgatgactccgactttactgcgctagtattgaaataacgagatcgtgggcgtgcgaagaagaaatctaaagtgtccatgcctcaaaaagtttccccaacttctgagaataggaaagggaaggttgaagttgatcatgggttggaggtttgtttttaatttttcaccaactttgattttttttttcatttaattttattttttggtttgtgtatattgttttgatttctttttagggtttatattatttagttattttaatttttgttgtaatatccttttttgttgttgttttttattgtaattattatgttcctttcaattggtttatgttttggttattatgttctttttttttttttttttcagattttagattttagtgttcttatatattttgttgtttatattaagtttgtttccatatatgtttatgggtttgtctttttgttttatacattgtgtgactttatttttataattattctgtagtttttttttacagttttaaaagtataattttattgacattattgtttattcttaccatattcctctttagattcttcacatattttctgcttatgttctctatggaatccatgcatatctataatagcaaggactaaatataagaattaccttagaacttgatcttgaacgtcctgaattggcctatatatttgtggtggggggttactcttttaggttttgtgttcatctatgtttatgtttatgtatttctttctagttttgttatatgtgactctttccatctgtatatgtagtattatttttttttttattttttatatttttttttaagttttgaaactttaaatgtttaccccttcatgattttatttctctttttttgtatgcaggattacaaatttagtccttgagattattacatatcaaagtgtgttactacatacacttattctgttattcttaacataaaaaatactatttatggtaatttattaaagatgttccgagatacacagttcggtcaaattttgaacattccagagtacaaattccatccccaaattgctcacatccttttattaaattgaaggaggttaattaatcaccccaatccgaaagaattttgggaaaaagttattgcccgttatatattcgatttagtgaaggggactcctatttgatatctggtttggaatggtttggagattgtaataattttttatttagccaagaatcaaaccagtttgtcaatatatgctttcttggaactaaaactattgactgttgtcaattaataacattttctttatggggtcaagccaaatgacaaataattcataataaaaaaagaaatgttagggctttcaatttcaattcgatctattgattatggtctaatatgattatcttcctattacaaatttctatacaatagcaggtttactaagataatttatagtcttctcagatatataaacctcaattacatgtaaacttgctatactctcgtgataaattaaacatgcaacaggcattaaacacagaaaccctataagct

SEQ ID NO: 28810 - DNA, 2440 bp, Cannabis sativa
tttagggtaccaaatatgtattatttcaaaatataaggtactaaataagtattattgaaaacacaagatatcaaatgtgttttaagagaaaagatagggtatattcctttttttataaaagtttattccaaaaatgtataatttcctataaaaggatcttttattttcttcagatcattcctctacatattataaatttaaatatttatattccaatttatcgttttttaattaattattttatgtttgtttactaatttctaattttatttaataaaatatgcttaaatataatcataatttaacgatgtaaaggagagtagtaatgtcaaaaaaattaaatattttaaaaactatttgcatattgcaatggcacaaaccaagtttacccaccaaagagattgcgtgttaagagtttgaaaattattttaacatttttttttctatcaaatttacaaaatccaatacaatgcaatctatacaaagtgtgattaattttatacctatgaactaatgcaaattataaattaaattgaaatgtcatattggatccacatttcatatactatgccaaaattgcatatatatatatatcaactttattaacaaaacatttaattaaacttcaactagacatgaattgaaataatgataaggaaacaaaaatgttataaatcataagagaagatcatgaagtttattgataaatccatcaatataagaatcttcaagtccttcacttaacaaaaactctctccatttcttatgattttctctaatttccttacccaattggctatcttccttcattacagcctccacagccttaaaaacaccttctttagtaaataaaccatcttcattccctttctcaacttcaacaccaactttaagatcattactcataattctagcattcacaatctgatctccaacatttggtaacaaaacaagttgacactcattcaccataccctccatcaaagatcccgagccacaatgagtcacgaaacacccaactgagtcatggctcagtatcaacggttgttgaacccaacccccacaaaccaaccctctattcccaactctttgggtaaatccatctggcaatgctgactccactgtttcgaacccaattggggtttttagtgctaccagaaacggtcgaccggttagctcaagaccaagaaggagttgttgaaattgatctattttcataacacactcacttccaaacgcacagtacaccacacttcccttctcgaaactcgagagaaacgtagctatttcgccttccaatactgaatttggtgggactggaaccacaggaccagccaaaaggactattttgccccattcttgggccacgtaatcagagtaaacaccttccatctctttagaagtgttgtaagcaatcgcatcactatttttgattgtgagtttttgtcgtttcatgaatgtaattccgcttccaaattctaatgatgataccttagccaagtcccgagcttcatgagctcggaacttaataacagatgacgaaggaaaacccaatgggggttccaacaaatcatcagcccgatcacattcgcttcccttacgacacaggtacccgaatgtggccgggctaatggtacaaaaatggagggacttgatcccgaaacgacaagctaattcaggtacccaataagcaaaatcaaagaagatgaattggggtttgagtttttctagagaagcttcgagttggggacgagtgagatccatggcggtcatgaggaagttaaggagagggaatgggacgtcggcggtggtttcggccccgggagggaggcctatcacgtgaggcacgtggatagggatgaaggtaatgagatttgggtatagattaaacgacaacaatttggactgcgttttgattggtataaagaatgaaattttgtgacctcttttggctaatttgttggataaatgaagatatgatgtgagatgtcccatagcaaaccatggatacatagctatgtgaagcttcttcttctcatcactaatttcctccattaatgatcccattttcattttcttcttcaatcaattaatcttactttattttcaatttgctatttatatatatatataatataatttaataattacaaaattaaaattaaagagaaaaaactaattaagaagggaagtacgtagtattgttattcaaccgcagtattattcgaatatatttgttattttgtaacaaactaataagctatttttttcaaatgaccttttattgaggagcacaatcaaaattaattctgaatttttctttttattattctcattactaataaattaatgcaccatttttattatatccatctcatggttcaaaaactcatatagtaaagaatattatttaagtctttgttagaatctacatattatt

SEQ ID NO: 28811 - DNA, 4143 bp, Cannabis sativa
aagttatttttttctttcaaatttacaatagtaactagttgttattatgtcaaaattttaaaaaacaataagtgatataatctttaattttaaaatatatatttaattaattattattatttcaaagcaaggataatcccaaaatagagctttcagaaacttattctatctcaaggatattttcgttttcttttgatcccacaaatttactatcatcatattaggaaaatagaagaatttattatataattcttacaattatttgtgctaatttcttttataaaaaaatgtatataaaataacaaagggtggtaaaattaaaaaaactagtagattagttacacaaaactataataagttgaacaattagtataaaatgtttttaccatttttattacaatttaggaggagagtccaatataaattaagagaaaatcttatgcaaaagtttttttttttttaaataaaagggtactcatcataaattaaaaagcgattagacctcacggtcgttacaaaataggttttccggtaatgagggaatcggaatagagccgaacatctggtgggtgaaagctcacttagccacaatatggacaacaaaattacaagtcttaatattatgcaaaagttcatatataattcttctacctctttccttgcatagtcttcagactcataatgataatggtttatttactataaatgatcaattgaaaaaaaaaaatccttattatatggcttgtttagtaacaagtcttgttcttaagattttcctcaagatttttcctgaagggctttttgggatttcttctatgaaaaataccttactaattctcttgtaaaataccacctgaaatatttccacaaaattaaaccaatgtgaaataaaataaaaaatgttaataataattatttgttatactattttaaagagtgaaaatagaattaatgaatatttggaaaaagaataatgcaacagatatgttaataaaatctaacaattaaaatttttgagcattttaaatggattttttttatctttcataattgttgggcaatataatattgaaatgttggtcatgcaagatatatatctatgattaattaatgtttctattggcacccatatttgtataaaagagaattaaaatatttatataaaaaaaattgatatctatagcttatttatacttgtatttgtgtaaatttacaataaaagtatgattggaaacaaataaaaattattatgaaaatatgcaaggagataaaaaaaaaagtgggatgataattgatgtgtgtgtggtaatgatataacctttcaactactaaaataagattaatcaatatgaattaaatgcattaattttattagataactataattgatgtgtttattattaagtcatttaatctataaattttgtactaaaaattaattttacctgttttgagatgtattgtttgatatcatcctcagtgatttttgaaccatttgatgttacaacaaatgcaacaggaacttctcctgcagcttcatctttcattctgaattatcataccaaacattaatcgtcataatatttttatatactagaatacgtaatgttcgaaggaatgaaaaacataagaatatgaatgagaacaaaaatatcgttattagccaaaagagagtacttacggaacaacagcagcatcagaaatgttgggatgggcaatgagcagggactcgagctcggctggggctacttgaaagcctttgtatttgatgagttcctttaatcgatcgacaatgaagagttcatcgtcgtcgtcaacaaaccctatgtcaccggtgtggagccatcctttttcatctatagtagcctttgtggcctcgacatcattcaagtaacctgaattttacagtccttttcaatatcttatcaacataaaatgcacacaatttttctttttcaccaaaataattagttaaagaaatatgattaaatactaatattcaaaattctataatagaaacatcacttttctctttattgacataattttagcacttataaaaattatgattttgtaattatgagaggtactctatttattttcgattttattttttgaataatttataatattaaaaacgggattcaactattcagttgtactggtgcaaaaagaaacaagcaagcgtaaaactgaatgtttaaattttatttttgacattataaattatttaaaaaataaaaaaacgaatagaatttctgttataactataatattaactatcaaataaaaaaattagattataaatttttcaaaataaccacaacataaatataatatccttactaataaaaacaaaaacaacgtccgcactataatcatgtccaatgattataatatgagatattgtcatgttaaacaattttgtatgtatgcacatacaaattatatacattaatttatttcgatgtaaaaaataattcaactaatgatgtatatttaggaaaagtagattgttataagatctcaagcataaccgtggctataaatatgtgtgtatcgtgctagttcggtctatttttttcgtattttttaaaatacgagtagttccatgtcggaccataaaaaaatataaatcgtgtcgtatcgtgccataaaaaatatgggtcgcgtcgtacaataattttatagggtcggcctaatacgacccgcaagtccaataattaattgtaccgtgctcgaatttgtatagtgctttatttgggccgatccatatttttgaaatagaccaacctatttattatacggaaattcgtgctctatatttttgtatttatattaccattgatgagctaaatacaaaaatatatgtgtattttattattttagttacttttatatttttttttcaataatagttacacacaatcatataaaagataattataattattatagtttgaaatattactatcataatatttttcattgttatcattatcaaattattggacaatttaatatgttgcttcaaactaatctattcatgcttacgtgtcgtgctatcgggcgtgtcgggccatatcgtgcttaaactcatattttttcgtgtggtagcatacctaagcccatattttttcgcgacgtgccttgtcgtgcctaaacacatattttttcgtgtcgggttgttttcgggctcgaatttcgtatcatgtcaaaaaatttggtagcataactatgatcctaaagtggtgatgaccttacgaaaaagtccaatattacatgctctaaagtcaactgtatatatatatctccaactccgagaatggattctcgccctgagaccttttagtataaatctcatcaaaattagggatcgaaccaataagctctcagggccgaccctaaggtgaggtaagcaaggtgtgtgccttaggcactccaagtcccgaaattataaaaaaaaaaatattaaataataagaaaatacatcaaaatagtgatagtatagtaggagagaatattactttagagtaggaggttctggaactctaagattcttggaaaacataaagtgttttggtggtgcatccttttggatgctctgcttgtgaaaaccattgtggctagacagattcaggaggatatttatgccctctatgtgagttgaggagtgaaaccttagaacactttttcttatcatgcggctcggcatactatttttggcactcatctccttggggtttgattccaaatgtgaacaatgtaggcaggtgtgttgggaatgggttcaatttatttggggcctcgattggcttggtgtcagtattaaacgggacattcctttatgcctcggtggtggttgacaccatttcaaaggctaggaatgaaaaggttcacaaccaaattgttcatgacatttcacaccatactgatgttattgttgcctccttcagctagtgtcattgttcgtgattgggaccctcctccgattgattggtttaaaattaattgtgatgttgcagtggggcaggactatatgatagttgttgcggtggctcgtaaccacaataataaatttttttggactttttctaaatctctattgtttgtagatcttttgtgcgaagaggcggcaacttg

SEQ ID NO: 28812 - DNA, 2337 bp, Cannabis sativa
  modified_base (1909)..(1922): a, c, t, g, unknown or other
tttaggacacaaaacccaacagatctcctctacatttttttcattatccatattactagacaatttatactgcacaaagaaagacaaaaacaataattagcataataaatatatgtagttcattttttaaaacatagtaattctaacacaaaataaatatatatgtcataatcaatctataccaacaaaacatagtaattccatgatcaaaaacacatttttattgttccaagtcaagcaattaatcaattattatttggacattttagcttaatttttctcttggtttgaaatacttagtattttcaaaatgttatttttatttattctaatttttttgtttataaagaatttattgtatttattttcaaatttgaaatgtttttttttttggtaattcaataaatataaaacttgtattattcatcggttacacatgtatgaaaaataaacaccaatgctaatatttttggtaattcaataagttttttttctgatcatccctaggaactgccttttttttttcaaccgaagattaaaaatctagttaaatgaagttgtaatttcaggctatactgcagaaaagagagtccagaaagttctaagctggtaaaagccaatgcaaacagacaggtacaattacaagcaaaccatgcaaattatgtcaagcaaggaaccttaaaaattaaaattgtgatgtatcgagcgattttgattattgcataatggtattgctatatattgccaattgggatttggcaacttttctaactaaaatgtagctatgccttgaaatgaaataacttcccacagaactcattttaatatccattgccaccaatagacaatgcaacatagaattatgctgatcattactttaaattttgtcttacacctaaccaattttatcaatgagttgaaacccagaaacaacacttgatttgagtaatctggtgctaagacaccaacctctttttttctttttaaattagagtatgcattgctcttttcttgacaatgacataaaacaaatcaaagttgatacaatataatacaagtatagtttgttggaatatgatacaatatttgtttaatgtatatatatatattccatgtaacagtagttactgagagaaaaagaaaacaaatgatgtaaaagtaaaataatatactaagaacaacacacacttaatacagacattgttaattttttcccagagaagaaggtctattagttgtctaacacaataatgaaaataaaaactgacactttcttctgcttagcactataacattatttcaagggattattgaagaccttgtgtacatatatagagagagtgagagtcatgatgagctaaaatagaggagtctttgggttttgaaaagagagactaaattaattaagtagtgctgagtgtacacccatatgacataattaattaaatcccattttatgatacgacatgtagggtcgattgctcataattttgtgatatttttagtacaactaatcttggctcttcaagctttgtcgaccacttatgtcaacttagcattgcattctgtaatatctgctaattcataagggtatttttgtaatttttttaccgctgagagtatttttttgtcattttacatatttatgggtttaaatatgtatgagattttcgtgatgatataatagttgattttcttgacatgtgcataatgcctaatatatatatatctggatattaaatgactatgtgatttatttgattttggtacatattattattggtgtggaaataataataataatgacatgtgttcacttataatatagtataataatatttgtaattattattggtaaatattattatagtggtaaatgatgtatttaacacacttattattattattnnnnnnnnnnnnnntattattattattattattctgataatgtatatatatacattacgtaatgtatatatgataccaatacctataataactgatttatatagaatgagaatcgttccttttcggttcaaggtgatagctttgctcgggtttaaacacgttagagattggttattgggttcaaaattcgtacgtcaaaagagtaaaacaaagagagtataaggttatacgatatattgagtttttttttttgttgatggagtggattgcaacctggatgaaagtgtgggtttgaggtcacttatgtacgatataaggaagccttttaccgttgtataagggtcggtggttactgtttcgagtttcaccattattgaagcttcgaaggtatgacttggaacggacatgaattcgaacgtgtttaagctt

SEQ ID NO: 28813 - DNA, 1015 bp, Cannabis sativa
tggattttcattttggggctgcggagacttgcccggaaaagtctcccatgtcgccatgagggtactggcttggaattgtcgcgggctcgggaatgccgtggcagttcgacagctgacggcgatcttacgccggtcaaatcccgaagttataatcttatctgaaacacggttggcagaggacaagtttgttactcttatgcataagctacactttattaaccttacctatgttccgcctgttggtcattcgggggggttcggtattgggtggaagatgggggtgtcatgtacaatccatgagcaagataaaaattggatttctggtacgattgaatccgatcctcctggaacaaagtggaacctgctgggtatctacggtccaccaactctgaatggaaaggaagctttttggactcgagttgcagagttttgtgttagatgtcaatcccccaccttactcttaggggatttaaatggtactctagcagataatgaaagcatcaattataccaatcatggtaattctgctagatactcttttgatcttagaagaatggtggcgcaaaccggacttgttgacttgggctgtatgaatggaaagttcacttggtttcagagatgtgcgggctcaatcggtggaacttcggtaaagcgagcgaggctggacagggctcttgcatctgtggattggagactgctcttcccaaacgcagtggttgagtgcatgacggtgagcacctccgaccacaaaccgattctccttaatacggatgggggtgcgcgatgtacgaaagctcagtttaaatatgaattgatgtggggacgggatccaaggtgttattgggtggttcgtaatgcttggaggaaccaacttcatctcaatccaatgataaatatgtatcgaaaactgaagaaaaccaaggagtatctgcaacgatggaataaaactcacttcaggaaaattcagcagcaagtaatggaggcgcgatccgatgttgaaaaagctgagtctcca

SEQ ID NO: 28814 - DNA, 2614 bp, Cannabis sativa
tattaatattgtctaaagagagtaaaattggtaattattggcggacgtagaaactcaaatttgggaactagttttcttatttccccgagagtgagttgagggtagagactgaaagaggtgagggtgagtgagatgttgaggacttggttggcatggacgaccatcgggttcgcggtctcagccgcgataatttcccaattcgtttggtaagatcttattttttattgattatttgtctaagattattattgtaaatatttttgtaattatgtatattaatgtaaaaattccttttaaaataatatagtgtaatttcttctaagcaattctcttctcaaaggcccaaaggcacacatggcccaaactatctcctctccagcgtaccatgtgttgatgccctagcgcatgctgcatcttatccccttgcatcaccaatcaaatgagttgcctcccatgtgatccaaagcaacaagctacaaaagaaattataacaatctacagcttaacttaaattgatgatgaaataattgatgtattcagattgttaataaggtgaacattaatgagtaatacttttttaaaaaaaaaaaatatattaattttaattaaaataattttcatataataaatgctgagtcataatcgacatgtgtacccaaaccgatgttttttgtttatgtaataaatttaaaaaattaaataataaactattcctatatggtttttgaaagtaaaggtggtaaggaatgtgaggaataaccagctctatataaaggtgttatgctttgattatttgtataataaacataaaatgcctttaagtgcatcatctatattatatatcagcagccactactaatggaaaataacactgaaactaacaattcatctagtgatagcaacgactcatctagcaactctaacaatgaatctcatgtatcccgagttcgacgtcgaattcctgaagttcataatcttccaaatggacaaaaaaagacgtctcgaactacctctaacttccccactgcctacagacatgatcaccattacccgttcaagtgtaaatagttggacatttagcattcgggctccgttaacacctcaacaagaagtttacctccaacgcgtgcacaatggtatcttagcaatagagagtgcaatggaatacatccagctaaatggaattactgtagaatccatgactcaactgttgagtgcagtagagaggatacctgaacagttgcaagatgcagtcagtatttttcgtcgtccaccctagtgttccctatttgtttagaaattattttggtgtaataggatatgattttggatagtgatattttattatgttttgctaccacttaccactgtggtatcataatcaacttatatatatattgaaggcaagcctaacagttaggcattaaatagtttgatgtcttcttttgatatatatatgtatgtacctatgtatatagtttgtaattttatggtgtgttctatcttttttgttaatgaaatcaaaatcgtttttattaattgaaatttatttaaatctacctttttgtacatataagcatgttgtttttttttcttctctttcgaatgagatgattttggctacacccttagtactggttttgtattaatttaattttagttatttataaagcaagttaaattgggtttaaactaattgcgtacataaaaaggtccaactaattaattataatatcttccatatattttgagttaggattaagcatttcaatgattgtgaggataattaaggaattcagttttaaattattgagtgtaatattaataatgaagaaatgaatgggatcgattcattttaaatacacgattaaataaattttcttagttatggttagtatatttgatcaatgtgacccatttctatatttatatttatgcagttttatattcgtttattattttttaaaatgaatattcgtttattaatcactttacttattatttgctaatgcttattaaataaaatctcttgttaccagacataatactttacttattattagctaatgtttattagtaaatataaaatttttcttacaccaaaagaataattatctactattattctcactctgataaatcattaaattctatataaaaaacaataacataacaaaattaaataaaagaaaaatatgatgaaaaatactaagaaaattaaccctttatttaaagaaactaatttaatcaagttatccaaaaattctaataactcacatatagtttaatttatataatttatttttgtatgttccttagttagtattaaaaatttgtatcactttttgatacattattagaatacattttcttacttagaccatctccaatgataatattctctaaagatattaaaatttttcatataatattttattttatttttctactcttacttctaaaaatactttaatgatataagagtcactacaagaaattaggaagtttaccaactcaccatatatgtgggaagtagttatctatatggggaattactccatatactattttttttaatttttttttttcaatttacggtttgagtttttaaagt

SEQ ID NO: 28815 - DNA, 1836 bp, Cannabis sativa
agatgtttcaacgacatttttaggcgacaacaattttgacaacttttcaataatagctcctatgactttctggtattttttggtggcgatgacaagttcgataacttttgattttaccgttataatgactactacgaattttttgtagtaatgactactctcacaactttttcaaagtgaatttgtataggagaccttgttaagagctgacagttgtactgtatggtgatgttagttagttgttagctttctgttgtgtctgttttcattctttgttactgaatctcttgtataaatacagtacaattgtgatcaataacaattgagttatttcataatatctttcatcttcttcattcttatcttttctctcttttctctgttcttagatttcttttactgttattgttgttttgtttgatttgaagcttcaatgtctaggagattcaactctcctcacatggtattagagtcatggcctccactggtggcgaacatggtgaactccggtcctggaactgctgcaaatggtggaacaactgccaataccgtcaatggtggaaatcaaatcagaagcagaaacagagaaccaagtgagaactcacctgtgtattttattcacttgatttcaataaaacttaatgatcacaactttcttctatgaaaacaacaggtcttagctaccattcatggaaatcgattgctgaaattcattcaaaatgtagctcctcctcaatttctctatgatgcagatcaaactaatggcgtgttcaattctgcctttgccgaatgggagatgttcaagatcaattacttgtttcatggctttcattgtcaatgacagaaagcttgctgacaagaatggtaggatgcaacacagccacgcagatctggaattccttggaaaagtacttcattcttcgagtgtcgtccaagattctggagtttcgcaccaagctctaaaatcttcaaaaaggatctatgtctctaaacgaatatctattgaaggtcaaacagactgtagatcttttagctagtgttggagaaacactcaatgatcgtgatcatatcttggctatctttaaaggacttcccagcgagtatgacacattcataatctcaagcaacacaagaattgaaggttacacagttgctgagattgaggctttattacttgcattagaatcaagaatcaagaaaattggtcaagaacctgagatcagtctcaacattgcaaaaactgagcctgactatgtgtttgatcacgatctgaatcatgaagccaatgtagctcaattcaatcgcaacatgaggtatcctgtgacaaatcgcaacaatttcaacaattccagaggaggctatgctggcaacggctctcgtgataatggatctcaacctcaacaacctaaatcattcaatcgaggaattccagctgccaatagaggaggaagatttccacccccaccctcaagagttcactgtcaactctgtcatcgtctaggacacactgttcttgactgttattacagatttgataagagcttttaaccattgcactccagatgctcaaaatctcatgactcgaaccagttacaatagagcagacaacctatatgttggagatggaacaggtttgtctattgaacacattggccattcctatattttttaaaacactaaccaacccctcatcttaaataacctgcttcatgttccaaaaatcacaaaaaacctacttagtgtctctaagtttggcagagataacaatgtatactttgtgttttaccctgatttttgccttgtcaagcaccaggtgacacacaatacactcctgac

SEQ ID NO: 28816 - DNA, 5378 bp, Cannabis sativa
gcgctcctttaggagaccgaacagattggatcatgcacgagtatcgcctctcagtcaaactgttttcacttcatattaacttgtttagctcagaaaactgatggaaataggcagcagggtgcctatgcattgtgtcgagttgtgaaaaagaattaggatggacagaagcttaacgattgccttcgagaaccaaaaggcaagaagattggaagtagctcaagtaataaactctggtgaggcttcatctcatgccagttgccagcacaacatactcaagtccagaacaaagtaaaataaaattacatattctatgttggagttggagacactagtaagttgatgcatctgaagccatgagcatccatttatcattggtttgagcacactatattcagttattgcttcttgagaagagtcaaaacctgattgatgagctataatgatcatttctgtcttcccatttttttcaataagaatttaaactatatagagggagtgatgttaacagggctaaggaaacttagaaagagaagaagcacaaataaagccttattttcttccttgggagaccctataaccaatgccaagtacctctgatatgtagcatcacatgcttcattccaaacctaacattacacacattaagacagagaatgacatagcttgagatgaaataaataaattatgacagagacattaactctatcaagtcaagtaaagattgctggaattcttattgaacttgcttaaaattacaatctcccaaagcttctgagacgcttggtctctccaagattaaccttgacaaaatcaatcaagatttctctcccaataacaaggtttagctattcatacaataatctctaggctaaaactaacaacaactaactaattcctcctcctccaaagataactacaatccattctaacaaaactataatattatgtctaacaagttgttgttctaaccagacacttgtgtaaaaaagcagtgaaggcactacaaaccttaccaacttagggccttctttataatcatatgatagcgccgctgctgccaatgcatccatgctgttataaactggaagatgtcccttgaaagaaacccagagttattttaaacaataagtccatatatatagttccttaccttgacaggcattcttggagggttgttcaaaacaagaagaccataatcacttataatgcagataagtttttctcaattacaaattcttaactaggaattcagctaagacatgccttttagtaaacaagtcttgcaagtaagctatctcatcagcatttaggaatagtaacaaatcttctggaaatcctagtctttgcaactgaaataggtacataaactctggtcctttcttccatgacatcattatcactcaaggagtcaccgaaatatgagcactttaccaggacctaaactaaaaaaattataaaaataatcataacccaatgattacacatccaaaacctcaacaattatggagaagcctgacctgggacaacaaaattttcagttaaaaaatcaaatattccaaataaaactacaatattttcgataaaaagatatatgtatggataaagatatgaaactcacagaacccttgttgaaatgggattgaacagcattctcaagaagctcatcaaagtaatacttgtcccagctaacagcggcgacatttgggaatcgccccgaaaaggtaactgagtttttccatgacaacttcttctatcttagaaacctaaaccaatcccaccaaatcgcagaagcaaaaaagaaatacaaataaaataatattgtttacaatcttacaaacctaccatcaaatactaccatacatcataattatctacatacatatttatgttaaacaatttttgttcaaggtgtacctacaatgaaaatagtattttcataccaaattgtacattccaaaaattagagagagtatattaccgtagtatatacatagaaccaaattaaaataatgaagtacagctgtgcacatggcatatagcaatggccagctgaatactaaatggtttatcattacttcaataaagactaacattaattgaaggtaatgaatacaagaagagcttttttaaatgtttctttgattgtaaaacaatcatcccatcaacaatcaccaccacttatcactattattgagtgtttacaaagaatttcctaacatcaatatttttgcacaacacacttcaaaaataagctaataaatgtatgccatatctggtattctaaattattgtagcttatactgattaagattaagataaataccaataaaaagctaaaacaaattacacaaaaaattatgaaaatagagtaagacagagagagactcaaggaaacaatatagtttgattggggatttgaataggaaagatacaaagccaaaataaattggagaaaagaataacattttaaagataacaattccccactattgctactaattacacaaacaaatagaccacacctaataatacaaatgtaaatcccctcaacactaccctttgcttcaaaaaaattatgcctgaaaaaaaagcactgaaaataaatattacacacacaccaactcttcttcatcttcttcttctgtgtcttcttccgtgtattcctcttcttacttgttcttcttcattctcattaagtataattaattaattaagaaataaataataataaaaaaaatgaatctttttgttctgttaccagaaatttcctaaatctactcaaatttgcagaacaaggttttagaacatggagataaagtttcaatttttagcgacagcattttgagataagaactaagaaaataatgaggaaaacaattgaagagaggccaatggccacaccaagaacatacttgtttgggccacgatgatggtcttttcgagttgtatcatcagaactactgtcgtcgtcgtaatcactgctatcatcttctgatgaatcttttgccggaggtggagacaaagggaacccatgtttatcacagggagaaattcccaacttcattttcgatgacagaatcgatttattgtagcagagattatcgttcccacccactttgaacacatccaatctacttataaacgatgcattgaacggcattaccccacggaagttgttgttagctagattcaagtgctttaatgtcttcattgctgtgaagtatctgggaatggttccgttgagctgatttgagctcagatcaacgtgaaccaaactaggtattgccgaaaacgaatcaggtactgccccagacaacgagttcgaagccaaggagagatttttaagcgaaattaggtcaccaatcgtatcgggtatttctccagtcaatgtattagaagaaagattcaagatcagaagattttccaggcgactaatcgtactaggtattcttcccctaagcttattacctgaaaaatcgatgtgagtaagattgggattcatgtgcctcggaaaaaatccagtcaaattcgcatttgagacagtcacagacttaatcttcttcatgtttccaagaatcacaaaagggccacttgcgttaacctgagtattcgaaaccgttagatcggtaaggttttggagtcgagataaccatacacctgttaatctccggagacttctgatacacgtgaaggaacggagagactcggtcagctcggccgggaagctaatcggggcaatggggcagttaacgaactgtagagactgaagagtggagagggatttaagagcagtgaaggacaaagcgacgtcgtctgagcagttgaggagtcgtaaagagataaggtggctgaatggcttggatgagtcgcattgagtgatgttgttcttttggagcagtgaagtgggatgtgtgcagggatctttagatgtgggaatgttgagagattggagagctctgagctgttttgggtcgagtgctgaagaaggagtagaaggggttgaagatggaggaagaggaggagaggaggaggcgttcttggttgtcggagaagaaacaggcgccggagttggagaaacgacgacgggaactcctcgaggtggagtagctgagaaggttttgatggagagaagaagtaggagaatgagtaacaatggcggtttttgctggtccattggtgaaatgagagaaagagaaaacagagaaagaaaggttttgagtgtacggacttgactttgactaccgttatggattctgatgcagtgagctgtgggaaacagaagaagaagaagaagagagttgaaaggagaaggaagacttggacgacgtcgtatatctcaattacttttataccctttactttttcatttaataaaaaaaaacttttatatattagacgcatcttcatctctattggaatggtttaaaaaaaaattatttcaccaatacacataaacaatacaaaaaattaaaaatatagtttaattgaattttaaataattttatgattttttttattttatttatagaaaatacagtatttttatgttgtactcttgttaattttttgttattttttgttgttgtattgatgttattttcttattatttttatgtagttttcttattgttttcgttttgtatttataaaaaatcgtgaaaatataaaaaaaaaaaaaaaaaaaatcttaaaacgtagaaatgtaattttattttttttttacaaaaaattgtattttatgtagttatttctttaaaaaatagttgattacatagatatatttttagtatttataataaaggtttattattaaggtatttttattaataagtaatagtaatcaagggtgtttcagtctttttttgttaatttagttgtttaaatattatttaatctattgtgaattaaatattaattttcttgtattaatttcgtagtttatttttctctaaatgtttgatttcagttttactgtatatagtaaatcaaataaactttatttgacaggttttgaagatcaactcgtgatcttggtctttttttaaaaagttttctaatttggagcaacagaatctgaatttaatgctgcaaatcaaggattttttttaagaaagtcttgtacaactttaaaaatgtgtttatggttgtctctaaggtttttatgttctataaatagaacatttttatgttctataaatagaacatagaaagcagtcaaatggtcttgtgcaactttaaaaatgtgtttgtggttgtctctaaggtttttatgttctataaataggacttaaagagcagttaaatgttcctcatatcttctagtctcatattttcatatctatctttgtgagaatagtgtttcatatgtaaaaacctag

SEQ ID NO: 28817 - DNA, 4575 bp, Cannabis sativa
tgagtgaacatttgtacactcattttttggtattatttagatgaattattgtttaattcttaaaggcttgtataaatttaaaattttttcttcagtgcgcaataaatcatgacaaattgggagtaaactgtacatatttggataaagtactgaaattggaaagcgaacgaattgagaaataaacaaagtgacaaaaaatagcttgtggcgccatagtgccatgattagttaggtgctatagtgtcgtcctgaaaggaaataaaaaaaaaaaacaaagatagaaaaaggatgatttttgcaagtttgttaatttagagaatctcacttggtgttatagtgtcgtccgtacacaaattcaaattcttatcttttttcaacgtcattttttgtggcatataaaaagaacattataacttcggttccacgacgggagaaagagaatacacaactttaaagagaaaaacaagtctaagagatcaaggaagaaacctgaagctgcattcaagagttttcatctattgttcttcttctttcttcttaatttctcagttattattcagattctaaacaatatcttgagatgataaatcatactatgcgttgttagttttcttagttgttaggattagatggatctctaattatgactttgattttatagtttaatgcaaagtttagtttagtccaatatacttcatgttattctaaattcagtaaattgtttaattgttgtcatgattatgatttatgtataattttactttatgtgattatagttaaggctattatctagattgagagatttattactcgagaggggaactattaaattacaaagcattaggtagatcaacttagatagtgtgagattaagagataaacattcaactaggcaaccgaaatggttctaagttgtgaaatagggaggtagaatatttaagaatgtttctagagtgagacttaatgaaggtaagttataatggtagtatagagatataggctattattcacttacacattctttatgcgacactcgagagagggtatagagatataatattactctagattcttgaaaatattataataagctagtcacattaatgataaaaatcatagttatattagggtgaaatcgaaaccttgacaattatttcatttgattattcttatctttaatttgttattcgcgttcttcctattctcttttaattttctaatatcatttgaaatcaattttttagataaaattaagctttaatattcactataattaatttctttaattacttttaatttttgtgggatgatattgatctcttaaccactattattacttgttggtttgtgtacttagcatatacatataaaattcacaactagaaataaatgattcatttacttattataaagaaactaatgaaacatatttataaaactaatcatggaaaaattaccgaaattccctcactacctgtatagcttcaaagtctaactatgggtaaaataacctcataattacaaactatccatgaatactcttaatactaaggatgcacatggggcggaaaattggcggggagtaatcccccgtccccatctccgttaaaatttttaatcctcatcctcttttattctctattggggatagggcgaggaatctcctacctaataagggcggggaatcccctaataaaaaaataaagtttacaataaaaattgaaatattttaaaatattaaattgcataaaaattaaaatattacatattaactattatttaataaactaattattatctaaaatataacttaaaattcataaaaataatactaatatactaaaaaaaaaatacaaacatacattataaattataaaatattattaaaatataaaataaaatactgaacgagttcctgtcgaggcagaaagtgtgatccccgtccccgccccatttaacattttgtgacaaaaggtaatccccgtccccgctccgctccccatttagacatggaattctcacccattaggggcaggtccctgcaggaccccatctcaatgagggaaatgtgcatccctacttggtaccttaaaaatactagttcatactattgtgatattactggccaatccatcgaattttcactgttgtcgatcataaaaacatgaaaaatatcaaatttcatgtataacatatttaacacacctagaattcaataaactcttcaaaattgagaaattatatcaaatattcctagtttctaataataggacttattttctaataatacacatgtatacataattaattaatttattactaataatctactaatttccatatctaatcatgcgatcattacaattattactccattaaaagggtttcatcttcaaaatttaacctgaaaaaatctgaatattgtgtcctcatatcggactctaacttccaagtggcttcttctaccttactgtttctcatatgctacttggcctaccctttcgagtatttcaaatggtcctgtaagcctaaggctcaacttgtctttcttaccgaagtgctttacacccttcatatgtgaaacccgtagaaatacatgatctcctacctaaaattttatatttttgcactttgaatctgcataactattttgcctgctttgagaagcaatcattcgagctctaatcttttcaataacatcattggtcttctgaactgcttctgaacctagatacttattttcctcggtttcatctcaatgaattggagaacaatactttctttccttgtcgtatcactataggtaaaattaagtatcgggtcctatataatttaatataatagattttaagaaatatcgctaaccaatcacggagtactacctctaaaaggtgctaggcacacccaataacaatgctcgaaaaaaaataaatacatttttttttgaatcaaagatgattttatttaataactttcagcaaaaataatagtgtttaaatcataaggagcatcatgctcacttaaagtacaatctaactttaaacaagaccctctagcaacacaatgagcagccttgttagtagatcgtttaacaaaaactatagaaatattgcttaatgaagataataaaccttgacaatcacgaacaagtaatccaaactgcgaaggcatttcaattgaacttttaatagcttgaacaacaatcaaggaatcagtttcaatcaccacattcagccattgctttctttttatccaggctaatgcctcattgataccaattatctccgctacttcaggttgcaccaaaccgatacgactcctcgaaatagcttcgataagatgaccatgtgaatctcgggccacacaaccataaccaaacttgttctccggttgaaagatagcgccatcgacattgacattaaccatatgtatcattggtttcctccagtgctctctagcattgttactatcatctactaacaatgcccccattttttgtgattgagcactaatccattgatcaagagttattctagctgatcgcaccacttctaatgcagaagaagttttcccattccacacaatatcatttcttacagcccaaattttccaactcaccattgcagcttctcggatgacatcattggactgcgaatcaagcaaactaaagaaccacaagctgaaatcattaccacttatagcagtagtgttgacacaagataattccagcaagctctactaaatccgcaaccaagaaggatatgaaaaatagtttcctcagctaagttacacaaagagcacataatctcaacattaacatgcttcatgttcaactgaacctttgttggaagacaccccaaaatagcacaccataaaaagtgacgcaccttaggaggaatatcaagttgccatagcctctaaaatccttctctgtcaacttcaaggttcagggtgctgttagactgttgcaatgctttgtaagcagtcttaaccaaataaaaacctgatgaagacttgttccaataccatgaatccctaaccacactatcactcagctggatagagaagatgagttctttatctctatcattaaaaaggtcattcaccacttcaacatcccattgtttcatccccaccgataacagacttgacacggattgcccctccaatgacggatgattagagctaacgtacaggtattacagatcaggcaaccaaggatccaataaaatactgaccgaattcccacaaccaatagatctccttgcaccagacttcaccaaatcttgggcttcaaaaatgctcctccaaataaagctggggttttgtcccaaagtagctgtaagaaagctacctgtaggataataccttgccttgtaaatcttgcttgccaaagagttttcattagttaagagtctccatccttgtttaccaaggaaagccaagttgtagtcccgaagatcttgaaagccaattccaccttcatgtttgtgtctacaaaatcgcttccaactcatccaactcactcctttagaagatgaattcgactgagatttctaccaaaacttggacatc

SEQ ID NO: 28818 - DNA, 2322 bp, Cannabis sativa
ggacttaatgaggctgaatagacgacaccttaaaaatgtaaacaaaacagtactttggagggttttcccaccaaaatatgaggttggatggtttttacaagtaaattgatattttatcaattacaaaaactttttttttgtctaatgttatatggaatcaaaatgttttttcatcttttcttcataaatgaaaatgattttggttctataatgttttatttttaaataaaacaatagaacaattaatgcaatcaaatccttaaaaagataccttaattgtaattagtcagcacttagaacttgtttaaaaagcccttattaacttttacactaattatagattatcatcaattttcctcacattcaaaatgtataaatatatagcttttagaacatcataattcagtgttgcttttgagttgggtgtgcatggaaagtccaatatatatggaggaatcagtagtacggaaaatatatatgggaccattcttttctttaacttcatcaaacgaatttttatatataagaatgtgaatatacgtatacaaatatagatatttatatacatgtgtcaatgaatattttccacttcatagaaaaattattatattaattatatatgaagataatttatttcctttaaatagctcaaactgcatttccaaaaaagaaaaaaaaaaactcaatatattaatttagacaaatacaaatacatattatttcaatatttcgaagagtacgtactaacatcaataaaacagtactgcttcattatttttaatctatacaatattaataacacataaatgctgcgcatattatccatgttaattataattaattatcaattttaaaagtattaattattaaaaataagattttaatactgataataaaagaaaatttaaatttttgtacttagttttgctaatcaaaaaaatcttttttttcgtacattatatcaaaaattatatttatatttagcattataaattaattatatttatatttgattaatattcattacattatgatataataattactttttaacagaaattaatcaagattaatatgtgacaaaaacaaattacttttatatgggacaaattatgtatgtatacatatatatatacggccgtgctttaaatatacacatttttagattaaaaaaagttaaaacttaattacaatagcaaacagaaaagtgttaactttttttgtttttgttctttttttttttttttttgaaaaaaaggtgttggggtatgatatgattattaagaaatgaaatgaaatccccacaattcttcttaattgcataaagttgagatataagtgaggacacagctccgtaaattaaggtgatcaaaatgtcaaaataatgttagacttaggtatataatatatatttagtactagctagccataaatatatagccattaatatcttagaaaaaaaaaagattggggaaagggaaatcttaaacagtactactactctactaatgctgcaaattaactaaactattaattcatacacccccaaacatattaaatttatttatttatgcatatgtgatcgatcaagcctacaaatctcttgtttcgtttatatatatgtcgtaattaatgtatgtttgttataacacacagtgaattaattagtaaatgaaaatgtatatatatatatatatctacttatatgtattagaaaaaaatgtatgtctacataaatatatatagattaattacaatatgatcatgaaattaaattattgtatccatgttcgatcagttagcaggatacagagattttctaggaatcattatataagaaaactgaaactcagaaagatagagagatgagtacacttacgagcgatctgctgatcagagtgactgttgatctaattagtttgcagttgtagacatgttgaaacgaataattaatccttgatgaaccagcaagacagccacatatattcagaaacatatcttaattaatgatacagtacttgacatgaacacaataaaagaagggttaaatatatatatatatatatatatatatattaccatgcaaatatttagcatataatgagtacggagcatattacatgtactatttatatatatatatacatatagggagagagattaatggaatagatatcagaagatcattaaattaaatcaagtcaaagtgaaagtacatatgcggtgtgcaattagtttaaaggggaagcattaatatatttatatatatatatatgtatgataatacatgagaaatgaaaactcatgatcattaataataat

SEQ ID NO: 28819 - DNA, 3115 bp, Cannabis sativa
  modified_base (2510)..(2518): a, c, t, g, unknown or other
tatctaaattagtaattttaattaaataaatagattaagataagtatcaaaagaaaatacactccttaaaataatgagctttagttataaggatattcggtctccattgttggttctacacagttcttgatttagagatccactccaaggaaaacgttgatagatcaaggagggtctattagcaaccttacaaacccggttctttaaaactatgatagactttccttgcccaaaggaggacatgccttcccgcgaaggtataatggcaagaacagccaaacaaccagcagcatggggggccgactaaggatcttaggctcaacgatatcccccatcaaccagcctttggctggccagacacctataggagtccccctagctagctagaggagtgcactcccttcccgaggtgagcaagcgactcaaaagccaatccttaactgactaggactgggaatgagtggaaagacccaaagtgacaattggagaagtgaaattgatcacttcaggtacttagatccaccaaactccagtaattggccatgcatagctgactagtgaacgcctagccggccagggccaacatccttacctaggagtggccggccaaggtctctaatacaatagccaacctccaccatacactctttcatagtatggctggctagaccctatcacgtcagggtctataacccctctaaggagggccagtcagtcaaatccttacaacaacatatccttctgtgtaagcacagttggaccaactaagggacatgattcaaggcatagttggtccgaaacctttagatcttgaactagacaggtcaaggagatcaccattctcgacatacataaatttcttgcccttgcccaaattcaagatgccggtatggaagatgtttatcaaacataaagacctattggcacacatcaaatacttcgagatgcaacttgatctcgagaaggttactggtgatgtgttatagccacttcgctagaaacagctcaacaatggtacttcaaactggcctcaggaggattcaactcttgggccgagttctctcaagaattttacacataattcttttcctcgaggcttgcaccattgcagctagaagatcttatcaaagtcaaacaacgacaaggagaacctttaaaggactacatccagaggttcatggccgaggccacgaaggtcaaaggccttacaaaggagggccgatatacaaccatactggggggcattctctcattgagtgacttctggaaagacatccgaaggatctcaaccaacaacatgaaagagttcctcgatagagctgatggctttatcaaacttgaagaagctatacagcaggcgcagacagagcatgtcaacaataggcagccacaagacatcatccagtctcatgacttgccaggcgctcaagtaggtaccagcaactctacccaaatttctagtggcaagaacactagaaacaagcctaacactaacaactctgggagaaacagtggcaaaaaggggaatttcaacacttctcccatgccacaaaatcagatggacaaggaggagaagtatacctgcttcaccctcctaacagagaaacccgaggccatcttcatggccacatatggaacaatccgctataaaaagccatttcccatcaaaagggaactaagcaagagagacatgttgaagttctgtcagtttcacaatgattgtggccatgacaccaatgagtgtcaaaatttgaaaagagagattgaataccttataagataacacaatccccacatgcgtcgttatgtgaagaacgaccacactcaagcacaaggtttccaaaatggagatccaatgccaccactagtggcaggacacttaggggtcattattggtggaccccacattgcaagtgaaaccaacaaagctagggagcgctatgatcggacacttcgtcacgagcctaaaagtgatatccttacagtcaaagaaaggggctctaagcaaccaatgcttggagagccaacgatctctttcatagaaggagatgctgttcaagtcagtttcctgcacaatgaccccctggtcatcactgcacaaatcgagaacatgactgtggaaagatgtatggtggatagtggagcctcctccaatattcttttcaaatcaacatatgaaaagatggggtccaactcactgacttagctccctgcaatcaggtgatgtatggatttttcggccaaggcatcgttcccatcgggtatatcggattacccatcactattggagaaaatccaactacaaaaactctggtggcacagtttgttgtagttgacattccctcggctttgaatgccatgataggccgaccagccttataagacttgaaggcggtcacatccatgtaccacatttgccttaaatttctaacaaggcatggggtaggatgtttgacacgagaccaacagtctacccgtcactgttactgttggaacttattttactaggnnnnnnnnntactaacatgtatgtttgattaacaccctaaatatgaattctctaaaataataaaataaactcatataaagtttagaaaatcttacattgatggcagcagaataatatgtctccttccgctcagatctctaacccttgttcctttttgtcgcaacgtaataacaagatttgggcctagatctccttctctccttcagtttggttaaccatgtctttcacactatgattgagtacttgacttgctatgtgtgggcatgagtctctatcactataggcttgaattggtgaagaacatcaagaggtgcaaaatcatatagaaatgactctctcatctactagttgtctgtcagagttagagaactagattcaggtttgttgaaagtgttggatgagaatgagagcatcatgttccttttatagtatttaaactagggtttaggatttaattatgtggattaaaaaggaataaaatgatgggcaaaaatcccttctagtggttggccacttaatggacctcactagttacaattttaccactttatttcaaccatttatccttctttcaataatgctatattttcccatttcaatcctata

SEQ ID NO: 28820 - DNA, 2307 bp, Cannabis sativa
  modified_base (934)..(946): a, c, t, g, unknown or other
gagacttcaaaagcagcatcgcagaagaaatcgagaatgaaagctttgagttttgaggtttgagaaagattttgaaggaattgatggaggttggggttgttgagatttgggatgaagaatccaagttcaacaggacccaaagttgtattgggtggtagagtgatttgtggtaagtaatgaaacttgatggaggggatggtagctgagatagtagcaatgtattttgcgctgttggatgagatatctttggatgtgtttactggagtagcagcagcagccgttggattggccggtaatcctatgattacgatattgattgagaatgttgggtggtgtgtgagtatgagcttggatagctcgaccatggaaactaggtggcctatgcctgaagaaggatataacactatggaactctccatcatattacttttactgtactcagacaaagctactagcactctattcaacttatagtactctttcaataataaagacttcaccaagtcggtggacaagttgacaccatataaataagggccttcatctaaccacaattaatataaattttacaattcaatctcatccggtcaatctagcatccaataaatattgaattggatcagatttattcgtaagatgtatttaatataaagtaaatagcagcataagtacccaaagttttaagtttataagcggcataaatcccatgtttatttgtagcggcataagtactcaatatttgtaaaactgtaattttttttttcaattttgtcagtactgttttaaatttattaaatgaacatttggaagtaactaatactacatgtttctgtctagatccaataatcaagaatctaaaccttatatgtggcctgtataagaaaattacagggtttgtacggacgaaattagagaaaaattacagttttacaannnnnnnnnnnnnatgccgctaaaaataaacattgggattatgccacttacatacttaaaactttaagtacttatgccgctatttaccctttaatatatatctatgagtttaatttaagtttattcaatattttagacttaattttcattagatctgattgtatccatctaatattttagatccaagatattgaattgaattaaatctatccaataataaaaaaaaaattaatgttaagtttcaaatatacatatactttactacgtataataataaaaaaatttatttactcattcaaactaaatgaaaatattaatgacttcaattggatattagatgtgttgaacttttgaacactccatacaatattcgatccaatccgatttagatattcaaaaataatatctaattcaatctaattacaattagatataaaatatttaaagctcgattgtaattagattggttgattgttattgaattaatttatgcacacttctactataaagaattatctacatatgtgaccatataaagaaccatctatatatagatacaccaatttagtgtaaaatcttaaattttggtgtaacaataactcactaaataaatatattttatattatttacatcaaataactgttatgatgatctcataaatattattaaaaatttaaaatcttaaataactaaataacataaaatacttactaaaggttacacattaaaaaaaaaaaaaaaaaaaaaaaccttaaaatcacatataatatttattaaattattattttagttgatatttattttcatttatgttattttttttagtttcataatgttgttttattttatttaatattattattttatattttctaatatattagtatttaaattaaattatttaattctattttaagaattaaagtgtaagattaatttttaaaataaattaaaataaaaacttcaagaaaaaaaaaatttttacaacaaattattagactcaaaatttaacactattaataatatagaatttgatacatactaattttttttttatttaatcaggagatttattaaataaactcactcaaaacaatagaacgtacttcagaggaacaatcctccaactaaagcacacaacttgtagagaaacaagagtctcttgccaagcaatgagccaacttatttgcagattgtttaacaaaacataactcaacaaaagatgaagacaaaagcaaattcctaacatcttgaacgataagaccaaactgggaggccatgaacactttactttggactgcttgggcacacaacagactatccgtttctaacactacactatcccagggatgagtcgcaatccaactcaacgc

SEQ ID NO: 28821 - DNA, 3502 bp, Cannabis sativa
ttttttttttatgtttgaaattttatgtgttaaaaacaaaaaatgttgtactattttatttatttttaaatcggattaggattaattgagataaataatccaatcttgtctggatggtgaaatttgataatatgattaactgttaattctcaaattagtgatgataaattaattatgtattatatagcatgtacaaagtgagtctaaaaaagattaaataatatgaagtaatattgtcaaagtaggtatacagaattaatgtgtaatattagatattaatggaaacttttttaaaaaaactaaaataaatagaaatgttttagtattttcaattttatctcccataatatatattttttcatttttgtctgtcaatatttttatcttttttgtcttcataaaagttatattttttatatcctagatgataatgtgtttgtatattttttgctgtagtgatatgtacatatagaattatacaatataaatttgacatacataagtatttattttttttatggataatgtgtaattcattatacaacttttatacatagttgtattcattggcgaacctataatttaaagtaagtggcgtattttttttaaattaggggcaaaaataaacttattaaaaagataaaataatgtgttgtaaggaatttgtacctttatcatatatgtaaactacattaaccattacataagcctagtattatgtctatgaatatcatattttattattgtaactaactaaaatacatatatatttttttcccgattttttttcaggaggggcgactgccccctctcactacaatgtgggtccgctaatggttgtatttatgttttttaaagaaagaaaaagaagcattaaaaagttgaattaggcagcagcagttgagtgctcaatctatgagattgaatgaagtaattactgcattgttgcaacagtttttagttttttactgttatgtcttttgagtggtagatgaaactgaatttaagtgtttttaaagttatatgtgatgctacaatctttttcatctaattttatttttagtttttttgtcaaacgatttgaaaatgaggcagctgattatttgatttatttttctaattttaatcctagtcgtgtctccaacgagagaaatattctaattaaattgtaaattattattttaattaattattattaataaaattgcatcatttattaaaaaaaaaattagaagtttctatctagccataatcttttttttaagttgacaaatgttatgtatccttaattttaaaaatagatatacaataatagtgaaatctcatctaggcataaaagactactattatgtatgtctacaagtatttaaatgatatatgtcttgtatttaaatgatatatatatagaaaccacttattaattttgatacttaattatatttttataaaattaattttactaacaccgttaaatttaacgaaatatttttttatttttaaaatattttgtcatatcaacaaaaataattaaaagttatattttatatataaaaatatatatagatttgtaattaaatgatatattattcaattgagaaaagaaaactgtgtgctttatttttgtcgctccataaaagtataatgcgtttttttctctctttttttttttttatatatatattataattttaagaaattattaacaatatatataaatatatattatacatttatttgttaaattagtggtggatatgttacacaaaattaattcaccaaattttggttagacatatgcaataatttaaattgacgtttaggtattgattgacaaagttagtatagctagaaaattatgtctaacattatttggaaccaaatatatatgtatatgtatttatatatacttagatttgttattaaaagtactttgtttaagataaaagcaaatatagcaatcatatatatatatataggatgaatttagaggcacttctagtagttctttttttccactattataattggttattgggaaaaaaaaataattgaaatcatctttgacactttttatgtaataaataatttttaaaaaaaattaacaataaattagtaataaattagtaaaagtataaaatataaaaatacattaaaagacaaaatacaccactttctataaataaaattataaaaatatttataattctatacaactttattttttataattttttattatttttgtgtatttatgaaataatacttataatattttcactcagtttatattaaagaaatataattcccctgtcataaaactcaacattcatgtattatattatagttgactgatgataatagataattatatttatctactagtatataaatatattaatatattattatttctattctctcacaattaataactaaattcaaattctcacaactcatattatatccagaaaaggaaatattatttcaccattacattcttatgtgcgttgatattatttttcttatatatttcccatgttacttataacaaataataatggctatataacaaagccagccaagaatgaactcatatttatttatttaattattatatatgacaatatattatacatgaatagactacactatatatatataatcccttaagtatatctatctacattctaaaaatacatatataacaatagccattaaatcaaattaggtttgtgctttgagaaatatgaacataagttatataagttgaccccaattgtctccaacaacatgtgttgcctaaattgttagcacatgggtatgaataagaaccctcaattgtgcaccactaaactaatcaatttttctcaacaataaaaaatgagaatttttctcaaggacaattatatgtatatatatatgtacatgtgtatatatatatatatatataaagtattgttattgggcattagtgatacccaacatcttccataagtgacatttcacgattgattatcgatattgtctaaaagttattttttaaaattatatgaaacccgattatatattcaataacagtatgacatcgagaaaagtactagacacactgataataataattttttaaaaattctcatatatatgtatatatattatgaatagaccaatcaattctccatatacatatatataatttgagattagatacatgacctatcattttgaaggtatattagagttggataatgactatcgacctagctttgtctatgccatgtgcatggtttggataaccatatggggtaccacatatgtatactttctctcttttgtatttaaggcttttcttatcaaataatattgagattaattaatggtcttttttgaagaaatggaggttgacaaaatagtacatacatcatacaagcatcttcactagttttattttgatatattggaaaaagtttagatagggaatcaattttgcttttattttagaggt

SEQ ID NO: 28822 - DNA, 5369 bp, Cannabis sativa
  modified_base (3329)..(3330): a, c, t, g, unknown or other
tgatttgttgcagtatttatttaagtaaaataaataaattaaaatcagttaacatatatataaaaaaaaaatgtatattcaagtttttataataattatttttttttgacgtgttataattattatttttatcataggtatttatgaaaatatccaaatatttaagagaacctttaaaaagatcaaataaagaatataaaacccaaacttttatcaaatatcatttcaaacaatccatgcatatcttctttgggctgaatgggcttctcattttaggctttctttcatttttcaaaaatgccaaatttcatagtttaatgggcttaagttttgttacattatttacaccacatactaaaatttctaacttttttatttttttaatgtagagcagaatttttgtcaaaaatactgtataaatttatactgtgtacaatgttaaattttcaatgttattttacggttattttttagttgtttcacttttatttgtagatgttctctttgcgttccacttttgttttataaaaatataatatttttgaaaaaattcgcatatgataatatttttataaaaattaaaccaaattccagtatttttataagtttctcctgtttataataatatatattttttaatccattattactattattagtatgtcaagtcagccaaatatgacattttctagttttttttttttttatttatttttctactttttcaaaagtaactttttagatactaatagtattgataagaaactaattagttacatttttttttataaaatactttattttaatataatataatttaagatatattttggttacctttaaaacttatttgtatacatcttagtaattaattagttatttttaagttatattgaaagattataatttaaaatacatttaggtaaccttaaaaattattttcgaaactaataaattatcatgtaatataacaagttactatatttttataaactaattattttacatactttttgttattttgaaagctaaatggttattatataatataaattatataagataattcaattaacaaaattttaaaatgtgtgttattaaaaatttaaaaaaaattataaaacagtaattaattatagtaatcaaatagtttcttttctgaaaatagggaagaaacatatactttaaaatgagtaaccatgtggttataaatttgttaaaaaattaaaaaaaaaaaaatgagagagaaagaagaaagagttaaagaataatataactaatcattatattaccttttttttttcaaatgttgtgcattacaaaattaaaactctcgagtttatatttttaatagaaaatgactgaaggtatttttataaattagatgagaatagtgtagatgtaaaattccctatcatctttaagatgaactatttccctacaaaataactcaaaaaaaaaaaaaaaacattatttaaaatttattttattttaacatttaagaacaaaaatatttccaacaccgtaggaattatttattataaccgttaccactattatttttaataaaattccatgaaaatgtaaaaataaaaaaaaaatagaaaaaaatgcactccaatatttatcattcaaaattatagaagaaaaaaaaaaattatattttatgtaatttcctcaacattcttctggaccatttgaatttgttttagcttaatactgatttgaacttgatgtttaactaaaaacatagaaaaaaaataaattgacaaatacttttttagtcaccatatttatatttatagttcacaaacttaattttcatcaaagtatttttaaatataaccaaaaaataacaagattctatttaatatttttaatgattaagtagtttttttttaggcaataatgcttaaattcttcaaatattaaaaaaaaaaaataacaacttacttcaaacctaatcaaggtaaaaacaaatatcattttttttttgaaaaaaaattgattaaaactaaaaacaaatatattttttaaatataatattaataaacacgcaaaataaaacataaaaacaaatccaatttataataagttctcctccttattttttttttttcttttcatcttttactgaccgtggtagaaattcgcttggatgtgttcgatgaacattaattatcttataattttgtgcttaatcacagttttcactcttcttctttttcgtgtatattttaggtcacatctaaaaatctgatgatggcccgttaatgttttcgattttattatacaggccatgaaaaagacacataaaatggtcaaattgttgttgcgacatgttatctctccttttataattttaatagaatgttatgttatatctaatttttattaaaacatatgatttgttttcaatattattatgtgatagaataatcccttataatggatatagttacaatgtttgtaagtacccccaatgatttttatcaaagcgcagctaccatttttatcaatggtatgatctatgttgtagactaccgttgtgattcttaggtctatgagattttttggacattgttgaattggtgaaaaatagagtaaaagagatgaataagaaagagaagaacattaagagaaagatcaaagaaagagaacatgaagatcaaagaatggatgactttggttacactacacaaatgtagtttatataggtacaggaagataaaaaaagaattagttacaagagttagtttatgacaacaagaataacagactaatctagcaactttagctgtcttctcttccaatactccccctcaaacttgcaattggtccatcatcaattgtatgtttgtttttaaaagtgatgaatcgattgttggatactgcttttgtgaggccatcagctaactgatcagtttctgttacatgtttagcttggacaaaaccttggagtactttttctcgaacaaagtatagatcaagttttatatgttttgttcgagcatgaagaacatgattcatagtgagcaatatggtgctgagattgtcacaccagatagtaggaatccgagaagaggaaattcttagttcattgaatagagagtgcaaccaagttaagtcagcaactgtgttggccagactcttgtatttagcttcagtgctggatctagaaacagtggtctgtttcttgttgtactaggcaattaagttttgtccaagaaagatggcatgacctgaagtagagcatctgtcattgggatcaaaagcccaatctgcgtcacaaaatgcagttaagtcaagtgtggcaggggatttgaganncaagccaaagtgaagagtgccactgaggtatcttaagattctcttcacagttatccaatgagcttgtaggggattttgcatgaactggcagaccttgttcacacaaaaggattctagtttggtaattgttaagtactagagagctccaacaacaaatctgtatagttgaatgtcctcaacaggatcactaccatatgttaacaattgcaggccactggtcatgggagtgtttgagtgtttagcaccttgcattttggttctggcaagaagatcttcagcatactttctttgagagagatacatgccttctgtggtgtaattgacttttatgccaaggaaatagttgagtataccaaggtcctttaaggaaaatttttaattgagtgcagtgaccagtgagtctatctatgtgatgtggattactgcctattatgaatgagaatgtcatcaacatagacaagaataaggatgatgccttgggcagagtgttgaatgaataaggtagtgtctgcttttgaggtagtgaatccaaatgagagtaagcattgttgtagcttgtcaaaccaagctctaggtgcttatttgagaccataaagagctttgttgagcttgcatacaagatgtttggcggtggggtcttcaaaacctagaggttaaatcatgtagactttctcattcaagtctccattgaggaaggcattattgacatcaagtttccttattatctaattccttgacaaggctagagttagcacaactctgatagttactggtttgattacaggagtgaaagcctctgtcaaatcaaaaccaggttgttgatggaactccttagccacaagccttgctttgagagtgttaacactgccattaggatttccctttatcctatttacccacttgcatcctattggttgtctttcatctggaagtggaactaaaagccaggttttgttctttataagagcaatcatttttgttttcattgctttgaaccacttttcttgttgaagagcctctttgaaagataaagggattctaaaaacaagaaaagttttaggtttgtgtatccctgatttggaccttattatggccaattaaaagaagttgttgttatgtcatatcttagtagatgttttattgtattatttaattgttaatagattgacactaatcagccctcaaagagattgaagtctgaacaaaacatcattagtatcaacattagttttgaaggattcaaagatgataaattcattctggagactcaagctatctaagttttctacaatgattatctcaaaaataaatttgactagaaaatcgtctaagcagttcatcatctaaatgtgtgggatattctgcaaattgaaaaatatttagaagatattttagtacatgttatgcatgacacaaattcatctgattttcaattgtttgttgatcttggttcattaccaaaaattaactttcaacgtataagggtccaacgaaatttgtggatatttaagataataatccaactgaggagggctgcatggatgaaatggaagaggaagacagatatgaagtagtggaggaatacatagaagaaatagaacatgaagatgacgatgaagctgataaagataaaaatgaaaatgagcacaaccttaaaaatgataatttagaaaaaaacttataatgatgatgattacgttagtgatgaataagtggtaatttattaaatatatatatattgttaatttgtactttaatacattgtgacattaatattattataatattcctaatacttgtatatcatagatataccagatgttgcatgttctcacgggagttatgaaagatgtgatcctcctcttggaccgacaaatattggggctgaatgcgtttaacttatattattaacatttacgtgaacatactacaacaactcctttaaagaaacgcggatgtcataagggatgaagcacacaaaacaagcaagaacaacttggacatccgacacaagaaaaatataggaaaaacatacaacg

SEQ ID NO: 28823 - DNA, 1810 bp, Cannabis sativa
  modified_base (115)..(116): a, c, t, g, unknown or other
ttttttgagataagatatagttatagtgacacaacacaaaaagaagtgtcactatattaaatatttttctacaaaaaaataatatttaattattttaattcaaattttatatatnntaaataataatttatattaattatctttttttaccaatactagtattttttcatacaaatttgtatacttctttatttatataaaaaaaattaataataataattcatattatttttataaatattatttttttagggtatacatattatttattatttatataaaatatattattttttataattcatattatatattataaatttattataataatttaattaatgatataatttaaaaatacattaacattaacaaaaagaaatacaacatttatatctatcagaatgctttctataaaccaattactttgaaactaaaatcattcacacttagaaaatggaatgaaaatggtatgaacacacttagaaaaaaatataaaagaaacctaaaaatttttttaaaaaaaaatcagatccagactggccataacttccagaccaccgtcgtccataactccccacccacaccatcgtcggccataacttccagaccaccatcgtcggccacaaactcataccaccaccttccgtcacaaacccaaaaccacgctgcacacctgcacaaagaaataagagagagagagagagaaacagagacaatcaaaaaattaatatacaaggttaggtttaaaatggctaaacaaagatagacaaacaggggagatgattaaggtcgttgtggcctgtttgtgcggcggagaaaccaaaaggtaacttgcgaagttccatcgccggtgagttggctcgaggtttcgaatggtgcgtcctccgctggtggatctcgtcttctgtctgtcgtcgtcgtgactgagaaaagatgaagaaatatgtgtttgtggttgttgtaaagagaagagagtagaaaccttctcataagaaccctagaaccctagaatccaacctaagaagaaagaagaagaagttgtgcagctgtaatgaagagagaggagaagaagttgaaaagttgaatttttgagagagagagagggtgcgtgtatgtattgtttttagggtttaaaataattaattttattattatatttattttatattttattatttaattttttaaaaattaaagactaaatgcgtacatggctggatgtataacaattgaacttttatttattagatcaattatgatcatcaataatggacacatatcacacccatcaaataaagtaagggtcgtcctcaccaaaaaaaaaatacgaatatatataatatttatatataaataaataaatattagtgtgagttgtaccttattggctgataattgggaattgtaattgattaaagagagaatactggcgtgacaagatttatcattatataatatattttttattttttatttatttattagttacagctgtacttttttttttgtataaaaaaattaagttatgatatagtgacacgccagatgcgtggggatatatttatccactcgcgcctggcgcgtcactatatgctaatatattttatattaataaaaatcaaaaaattttgggttttactctttagtgacactctatatttttagtgacccacattacaagagactaacgttgaatttttagagtctaattgtgcatgtcactaaaaattactccaaactctttagtgacgcgcatttttttgtgagtcactatatagtgtcactaaaagggcaaattgtagtagtg

SEQ ID NO: 28824 - DNA, 4890 bp, Cannabis sativa
  modified_base (30)..(39): a, c, t, g, unknown or other
gtcctttaaataggagtctggtctcgagtnnnnnnnnnngagaaatctcactataacacaagctactatatatttggcttccatggttgaactacaatactaattttcttaatgcttctccagattataactccaccacaaagagtgaatactgacccaaatatcaatttttgactatctttgtctaattgaaaattaaaatcagtatatctagtaggattgaactctccactagaatattcaagcatatgatctctcattctctgaatatactttaaaatgtgctttacagctatccagtgttccaaacttggattagattggtaacaactaacaaaccctacaatttagcatatgtcaggccttgtacacaatatgcatacattaagctcccaactgctgagggttaagggtactttctcatgtcctccatctcttgaggaacctttgaacattgatccttgcatagagtagttccatgtctggaggataactgtaattttttggagttcttaatttttgagcaccttatcgatataagttgcttgagaaagtgctaatgttctccactttctatctgtacagattttgattccgagaaagcttgtttctcccaaatccttcatttggaattttttagccaactacttctttacatctaataacctttctacattgtttctaataagtagaatgtcatcaacataaagaactaggaataccactacattacctttaatgtatttgtatacacatgattcatcttcattttgctcaaagccatactctttaataatcttattaaaggtgatatttcaagatcttgagtcttgcttcaatccataaatggatttaagaaatttgtgtacctttctatcttcccctagtagcacatacccttctagtagttctacataaatggtttcatcaagatctccatttaaaaaagcagtcttaacatccatttgccagatctcatgatcataagtggcagtaatagaaagaagaatgtgaatggattgaagcattgccaaaggggaggagattttgtcatagtcggtgccttctcgctatgtgtagcctttggctacaagccttagctttaaaggtccttaccttccctacactctcttcttattcaaaatccacttacaccctatggctgtaatgtcctcaggtggagagccaataggaacatccaagtagaggacggtcatgagaacctagatgtgggaagaagtggccagcccaagacaacctccactgatgagccactaaagaaaagagagtttgatcaccgaggagatgattaatgtaaaaaattcaagaaagagatgaacaacagtgctgtgaatacacatgctacacagagttgaatagcttaagagaacacattttcttgactattgactgccgcgtacctttcaaaaaacaatccccatgaagaaagattggcccagaaggtacctgaacaaatatagcaagttccacaaggaccttggacattttacagaggaatgcaaaaatctcaaaattgagattgaggagttcatacagtgagggtacttgggcgggtaccacagacagattcaaaggtccaaggacaagtgacaagaagaagaataaaggaaagccaaaaggaatgaggtattgtcacaagaaataagccactaagatatcttcgtcgtctcacactttagtttgttatgaatcaaggtggaaaccccttaggtgactctaattgtcatgtttatcttttagttcattgtaaataagagaaactcccccataaggacctttggagcccctttattgtataagcgtgatgaaagaaaaatgatatattggatttattttttgtgtttagaagaatattttaaagtggatgttcagtcttccccatctctaagagaaagaaaaatattgagattaaaacttaagggttcagtatcgcaaaaagcgctacatctttggtaggccgagaagagagtcttgaaagacactcataccctcacaaaaaaatacaagagagagagagagaaaaaaaaatggtatacctgtgagagggacatctctctagaaggaataccaattctctcgtatttaaaatacactttaagagccactaatgcaatacaagaggttgagcaccgcttaaaggctacaagctccctcactagcatcacaaaacttggaaaaggtagagtgcatcccaagaggctaaacatctcccttaaccttcaatatgaaatttggaaaaggttgagctctgcccaataggctatacaactcccttaacatcaattaagtaaccgataaaatgtcaagaatgctcaaagaacctatactcccttcataataaggttacatcagaaaataggttgtgtaagcccaaacatcacaaggctccctaaaataaaagatctcaaggcgcaagtgccaaaagagataatcgtaggacaggtatgatgcttaccaaactttgtcaacaagagtacttaaaaagagttcttatagactcgggggaagtgttaaccctaaaagtaagcacatctaaccttcaagattagtcaacagttaattcggtgttaactctaagaatcggtgttgacgattctcgaagacttgtccaagcattttagagaccgaactcatggtttcccgcaagcaaattgttgggtaatttgggaatccacaaaggaggaggcatcactctatgaatattttaaaagttccatcatgcatatgtgattgtttgaggtattttcgatagcggtcaatgagcacgagtagagttagtaagatcaacttactaagtggtaattgttagagaattttcataataatacatatagaattagatcttattataaacataaactccatagatctctttcttatctttctaactcattttgaactgtctaatttggacatatatcgagaaagttatggtaaaaatactaagatcactgaaatatgatagtggggtgtgtgagtcggtgtgcctttgtgaaaaccagtgtgtctgtgtgcaatccggtgtgcttttgtgtgagtcagtgtgcctttttgtaatttggtgttcctctttgcaagtcgaggagcatttgtgcaagccggggagaatttgtgtgaaccgtggagcctttgtgaaagtagtggagcattcgtgcaaaacatgatgcatgcaagacgtccatgcaagtcgtggtgcaagatgttcatgcgagacccgcatacaagtcatggcatgtgaggtgtgagggactcgctcgtgagctgtatgtggtgtctgaagggctcgcatgcaagccatgtgtggtgtgtgcgaggctcgcatgttgagttagtaagactaacttactaagtgtcaattgttggagtatttttataatgatgcctttagaattagatcttgttataaacataaaatccatagatctttttcttatctttccaacgtatttttagtgatctgattctgagatatattgaaaaagttatggctaaaatactaagaccactaaaatgtgataatggggtgtgtgagctaatgtgcctttgtgcaagctggtatgcttgtgttcgagccaatttatctttgtgcaagccagttgtgcctctttgcaagacggggagcatttgtgcaagctagggagcatttatgtgagttgtggagcctttgtgcatgtggtggagcattcgtgcaagtcatgatgcctgggagacatccatgcgagccgtggtgcgagacatccatgcgagaccctcatgcgagttgtggcatgtaaggtacgcgagccgtgtgtgacgtgtgaagggctcacatgcgagatgtgtgtggtgtgtgcgagtcgtgttgtgcgagacctatgagtgagtgtgagaaatatgaaatgaagggagaattctgatacgtgttaaagaggaggtcgtcaaggaaggaatcaaagaataaggcttgcacacaaagaggtacgagaccgagtatgaccacgtccttagcgtggcctactggtgagatggtgcaagcagtggagacgtgttgtctgcaacccctaacgtctcgacaacaggtactctgtaaccacagatgaaagaacaacccaccggaagggcatacctaaagagtgccaatctcccccggcaaacatctatactcctgcaacttaggactacctgacacctgacaatgttacaaggtccaagaccacctccagcacctggaacttgtagccacataaggccaacttatgccttgaggaccacaaatgtatcttaggtcattagagcctataaataccccattctcagatgagagaggggattagaaaaatctttgtaacacttggcctacaaaagtatacacttttatctttctctatagttattctacatttcttctttgagtttttatatttcctgatcttcattattttcttaggttttacatttaagttttgattttcctactacaatttggttgacgagttttcactgtcaacaacgtctgttaaggtttttctcttttccatctagcagccaccagttttatgtttctctagccatgctcgtcggccattcctaggcttgtgcactgctttggttgggcttggtgatttgtacaacgaggtagatatgtggcatctcccttttctttgtcgtctgaatattttttctctctcaaaagtttcttttattgcagacatttggtttgtgttttccaacattgtctagagttgttgggcgaaacatgttgtggatctggaagcctcgctagtggagtttttgttggggtttgtgccctaaataaaactctacttcaatgtaatcttttctattcaattatcaataaagaaacaaaattaatttcattacttgtttaat

SEQ ID NO: 28825 - DNA, 1278 bp, Cannabis sativa
gagacctgacatagcttactctgtgaataagctaagtcagttccttcaaagccccactacagtccattggaatgccgtaaagagagtgctaaggtacttgaagggaaccaaaaccctgggacttcacataagcagcagcaatcacctcaacataactggtttctccaatgcagattgggcatcgtgccctgatgataggcgatcggtagcaggctactgtgtatatctgggtgaaacattggtgtcatggtcatccaaaaagcaagcggttgtgtctagatcgagcactgaatccgaatatcgggcattggcacatgttgcagctgagatttcttggatagaatctctactcaaagagcttaaatttccattgtcactgccttccatcacttggtgtgataatattagtgcaagtgcacttgcatccaatcccgtattccatgcaagaaccaaacacatcgaaatcgatgttcactatgtgcgtgacaaaattctgaaaaaggaattggaagtaaggtacattccctctcatgaccaagtggctgatctcttcactaaaggactgtccaactctagattctcgtttcttgttgacaaacttggagtgaagccttcactctttcgtttgaggggaggtgttgagaaatagagttgtcatctactgctggtgcacaatacctgcattactctgttgatgcttgatacagagaaacagaggattacacccttgtggacaggtgtcatccatgtccttgtggtccaaatattagggagcaatcattaggaattctgttagtatattccctttgtaatctttattgatttcagcaccatgccacctgtcaaagagccgttgctcacagcccacactgtaacaacttaccatatctataaaaggcaatactctgactcattacaaaatgggctgcgtaattacacatccaatattttttcctaaattcaagtattataaatattataactaaatgataaatgatttaactgttaaaaaaattataataggggcttgtatataaaaataacattatttataaatattaattgttaaaaaggtcttcttaaatattcaaattaaaaattagttattttaagaaatatttaattataattaatttaattctaaaaaagaatttttacctattggtaacatgctattacgggttaaaagaaatgtaaccatcgtcgttacagtaaaaatgtaatcattgagtactcactcatatatatatatatatagaaatatattacttcaagtta

SEQ ID NO: 28826 - DNA, 2205 bp, Cannabis sativa
tagcatcaggtaaaaatgcatagaatgctgtctgctaaagaaaatgtcctatgaccaagcaatggaagatacatacaaagacacgattgctcaaggcaagtgtgaaagtgtatgaacaattccaacaaagttgcagtgtagagaatattgaacattcccttcatatatatataaatatatgaagcgtgtgtatataaaaataataatttcttccttttaatagaattataataacaatatacatatgttggctaatgttcatgattcttattaggcaaacaaatgtaaaagcgtaaacagagatgttaagcgaacaaagtaaggttataaattgatcgtaaatccattctctcatgagcaatacaaaatacggacaagtactatgacaaaattggcatccctaatatttataaagtattattttaacagaacagagaaaacaaacaaaggaacaaactttactattattagatataaagttatgactatcataattaagggtgcttataaaaaaagacaaaaaaaaaacatatttaagggaagagaccaacctggagggcattacagacaatttcaatctcagcatcgaaattgggtttttcatttgtagtgacaatttccaatacagcacagcatgtcactccaagatcaggttcacaaactggcaaggcaatacaaccacggacttgatgattatacgcatgctccacccttacatactcattcttcttgtagtaagcaacattcgaagtccactcagggattttggactgaaaaacacgaccaggaagcccaagaacacaaccttgcttcccttctacagaaaatgtaaacctccttgacacttcacggtaccccaccagcatattatcaagcaagtagggctggtcagaagtgctcaacaataactcgtcaccacgtctcacaggaacccatacttgtgccaaaattcccataccagaagacgctttgacaaaagatagtgctttcagcatcttttcatcaagtgacaatctaactggcctgggtacggttgaattctccacatccatctcaccgttctctaagaaatcagtattttgtgtagctactaaatcactgccgttattggaatgtgctgacgcctccaactgagtatcttctggcagaaatacagctttgtcaccataattgaaggaacctcttggtaagtcgaggtttcctccaacttcagcgacaggcagtgcctcaacagtctgttcaataaagtctgatgtattctgcggcgtataaatagttggtggaagtgaggccaacccatatgtggcagagacctgatctgtcaccgcaggattgctggaccatccaacgtaagtatcaaaactcagaagctctgagaaactattgaacacatcctctgataacatatccctgggaacaccatcaaacgatggaaaactctccacctgctcacttggagaagaccaatagtcattatccccctctttaggcgagaagggttccatttttctctacagaagagtcactgaaaatgaaaacttaaaaacgctagagtttccaaaagttacagacgcttaagaaaactcttatatctttactgtctctccccacaattatatcaagattctcggtgattttcatgagttctcccttcattttctataaatagtaacaaatactcgaaccaaacaaacgaattcaattcacgacagagccaaactttatcggcaaagaaagtacaaaacctgcagtggccagaaagtaaatttactttataaatcacagtcacacccaacagacgaaatattaacaattaagaatgaaacactccgcgaccaaatattgaattgaacacagagaccaacataactaataaagcttcaagacaaaaaagctaacctgtaagagaaagaatgaatacagctcgcctaaaccgccaccctgcaacaaaaggccaaagctcataatcaacgaaaacgaacaaaacccagctcagattagtcgtagcagacgcagaaatgcttttgattatacataattttaagaattatattcatgtatctgggcatatcgcaatttgacaaaataagcaatcgagactggtcaaagttgaaggcttaaagctgaacctcagtctggaacggccggacacgaaattaagccagaagcttcctgaggaccaaaccgactcaaaaagccccaaaa

SEQ ID NO: 28827 - DNA, 1061 bp, Cannabis sativa
tagaatgtatattacattttgcaagtaaaaatgtacattataattggaagttgtaatacaattttgacaaaaaaaaataatgtaatgtaatagatagtgcaaaatagtctttgatgaaaaactaagtgaggcaatttaatgcctttatgtctctcttttttgagagttttgtcttgtctctcttttgtgagtgcctgctacgtttaggtttcttttgttttgactgtcttttgtcccattctgtcgagtgtgtttcgtgtctttctgtgtggccgtgtgcttgtgtctggttatggcttcaagtagtattaatgtggataacttagaggaacgttggaaggatatccaacttgaagaggaagaatcagaggagacttttaatggagaaaatgaagaaaatgaagaagaggatgatctagcaattgactctagatggtgtcttgttgggcgtatgcttacagggaaaatttcaaactttcgtatttttcagaatttgatagctgatctatggaaacctggctagggaatgtatgccaagcaacttgatcagaaccggtttttgttccaattttaccatgagctagatatcaagcgggttattgaaggcagtccttggacctatgatcgcaaacaactgattataactcgtctcaaagatggtgacaaactccgtacggttagccttaacaccctcgatttatggttacaaatccatgatctgcaaaatggattcatgaccatgaaagtggctaaggatgctgggaattatgtagggactttcattgaatcagacccgaataactttactggggtatggagagaatatcttcgggttcgggtaacactttcccttgatcttcctctgaaacaaagaatgaagtttcgtaagcgggatggtgattcgttttatgctacatttcgttatgaaagtgtcccaactttctgctttatttgcggtttaatgggacactccgagaggttctgtcctcgtacgtttgacacacctccccacctgatcgtgaagccttacgggatatgaatgaaagctcttccccgtcgac

SEQ ID NO: 28828 - DNA, 2087 bp, Cannabis sativa
attttttgtagtgtagctagcctctgccaattctggtgcgacgctgcctatttgcaacaagaaatggcttctaaaacttgacctgaaccatctcttggaacacacatgaagttgtaagtatcagcacctgagaaaagagtcgcgtcaacattaattttgatctcccatgctcctggtttcctccacatttctgctatcaaaaatgtagcagtcgacacatgaaatttatcttgagccttactccattgctctaacatgcctttagccaagagagtcacagaggccacattaacatttctctccttccaaacatagtcatttctcacttttcgtgtagcgcaacaagtcatggctatgattttcctttgttccccatcaaataatctaaaacaagactccaaccaacccttaaaagtccctgcaacatccatactgacaccgatcccagtcctttcccaacatgatcgagcaaaaggacactccaccagtcgatgcaagattgtctcacaattcgaagtgcacaaaggataattagaatcaatattgacatgtttgaaccgaagctgaaccttagtggggagacaattcgaggcagttctccacaacaaatcctttaccttcagaggcacttttagacgccacaaagtactccaaaaatcagaccccaacagctcaaatcaccttccttctcctgttgcagatgtctatatatactcttaactaaaaaattcctggagctcccaaaagaccaaaaccatacgtttcttgtacgacttgaacttaagggaatactcaatatgagttgagcatccctgtcattaaacaaatcacgcaccaagtccacatcccaggccaaattatcagtaaccataagagcagcaacattttgacgtaaaaaagcagggtgattagtactaattcgaggattctcatcacatggtaaccaaggattcaacgaaatactaatttgagaaccattaccaacacgcctatgtgcccccacctgcacaagcttcctagtttcaaatatgctttgccaaacaaaactggagttactacccaattctgcattcaagaaatctccacccacaaaaatctagctttaaacaatcgaccaactagcgtgtgtggctaacaaaccaacctccagccttgcttacacagtaaagagagattaaaattatgaagatttctaaacccgatccctcttttagatttatgaacatttaacttataccaactcttccaatgaatccccttattattcttaaaagaggacttccaccaaaatttacacatcaactattccatttcattacaagtttttaaaggtaacaggaaaacattcatagcatagctagagaacgatggagccacagttttcaaaagcaactctttccctaccttagacaagaatttcccctctcaactttgaattttcttcctcattttttcttttaaaaaacccaacagtactttcttcccaaaatgttgggaagacccaaataagtattggactcacctgcctcttgcaccctcaaaatagaccaaatcctggtacgaacatcaacaccagtatttgcactaaagaaaacagatgacttattcaagtttacctgttgccctgaagctatttgaaaacattggagaagctccatcacattttggccttcctcctctgtagctctgcaatacaagtaactatcatcgacaaaaaatatgtgggagataacaagagccccacgagccaccttgcagcccttaatttttccacgtctctcataatctgaaattaatgctgacaggccctccgcacacaagagaaaaagatatggtgataaaggatcaccttgccgtaaacctcgccttggcacaataaggcccatttccttcccacccaaaagaatattgtaagagactgacctaacacaacacataaccagctgaattcggtgttcactaaaattctttaacattgcatgacgaaaaccccactgcaccctatcatacgccttgctcatactgggttttctcaacaattataaatagtcgagtaaaatattcccgtcaatttctataactgtcgc

SEQ ID NO: 28829 - DNA, 1838 bp, Cannabis sativa
gagagagagagagagagagagatattgaggagaagaggggaaagagatggtttttaaagaacggtttttttttttttggttgagaaaaaaaaggtaacggttactttctttccaaacggtctgatttttctcttttattattataatttgtttatttatttattttgtttcaacggtaactagaaatgggcttattgggcttaatgggcctattgggtcttttaagaagagagtttttacaaaaatactgaattttaggtaaaaatttataattttactgttacatggaatttttacaaaaataatctttttataaaacattcgtaaaataacaaaagtggaacaactaaaaacaactgtgaaacaatagtaaaaacttaacacaatacacagtgtaaaatttacacagtatttttgtcacttgttttagattatattatatgtacaattaagttcaccaataaaattaaatcttagatctgccactagtagcgatatacataccctacaacaatagattataactcgaataagatcaatacctacaccaccttagaaatcatcaatgagtcttaagaaaatgacttatcaagtttagagtcatttagaatgaagtgtcaactccttcttttagaagaccccatctttgcattcaatgattgagttcacatgccatttagtgaaaggtaagaccaaaattattttcacatgtctctcatcttttgtgtagtgcatgttgggcactctatctccctttataagaatagatggggagctctagctcttacaataataaggatgacattattttactctaataaatttttaatcataaattattggacaatattataatataaaattttgtaatattttattttttttggtatgctaatcaatcttctactttatctatttattgtgtagatttgtttaaattgttcatttagatcgggtgtcattctcttggataatttaagatgttttgtctaaatttttaagtaagtttagtcttatgtaaatcactttgttttgtaacgattcatattctgactttgtatacttttggctaaacatttaatttgttagttgaaattttctttccggtgacgtttgttttattatatttcaaatcactctattgaaaaaaaaatactttcttttataactaaataaaattagatattgaattcattaacataattaaatttgctatattgattaccgaaatcaaaatcaaaataatgaatatgagagatatttcaaaggaaattatagttttcaataattgaatctatttgtcatttttctaatagcaagttagaatagtgcaaaactcaaaatctcacatcaaaattatgtcaaacaaaggaacctgaaaatgcaatactaccccttatttcaaactattaaataatataaaattttcaataattatattaaatatatttgtatggtggttatatttatttttagctgttaaatcattattagactattgtgattaataaataaattacttaagatgtaatattaacttgattttatttatttttttaaaattaaaaaattataaatattaattcctgaaaaggtttaattaaatattttaattaaaattaatttattttaagtatataattaatttaagtctaaaaataaaatttttactcattggtaacctattatagtaaatcatacaaaaaaaaaaaagaaaagtaattgtcactcatatatatttataactagtgaacaaagccgcacttcgtgcggcatgtataataatttcaaaaattttattcatagtaaaaatattttttttgttaggacaacaaaat

SEQ ID NO: 28830 - DNA, 1758 bp, Cannabis sativa
  modified_base (157)..(161): a, c, t, g, unknown or other
tcatcagacaatcaaatgaaaaatgaaaaaagaaaaacacacacaaaaataataaaaaaaatactaatcacaaatataatcaaaacaacatataatgcatactagtaatctgaaaacaaaatataaattcaagttttgaacctagaaacaaaataannnnnaagtaacttaaaataaaaaatatgtaaacatcataaaatagagcaaccccattatgtaaaactagtttcgaacccttaagcccggtgaaaccagtttcaactcaaaacataaatgataaccaatgaagtcaactgaaaccagtttcatcggtcatttaaatctaaatgaaaaaaaacacacacaaatacaaataaaaagattgatcacaaatataataaaaaataacacattataatttagcaaaaaaaaaatatcacacacaatgcacaacactcatatacgcgtgcttcaatgccaaattatattagtataaaaaagctcaactcctctcctttccatatcaaactaacttccattgtataaatccattttttagtgctcacacaatatttataggaacacaaggtatccttttttgagctcttcaatatgaaaagaaaacacaaataaacatctcttatgtattttttttctctataccaatcgagaaacatacaatacagacaaattgagcatatatatatatatagatgaggaaagtgagagtaagctcggagtatctagggagaagaggaagaaagagatgcagaagtgagttagaacgagttaattttggaacttcaatcgttccaaattacaggtactgcccaatgatgggtctaaatggagctgcttcctctgtttgttcctccagtgcaagtgaaacaactgcaagattaagaataggaatagaaggaaaacgaatacgccgacttaagactagtttttgaggcaatatacgacaccaattccgatcccgctttcgtctcgctacacgacaccataaagactagtttttgaggcaatggtcttgctcattggacactcaaattcgacgtcacaattattgccttgatatggtatttaatacatatatattatatgtgtgacttatttggtttcattagtttgggtttgagaattgaggataatgaaatgagttgagagctttctcaggagatttaaatgcatatgctttagatttctgcaaatctcgttttttgtgaaaaaattatagatatatatataaactattttgatgatttcaattacatacagtataaatttatagattttttggtttcagtagtcatcaatatcaaaatggtataacaaacagatcatcaatggttaaaacgtgaaaactaattactctcttctccgtctctggtcgaagcggtagagagagagagagagagagaaagtagagtttaaggtttgaaattgtaattccttttagctaaatatgggatttaaaattaaatttacaaaaaagtggcaaaggagataccataaaaatttttaaatctggataaataccatataagagtggtaaagttaaaaaagccatatttatgaaactttttaatagaatcccatatttggtgtaattttcactatcttatactggtgtaattttttttatgacaaatttaaaagaaatgctaactgcagttattagtataacagaaatttatatggtatactaatttttattatttttttataaaaatattaccaggcggtattttatacagtattttttttataagtttc

SEQ ID NO: 28831 - DNA, 2546 bp, Cannabis sativa
atgctatgagaatgtgtttctcattataaataaaaatttgatgcagatgttgaaatattgctaacaaaattgaaaatacaagtagctgtaaactaaacatatagaacaagatcaagaaagtacacactctgaaaacacctcagcttacaaaatccaattcaaattcaaagctttattaatccttatacacattaaaagtttaagttatttgtaatttctcaaaagtcaacctttatgtaacacttcaaaacaaatttcttttgtaaagatattattattttagagagacaacttgagaggaaaacacttgggttctggtaagagatagatttggtacagggtaaagtgtactagtggggtttagcctgggtttaaggcattgtaattattaagtgttgtaggtctcaagtggtagtggtgacaagttgtaatctccattgtttttcatagtgcatagaagaacatcccaaggagatctaggctgaacctttctaattcttggtgttgttttattgtcttttctagtgtttttacctttgtgtatagataaagctggtgtgagggagctcaatccctaacagtttccatttaatcaaacaataaattattacaaataatataacagcacatcattacataacttacatcatctttctgtgagatttattatgagaaataataaaggattacatagaatgagggacataaatgtaaaataaaattctgaaattcccactataccatgtgataaatatgtaacagaattaaggaacttactgaaggagtacacaacacaaccaaccagccaacaaaagttctgatgggaataagaataacttttcataatgcaaaattattgtaactgagaataataacattcctttttaccatatccactaactaggtccttgtattactgtatgtgggaaaagaagattcctatgtttgttggtacagtctactccacttttttgtaccatattccttgactcatcgattcaaagaggtcattagattgtattgatacaaatgctgcagagaagccactaaaagcagtacttaaaacttaaaagcagtaattatatccaccatcaaggcaagtaattaaagtacgttaggggaaacaaaatgattagtgttagtttaaactaggtaagagaagcacaaataagtacagtttttgtatgcctttttttagtgattcaatttcaatttggccaccaaagcatttatattttgttctagaagataatgtttttcatctatgttcaaccaacaaagtaaaccaaacttttctcttggaaagaagagaacaaaagcaagaaaatataaatgtatattatattgggaagaaataatctttcacattggctaaaacaggtcaattaactaaaaaaaagtatatagacaaaaaagaaaaaaccaatgtcacaaaccattgttctgtttaggctcagcaaatctcctagaagacatttgattgaacaaatttctcaaactattcttactttccttagttctactcttcttagcactactattgttattattattatctatctgagaaaatgaggtatcaagaaccaaccctgtctctaaccttttggagacagtaacaatctcataagaatcccaaagagactgaccaaaatcccaagatggtgatgatgaagtttcattataataataattaatattattaggtgctgctgatgatgacatattactactaccattattcttgttcctcttcttcatggcttcaagcttgaacctcgaaggccaactgcctctaaaactgtaggtctttcttgcatcaaactcattcaagggtctactacttccaccatggttgtaccaagcttgagccacagctttcataatctcaacctctctcttattattatctactttctcttcaacctgctctgccctcttcttcttcttcaacatgactttattattattatcattactataattatttttattttctagtgttctaagaaagagagaaatagaaagtgttgtaatgagagaatattgaatcagagcctcacatttgtttttatcaaaaggcagagagaaagataagggtttttatttatttatttatttatatttttgaatggtttatttcattttgtttctttggctccaaagaatgtcatgaaaacctacctatgaatcacccatttgactcttctgtggtgtaggaatctgttcatcaccattcaaattcattctttttctagttaaaggtttattttgatagtaatccaaaaattttggccccttgaaataaatacatagattattggaaaattatatagtacaacactatttttgtctagcttcttatttttagcatttacaaaaattataactatctaccttatagttataattgatattcaaaaatttataattatttacactattcaaaatagtattcaaacattcaattgtatgcatgtttgttattttttttatatgtctgcaattgattattttgaactctgttattagcaaattattcacaaatt

SEQ ID NO: 28832 - DNA, 1486 bp, Cannabis sativa
tgaacgaaaatttgagacaaaaataaaaactcttcactcggattggggtggtgagtacaggagcttagcacccttcctaaattctttaggaatccacttcagacacccatgtccacacacatatcctcaaaatggtaaatctgagaggaaacatcgacacatagtcgaaatggggctcactttgttgatacaagcctctgttccccttcactattggtgggaatcgtttagcacagcagctttcttgataaatcatctctcaacacccactctcaatcacaaatcacccactgaagtgctcttcaatgtcaagcctaatctgaactttctcaaagtctttggctgtgcttgtttcccacatcttagagcctataatcaacacaagttggattttagatccacaaaatgtgttttcctgggttacagcccaaaccacaaaggatacaaatgcttgcatccctcgggtcgtgtctacattgctcaaagtgtcactttcaatgaaagagactttcccttctcctttggtttcagtgttgctcactttaaaggtgctgatatcaacacatgtcccactcaaattcaatacactcaatggttaccatttgtgtctcaagaacatgatgaaacaacaaatgctgaaactgatattgatcattgtccagctactgctcctgaagtatctccctcaatctcacctgccaaatctgcatcttccagcagtcaaagtaaatctccagatactgtcacctcctactccacgataccccttgaagtacacctgcctatctccttctcaccactaccagatcacttaccacattccccacaccagtcccaaaccgcatctcctacagaattacctcaacttcccaccaaacccctccctccccgctccacccacactatggtcactcgttccaaagcaggtgtcttcaaacctaaacttttccttaccactgccactccccaaacagcagcttcagacaatgatctttctattccaaacacggttgaacaagctctatgttcacccaaatggaaagcagccgtggacgatgagatttatgctcttttaaagaacaaaacttggaccattgtgcctcgccagccgtatatgcatgtggttgataacaaatgggttcaccgaattaagtacaactcggatggttctgtcaatcgtctcaaagcccgtcttgttgccaaaggatttcagcaacaacccggcatcgacttctttgaaacatttagtcccgtagtcaagccatcaaccattcgtgttattctctccttggccgtctccaacaattgggatattcagcaaatcgatattaataatgcctttcttaacgacacaattgatgaagaagttttcatggaacaaccagccggttttgtcgatccaacaaaccccactgctgtttgcaaacttcacaaagcactctacggcttaaagcaagcccctcgtgcttggtttgacaaactaaaa

SEQ ID NO: 28833 - DNA, 2475 bp, Cannabis sativa
ggaggtgactcaaatggtgcaaacattcttttcttctggggttctggagcaccggcgtaattacacatttatttgtttgatccccaaagaagagaatgcttgcattgttgataaatttagaccaatttttctatgtaactttgctctcaagatcatttcaaagatcattgctactagactgaggacagttattgataagttgatatcccctttccaatcggccttcgtcccaggaagatggattatagaatcatttattttaactcaagaactggtccatacaataaagaagaagaaaggaaagggagggcttatgtcgattaaacttgatatgctcaagacttatgatagaatagaatggaatttcctcgaagaagtcctcagaggtaacaggtttgatagtcaagtgtgcagtttgattatagaatgtgttcgcacggtcccgtattcagtattaataaatggagttcctcataaaaaaattctttcccaagcggggtctccgacaaggagatcccctttctccgttcttgtttctcctttgtcatgatgtgttttcaaagttgatccttatgcagcagaatagaagcattctacatggcatatctatttctagatcggccccgactattagtcatcttatgtttgctgatgaaacgatcctgtttgcacgtgataacacgaagatggctgaagctctgttggacagtattaagatttatgaatcttggtctggcaaaaaatgtagcatggctaagttgagtgtccttttctccgagaattcggccagacattagaaagataatattctccagattctcaatgtgcaagaatgtgtgggtcatgaaaaacatcttgagaatccattcatttttaaaagaaggaaaagagaagagtaccaattcttgaaagacaaggttttgaagagaattgaagggtgggaaacaaaactcatgtccttcgcagggcgttctacactggttaaaatagtggctttaagtgtacaaacttactccaggtctacttgcaagatcccagtctctacttgtcgagaaattgacagagcgattcgaaaattttggtggaccgagagtaatgagaaggaaagattcctagccttggtaggttgggatcgattatgtctccccacagcttggggggtctaggtttcagcaagcttaaagatattaacaaggctttattggccaaacttgcttggcagattgcctctaattacgataagccatgggtcaaatgcctcaccgcaaaatactataaaagaaatttcttctggagtacagagaggaaacgattcatccttatggaaggtaatttgaactcaagtggtattattcgcaagagaagtttgactatatatactgggaagagatgattcagtggacatatggaaacaatcgtggattccttggctcaattatagtgacttcattgatcttatggactatgttcggacacagtatcctcagctaaagacagttacgaacctttctactattgatggctgatgggatcgtgaggtagttcttgagatttttggtagtataattggagcatagatttgtaatattgctcgattacccgataacaatagggatctgttagtttggagagaggcgactgatggggagttcactgttaaacgtggttttgagaccaccctgttggttcgtcccaggccagacagtagcttttggaagctggtttggagacaaaaaattaactacagatacttcttcatgatttggagagtggttgtaggatgcttacctacaagagatagattaagttttgctggggagaagtcatgcatgctttgtgatatgaagctcgagactgctttgcatatcttttgggattgtccacgtgctcgagccatatggtttagcagctccttcccagttatcggtggtgtggggatgggtaattcaatgaaggaaattattgattgggtaattttgatcttacctggggagcttactttccaatttcttgctttcctgggttgtttgtttgaaggcatttggaaagctaggaatgatctcctcttcaagggatgttctgctgacatttcatcagtgaggaaatacatcatgggcaggttttcggagtctacatcgctactggatacaaagttgggtgataagcggagtgctatgaggggcattccgtctgtttacagaatcccaaattctactaatttgatctgccttccgaacgcctcatgtaaaaagggtgatgcggggattgctgtgggaatgctcgacaaagagaaaaatcactcgttatggtttgctaaaaattgtagggcctcctcggcagctgaagcggagctcatggcaatcttctaagcactgcaactgggtagggaggcagattacaggtcaattgcaattgcttgtgatgcgcttgtggtggtcaaggctttggacaagagcaggtgcccaccgatttggg

SEQ ID NO: 28834 - DNA, 2191 bp, Cannabis sativa
  modified_base (465)..(465): a, c, t, g, unknown or other
  modified_base (2032)..(2036): a, c, t, g, unknown or other
ataggggggatagaactcataccttgtcttaggttactgttacattgcacattagccgtgaggaattgatcaaaatcagcacgcacgtcttttccttccatattctgttccaatcgcacctctgctatggatttggtggatatcagaccagagtcgataccctcacaaacgcacccttcttcctggtatatctcctcatccgagacttcaagaggctcaatttcagcaattcgttccaggaattcagtccgctcatcatcagatacaactttcgaaataccacgctttgattttttagtagcagatttcagttttccatgatttttggacctagttttagccatggcaccagtcgatcgactgctagggctaaaaaccagagaaaactcctaattataacaatattaaatctatagtatattaatacttaaaatatatatatcatgctaacaaaattatatgtancactattaaaatatatataccataccaataaatttatatataatcattatatataatacaatagaaattaaacatcatcttaaataaataatatactataaataataaaaaaatatataccgtacaacaaaatatatatacccacaataaaaaataaaataaaataatacaatattattaaaaaaaaaagttgtacataccatattaacaaatttatatacaatcataaaataattatactatacttacaaaattatataccatttttatatataataaataaaaactaaatataatctaaaataaaatgatatatatcccattctttgaactatttcaagttgacggtgaaagttttcaaacttttcaatactgaagctttttgtgaaaaagtttgcaacttgctcatctgtctttagttgtttcattacaatctcgtcttgtagaactttctctcaaagaaaatgacattgtacttccatgtgtttaatccttgcatgaaagagtggatgttttaccaaacgaaatggttattggtgtcacagtacaacaacattgcataatctatcggttggtggaaatctttcattagttgtatcaaccaagtactctcttgagttgttattgatgttgattgatattctgcttcggttgttgacaaagacactgtcggttgtctcttactacaccaataaatcgttccagatccaagcataaacatataccttgttggttttatggtattaaagcaggtacacagcaaaataaaagtatttgattatcattgtaccatatcatcaggatcaccatatgtgtatatattatatttgaaattaaataaacgaaaatatggttaaccccttgaagcctattagggtatcctcaagtcttttcgtatgttgtatacttagttgatctcaaaatactcacactatactcttctgaattttccaccacatacaaggactagtgtgggatagtaggataaagtttatacaaagttcttattgaaattctcaacacatgagcaagaagtattctatagtgatgatggagaaaaaagattgatcagattaatctttttttggcttacaaaaaataataccttttttttagtttttttggttaatacggtacatgtatataaaaaccaataaaggctttatttaattaattatttaaattcaaatcatttattaaatcatatttaattatttgaataaataatataattgaattttgttaaagatatttattttttataatcaactgagggaatctctcaaccaccttgagagaatatctgaactaacaaaaatatctataactacttgttaaattcaaatttaaataaatatttatcttttaaattaattaattagttaatccaaaaacaaatctagtggggataaccctatatgataggcacctatcactgtgttagggcaaattaatagtgccaccacctatgtcttaacaagatattggtggtgttttttgtccagacaacttttgtcttttcttcaatttatttaattaataaatttgaaaaataaattatttattnnnnnataaataattactattttgacaaattaaaatagcttttttcgaactttcatatataacttttatccctaccattgactgtgtttcaaggtggcaatccagagactatgtacctataattctaagctctaataaactagattatttattgaatctc

SEQ ID NO: 28835 - DNA, 1381 bp, Cannabis sativa
  modified_base (1073)..(1075): a, c, t, g, unknown or other
taagtataaaattttcttagtataaaaagaatcatttatctaaattcaaatctacatttatatataaattagttagatataattaattgatttgaccaaaaaaaaaagaaaagaaaaaattatattggaattttaagaaaaagaaatagggaaagtccttttctcttttgggtgagagtggcctctttggaaattggccattgggcatgtaggcgtaggaaatgaaatagagtgttaatttggtgagcaacgcaggcggagtgggagtgggagtgggagtgggagactccatttttgaaggctcaaatcaaatctacactagtcagtttggagatgagagtgtaaacttcagttagcagcagcagctttcttatacaaatggcttttattcttagaaaaattcaacaggtatttctctctcacttctttttgttatggattggaaattgatgcaattcttcaacatttcaattttagctcacacttatatcttttcgtttaattcgtacccatttgagtgctggagctcaaaatacagaaaagaggaagattatatgaccttaatcactaatctcgctgattcttccattcattttttttccaacataaatgcttagcttacgtccttatgtgaacgaaatctgtaaaggcatcattgctggccttgccctgaaacaatatcagtttttttaatttttttgtgtgtatataaatgtgtgtatatttatctacattatatcttttcaggttgtaaaaagtcttggaaaaaatagaaaatttgctaaggatccaaggaaattgcaatatgaggtagacatgaaccgcctgttcttatataccaggttagttcactcggtacaactttccaatgtatcaattgtggagattgaagatgagcaggccttaaaggcctacaaacttagtggttaagttctcaatgtttgatatgtcaatatatcagtgtgtagttcattcatagcattaccataattgagtggccaaactatttgacaaagtttctttttcatgttgttgtaaccatgtatatatcaaccacttgaggctagctcaannngccataggtgggtgtgtgtgttggaggtcttgggttcgagtcccaggtaaaacatgattgtaatatataaacgcttaaataaaaaaaaaatcatgtatatatctcttagatcagcgagtttttgtgctgaattgctgggttcattttgttttgtgatttaatctttcaaaagcctctgcttctgtttgattataggctgttaccccatctttgctccctcctgagttttattggcatcccttaggtattcctttcagtcttccaacagcgttgactgaaaaatgaaaatatgtgcttccttactaa

SEQ ID NO: 28836 - DNA, 5479 bp, Cannabis sativa
  modified_base (4029)..(4029): a, c, t, g, unknown or other
aggcccatattgtagtagtggtataatcaaatcataatgcatccacctgatcaagaacatacaagtttccaaatagatttgggtctatactattataagataatgttgttcagtctgaagaatgctggagctacttatgagaggctagtgaacaaaatgtttaaagatcagatcaaacagaatatggaagtatatatggatgatatgctcgtcaaatctagggaggctgggggcatatagaggaactggatgaatgcttcaaaatcctcagaaaatacaacatgaaactcaatcccttaaagtgttcctttggggtcagctcgggtaagtttcttgggtttattaatgctcggggaatagaagctaatctagaaaaaatacaagccctcttggatatgaaattgccaacaaaaataaaggaagttcagagcttaactggtcggatagccacacttggcagattcgtttcaaaattaacggacaagtgtgttccttccttcaacatcctccaaggtaataaaaagtttgagtggacagaggaatgcgagaatgctttccaagaattaaaaagacaactcgcaaaacctcctgtactcttaaaacccctggatggagaagaactaggaatatatttggccatcactgaatacgctataagcgccgtgctgaaaaaaagaagaaaataatgtccaacatccagtgtactatatcagcaaacgacctgttgaaaccgaaggtcgatatcctctgatagaaaagctcacttactgcctaatcttagccacaaggaagttaaggccctatttctaagcccaccttatttgggtatacaccgaccaaccttagcgccaagtattacaaaagcctaatgttgctgggcgattactcaagtgggcgatagagttaggatagtatgaaataatctttcaaccccaaacaacagataaaggataggccttggcaaactttgtggctgaatgtacaggcaaggaagagagcaatacatgggacaacccaaagtcagtacaagaatccctaccagaaaagaccgaagacaaacctactagaaattacatgtggacggatcaactgctgatcaactttctggtgcaagaattgccctcatcacacctgagggcaacacttgaacggagcaatcaaatttgggtttaaggcctccatcaacgaagtagagtatgaagcactcatagctggcctaaaacttactcgggaggtacgcgcggaatacattgaggtatgtagtgattcacaattggtagtaaatcatgttttaggagagtgcatggcccgtggagaaaaatgatggcttatttaaccaagatacaagacctgctcacataatttaagggttacaccctctagcaaattccaagggaagaaaatacaactgttgatgccttggcacggctcccgagcaacacaacaacaaataaggccaacttagtcccgattcaattcctagaagaacccaacatcaattgtgcagaagaagtcaaaatgatagatacaccaccaaattggatgatacccatagcaacttatctcattggagaactgctgaacaacaaaaacaaagttcacaaaatgatgagaaaagttgcacggtatatcatagttgaaggtgtgatgtataggataggtttttccatcccattacttagatgtgtaacaaaataagagtctgcatgtctcttgtccgaagtacatgaaggattctttggtaaccacgtggcgggacaaagtctatcgaagaaaatactaaggcaaggatattttttgccgaccatgatggaagattcaaaggcctatgtaaagaaatgtgataaatgctaaagattttcaaagatcccccgtgcaccccctaacgagctaatacagatgcaaagtccttagccttttttccatatggggaatagacctgatcagacagttgccaaaaggcaagggcagagtacattacgcagtcgtcgtagtggattatttcacgaagtggacagaggctgagcccttgacaatgatcacatctaaaaaagtgctggatttcgttgtaaaaaacatcatatgccagtttggacttctgcacaagattgttttggacaatggaaaacaatctgatagctagattttcacaaatttatgtgcagcacatgaaatcataaaaggtttcctcatagttgcacaccttcaagaaaattggcaggtgaaggcagtaaacaagacactcaaagataccatgaaaaaatagcttaaagaagctaaagggaactggccgggggaactacctgaagtattgtggtcataccaaacaacagaaagaacaacaattgggcaaacaccatttgccatggcttatggctatgaggtgatgctgcctgtagagttagaacctctgtgccaaaggacactaacctataatcaaaaagctaatcacgccctcctcgtagaatcacttgacaaaattaaagaaaaaagagcctcagcaaacctaaagctattagctcattcacaaaaggtggctcggtacttcaacaagcaggtgagagcaaggaaattctttgtggaagatatggtccttagaagagtttttataaacacaaaagactacgcgacaggcgtactcagacctaattgtgaagaaccatatcaagtagttgaagtcacagattctagtgcatacaaactgggacggtatgacgaaaacatggaacttgttctagtaccaagatattggaatcgggaatatttaagaaaatactaccaataattgtacaaggtctgatggccctcttttaagtacaagatgcttgaacatctactcttaagtagatggcattagatggccttctgagcggacctcactcaagggtttggataaaatgacttccactcagatcggatgactggcacagtttaaaaaatacaattgtgttatgttttaattagctaaagatcgattagatcatgtaatagctttcataatttaataaatgtaagttactacggtagcaaaatcattcagaccaataaatgaataaagatattaattatcattctaattgtgtcaattatttttctttctataccaagttatgaatttaccattaaaatgtgtacaaagggtctactcgaacccaaaagtcgaacagataaaaacaaaacttgtgcaatacaagtgaccaagagtcacaagtcagctcagtcacttggggggcaactaaccccgtacaaagcataggtaaataacaagctcaaaaaaacacaacaacttgcatgcgtaattattaaaacttaagggaaaatattcattttaaaagataacaaagtacaataaaccgagattaaaagttgcccagtcagctagttgtcttaaaaaaatgaagtataaccaagtttaaaggtcacttggtcgactgcattatactgaaaaaaggcccactggctgacctaagctaaaataaaaaaaaaataaaaaaaaaagaagaaaaaagaaggtttcacacggctggagtccctggctctttgtacggatccactcggtcatcagcggccagagcatcaatgttttggacagtcaaagttgtggggttggccgcctcaaacttttccttgtctttctgaaccgcacaaaaactgagatatgccaccttattttcattaaggtaatcaaagttcgcatttgggttggccttgcagaattcatagattacctctagggcggccgtctctaggttgtccacctccttttgaagtgcttcccccttctaagtacacgatgctcgaacatctactcttacgtagatggccttagatggccttctgagcagacctcgttcaagggtttggataaaatgacttgcactcaggtcggatgactggcatagtttaaaaaatacaattttgttatgttttaattagctaatgatcggttagatcatgtaatagctttcataatttaataaatgtaagttacagcggtaacaaaatcattcagaccaataaatgaataangatattaattatcattctaattgtgtcaattattttctttctataacaagttatgaatttaccattaaatgtgtacaaaggatttgctcgaacccaacaatcgaacaaacaaaaactgaacttgtgcaatacaagtgaccaagagtcacgggtcagctcggtcacttggggggcaactatacccgtacaaagcataggtgaataacaacttccatgcgtaattattaaaacttaagggaaaatattcatttcaaaagaaaacaaagtatgataaacccgagattaaaggttgcccggtcagctagttgtcttaaaacaaaatgaagtataaccaagtttaaaggtcgcttggtcgactgcattacactaaaaaaaggcccacgggctgagctaagctaaaataaaaaaaaaataaaaaaagaggaaaaagaaggtttcacacggctggagtccctggctctttgtacggatccattcggtcatcagcggccagagcatcaatgttttggacaatcaaagttgtggggttggtcgcctcaaacttttccttgtctttctgggccgcacaaaaactaagatatgcctccttattttcattgaggtaatcaaagttcgcatttgggttggccttgcagaattcatagattacctctaaggcggccatctctaggttgtccacctccttttgaagtgcttcccccttctaagtacacgatgctcaaatatccactcttacgtagatggccttagatggccttctgaggagacctcgctcaagggtttggataaaatgacttgcactcaggtcggatgactggcatagtttaaaaaatacaattgtgttatgttttaattagctaaagatcggttagatcatgtaatagcttccataatttaataaaagtaagttactacggtaacaaaatcattcagaccaataaatgaataaagatattaattatcattctaattgtgtcaattatttttctttctatagcaagttatgaatttaccaataaaatgtgtacaaagggtctgctcgaacccaaaagtcaaacaaacaaaaactgaacttgtgcaatacaagtgaccaagagtcacaagtcagctcggtcacttggggggaaactaaaccagtacaaagtataggtaaataacaagctcaaaaaaacatgacaccttgcatgtgtaattattaaaacttaagggaaaatattcatttcaaaagataacaacgcatgataaactcgagattaaaggttgcccggtcagctagttgttaatgaagtataaccaagtttaaatgtcgctcggtcgactgcattttattgaaaaaaggcccatgggccgagctaagctaaaataaaaaaaataataaaaaaaaacaagaaagaggaaaaaagaaggtttcacacgactagtgtaatatccagattaaaatagtatttaa

SEQ ID NO: 28837 - DNA, 2881 bp, Cannabis sativa
aggaggttaagcaccttagatttcctgatgatgacgtggcagaatattattggtgatgttcatgaaaacagaatcatgcaatccatagagaatctaaacttataatatattttcatgaaaagcagagagagagagtttggatgaggtagtagtatactactggaagaagagagcagcaaacatggttcttctctccttctctctcctcacgcctactcatcattgctttcactcaaatcctctcttctttaggtttttctttttctttattcaattttattttagtttttattattcgtttttgtgttgtgttggggtcttatcctatttttccgaattctgaattctgaaataatgaaactttgtttggtatgtaagaaaccagagcaggattatgagtatgatgcaccataagaatggtgggtctgcttcggaacccacttctcaaattggcttttggagacgggactttcttctctttggtctttcttcttcacttttctcagttttcccatcttcaggtcagcagcttttccaaacccatttacatttttgtttttgtttttttttttttaaatttgctttatcataacaatcaagcttgctgtggtttcaggttcttttgcagaagaggattcgaagatggttccgtttgttgatgaattaaatgcttattcgtatctctatccagtggaattgccttccaagaaactccttttcaaatggtatgctttttctcaagtttataaattttaagatttcttaggcataaatgttggtttcattcaaatgagggatgatttagtatagaacttgtgtatgtttactgaaatttgattggaataactaataccaccaccactgagcaaagctttccattgtaattaccactttcaatctctgaagttaaattttgtcaaagcatttgttgtttgtgtctttgttcaaaattctatgattttcaatgttgaactgtcttcaattttcaactctttgccaacagaaaatgttgtagatgattattgtctatctctattaaaactatttattccaccttaacttgtaaaaacttgtctcttttcttttgaagggtggaatccagaaagccagaacgatactcatctgcagcaccgctatctcgtaagcacactaatcctatccagctttgcagtaggaataattcaagtctttcagaagtttgaaagatttcgtagttaacaagttttgcattctggttattctataaaaatatttgttgaatatactaaagattcatttcctaacctgtttattgtttctggcagtgattacagaaactatctatgcataatactcactggatactgttttgcatttgttacagccgatgcacgcctacggattgtgtctgagcgtgttgactttattgacaatctgatcatttctgtatcggtaactttcaataaaaccattctactaaggtaattttgtttggttatttgttcaccagtttatgatatcagtttaatttcattcagataggtcctccaaatttagggcttctaaaatcaaaagacaaaagtacatgggcagctaaagatgttgctgattctgttttgtctgataagtctgcgctggtaaatttctaccctgtgttttccttgatcttaagttgcggtttcactaacagtcttgatgaatattgtactatctatcctttgtgccaatgtaacattttgatatttactatctaagacaatttcttaaatcttacatggaccaaatactaaactgaaaccggaggttttggtcaaagactgtcaggcctgaagttttgagaaatctagtgtcttttgggatcatgtacatcgtataccatatgtgcaaagccagctatctgtagagcctaggccatagttcatatttgggcctcttgaattacagctcttctaaaaatctcaacagctagatttcaaatattcattgctagttaaaattgatgtgtgtgtgtgttgcagcgagtcacctcaagtcagcggatgagtgaaagttcagttctcgatgcacattctagtgaagtgcgattccaaaccttccttattggtctatgtagttttgacatttacatgatagtccaatctttttttgtgtggtaaatgtgtgcataaatgtttctcagattgatggtcagccttactggttttatgagtatctggttcgcaagtcacctacaaaaacagtaagcatatccttgtttatcagattcagtaaaaatatatcattgcatactgttctttctagtttcttgactctttacaactacgcaggctcaagaatcaaatattttccggcattatgttgcttcaacagctgaacgagatggtaggattctaatacgatctgctgtttttgactgtgcaatacgggaatctttagattcttgtacatgcttttcatttcttaatttatcagtgaatactaccagtttcatttcaatcattgtgtttaaaagtttcttagggtcattggccttattaaagtactctcctggatattcagctagtcttattcttagtaagtgaccttacagaaacttaaatgcaggttatttgtactctctgaatgcctccacccttaacaagcagtgggacaaagtaaatatctctctccctctctagttctgaatatatacatatatatatatatatatatatatatactttctggtatttccaatattgagtgtgtgatcttttatgtggtgcagatggggcctctgttgcaaaaaactgtggagtcttttcgacttcttcccgcaactgaagaatatgtccctccattcaaggacccctggagattttggtgatagagaattaaaagatcttaatatatatatatatat

SEQ ID NO: 28838 - DNA, 3598 bp, Cannabis sativa
atgaattttgtattgacatgggttttcacttttcaggcattagctataaagacttgcaaccgtgtttgtcaatgggtgaaagatgttgagaatgagatatttttgcttggagcaagccctttctcatggtgataaaactattaatcccaaaataactctgtagcacaccattgtactatattgtttctttttttctttcttttatcatgcccacacgcatttgaacacatcaaatgagtagggaacaaatctttaagactttgtaaaggaatatatatatatatctatatatatatatgttgtgtcttaaattttgtaatttttggtagagcttattgttgaagagagaaaggaagaaagaaaacctggacccaataaataaagagatgatttgagatttgttatcctttgtcagtcttagagtcacatgagtttatctttccatggttgcagttgcagaattaaaggtgtgaatgtgatgtgatgagatgattttcttacaatacaaagctctagttactactagagctctaaatgaaatgacatgatatgacttgacatgagtttagctaagtatgagcaccatatcatccatgagactcaaaatacatgagtttgggctatgcttcacgaggtttatgaaaaattattaaggatttacaagaagattgctcgtgctgatgttatatgtgacacaatgtttaattttatgaagttatatagttaaaacaaacataacatgtgttgtccaaaataaaaaactaaggtgatagaaaatgggttgggggtcggggccagggtatggggtgggggacagtgtcgggtttgggtctagagctgaggcggggtctggggctaagtttggatttggagtttgagagcaagggttagtgtcgggttcagggttaggggtctagggccgaggtctgagtttgggtctaggttagggtttgggtgggttgggggtcaacctcaggactcgatttgaggttcgagctggtgttctggtttggggtctacgttcgagtccaagtcgaggttcgggcactgggttccggttcaaggttgagtttagggactgtgtcggggttgtgtttaggtttgcattgggccatgacaggggctgatgtttgaggttcaggttaggattgaagagtcgaggtttagggttagtgtcaagatcggtctctaaaatattaataaaagaaaatataattagaacaacttaattgtatcaagtgaaatcgactcaattatattttcattttaaaataattttgattctcattttataaattaaaaaatatagcttaattgtatttttattttaaaataatttcttaaaagtgtctatttagaacatgtttttagaaaatattttcatttttcaaactaaaaaattgtgaaacacatccaaatatataattaaaattgttttaaaatttgagttacaaattttattaggtattagtgtatatatttaatttctatgaattaataattagaaataatttttatacataaatgtgtgtaagatgttgctaaaaaattataaaactaattgaatttgagattattagagaggaagtgtgtatttctttcctattttatataaaagcttcatttttgtttgcttcaaaattatttgtagataatagttatcttaagaaatcattaattacctttaagaaataatgtcaaacttaagtaataatattgtgtcttaccatttaagaccatgtttggttgtatttttatttttaatggaaatccattggtgctggtttggtctttggtggttcttttctttgtagatctctcataattgtgttattttatcataagagtcaaacttctatttttaaaattcaaagtatttaaactttgtagatctagcaaagtggtagaggctgccaagcattactgcttggactattggacaagatcttgtttttttatcattcatttatatatatataacataataaagatttttttttttatataatgtatacataataaatatttataataacaaacatgcacttaacaaaattgataaaagaatttatgatgtacttatttatttaaaaattaaatttataaagtattgattaatagttttttttttaattttttaaataaaagatttaattttaatttttcgcttaacacttctaaattgtttgaattaagaccggcaaaacaggtcagacacgatgacacgacttgaaatccgcacgagagttagcgggtttggttttgccttaaatgggtttaggtcgtgttcgggttgactcgtctaacacgtttaataaacgggtcgtgttcgggttaacacggctaacacgaaattgacacgttattgacatatttaaagttattttagtactttaacgtgtcataaataggttaaaaacatgttgaatacttcataaacatgttattgattgacatgtttaaacaaaatatacttataaacgggttacacgggttacacgggtcgtgtcgtgttaacccgtttataaatgggtcgtgttggagttttatttttttgacacgattattaaacggatcgtgttcgagtcgagcatgtacctgttatacatgagtttcgacacgatacgaacacgacccgcgaaaatgaattgccacccctagtttgaaccggtcctgtttatacgcgcattatttatgttaatggacattatattataatgattatatctatggttgtgtaatgttatatcataatgatttaagtaaaatattatttgattattgttattatcttttaggagagagtgaaaaagatattggggaaggaaggtggtaaagaaagaattaattgagtgggaaacttttcaaactttctcatttactactttgccttatctaatttctcttgtgggtaagagtgagacccataccttaattcctcaaaaccactatttgatgggcatttttgtaaattcatcattaccatattgtattagtcaaactttatcaaaactaaagctttgttccccaccaaccgtcctcattatatacccttttcaaaaattgtcaatttccattttctcctcacttaccattttcttttttatatagacatcatatgctagacaaacacaaattcattaatatatatgtcatttatatggtggagtcttggtttgtggagtagggcgctcaaaaaatttgagttgggatggtatgtagctgcaaaaacgttggctactaataaagaattagggttggttaaagtggatttcggaaaaataaaaaattactaagattgcttgactaacacagcttgattaattaaagcggattaaaggacaaaagtctagatccctctcagatttcaacctacaatattatttttgattgattttaactctgcttctacttacttctacttttaacttcttaatgaaactcttcttaaaaaaaactactaaaactgttatatgtaaaaaaaaaaacacttggaatttaaaactaaataaaaagtgcttttggagctaatagctcaaaaatcattttcgaaaccctaatcaacaaggaccaattgaactctttttttttttttttt

SEQ ID NO: 28839 - DNA, 5947 bp, Cannabis sativa
tgagtgagggaaggggtcatgggggattctggtagttttgggtttagggtttttttttaaaaaaaaaattaagtgtaatgatggacgggtttgggtctaaccctgacctgaccacatgcaaaaaagtcacctgaacccgctcgttcataatgactaggttcaacttgacccgaacattctatacattttttttcccaataattcggttgatcagctcgagttcgggccaaacttagcccaaatattcaaccctagtgcatggtggtggctgacgggattagaaaaggtgggtgggtaagggcggagggcttcgagaagggaacaagggggaaggggaaatgaaattaaattttttgattttgaattaggttcttacttttcacttcagtgtatgtgtgcatgtggtgtgagtacaagttaaacatgttatcaagtggtgttatatttgtatacccgtacccgacttgattaacaaccaagtgagacccgaccgcttatcaatgcatcaaagattttaactttctcgagtttttcgagttcgggtcagccgaattaagtgagtttcgagtgtcaatgtccaaccctataattttgaaataactgtggtaaagtgtagagaattgttcaaccaaacactatcacaaaagtgaatccatcttcagtttccttccaggcaactccatattttggagtagttttgtgatagtctttagagagcagcacaacttaacattttctcgtaaagtgaattcatcttttgtccaaacaatcagttccgggtgtcctttcgacttgtcagcgagcacaacctacctttccatatttggggaggagcatttggattaaaggtgactgagtagaggcattcatataataacaagtctttatttggaaggattatagcatattgttacagaagtttatccaaaaaaaaaaacaaaaccacattaaattcaaaataaaacgaaaattgattatcttacacaacttgaaaaggctggactgagaaatgatcccagtgaacttggacaacaccatagaagctctgtaaattaatagaacaaaataaaacataacatgttccatagaagaatgttagtaccttttctctcttattcatatagcaaaaacaatttattccaagttctttagaaactagagaacattaattaatgctaagcaaaaatcattaatgcataaactggatcttttccagttacatgactctaagttgttgcatacatatttaaatgggtaatgtatacccttactcaaatgaccaagattcaaattttcatacctatgataagtaatatatagcataatttagagcaagtcagtagcacactctaaagaataatatagtattaaatcacacactcgaaagtagtcaaatgaagacacttctgtcttcattaaattggtcagttttttcagttagtgatagacagttgggaatcttaggatttggaaccaccgccgaggcccaaaaacttatcagctaggtttgccacactatttgctagggtgtttgcttcgtcttgtgtggaagcctctgcgtaaacacgtatcacatcttctgtccccgatggtcgtatgaaacatcggccttttgaatatttagctgcagtttttgaaaaggagaaaatcgtgttcttaaagattcgatcatgttgagaatcaacttttctcattgaaagaatagtaacatatgctaaaatttaagttttgtgacaccattttaacttctaagaaagatcttaagctacatacctgtttcagcattaatggcttcttgaaggccaggcggtttcacaacctcagtttctgcatttgctgtaacgacagcagttctatctacgactttgacctgataaagtaagcaaagtttagccagttaaaagatgtaagaaatggtaaaaaaatttacttaacataatattaaaaaactagttcgaatttagagactgagacctctagttttacccacattctactctcatcactgaactacggataagagaaatgctaaaaatagacaccagtggtacttaacacccttctcggtgtcatatcgctattggtgcaattaattatcgagtctcatacaacttaagataataacttttagaaaatattgctaaccaatcgtaaggtgccacttataggtgatgctaggcaatactggtgcccaatagcaataggctatgctctcagtatactaccgagagtttggcaaaaaaatttggagatgtattgtggtcaacacttcttcataaatattttgaatggagaaattaaggcctattatattccatctacaatgtcatcaaaagggaaaacttgaaagtgaaaacactgtccacgcacacaattatacacaacaaagaactaataattaccatgatctaaagaaaattcaaaaggaaggaaaacaagaagatcacactaacatttggttaaatttttatacttcataacaatgccctaaattctgaccaaaatcaagttacctattgaaaatttacatgacagactacaatgataaatataagatttggtaccagaaaatattgcttccaaagacaaaacttcatttattggaaaagataaaggaccaatgtttcacataaaaattaatattaagtatctctaccttaagttgcttactggggagatcatgataaagctcactccatcgatgtatcgaccatttcatgtgtcttaatatagcctccactaaaagaattccacttatagcatctccaatagcctggttgattaacttactaactgctaataatctcaaagcagcatttctttgctctgggtctgaaataaacaccaaatatttcatgagtgttagcatgtcattctattatttgtattagatgcactaaaattcagttattagtttataaccttgagcaccagaagaaagctcatcattcttggcctctaaccaatgtagaaaaggttcagagaacaaaacagttccgtggccatttgcttcaaaatagatcccaatatcatactgagcggctttctcgtgtaggtgcttcacccctgttggtgtaagaacaacttcaaggcctaactgcttcaaataatctgtggatgctccatttgcataagcagtttgtacaacaccaatacgacattgataatcatttccagcaccattggttttcttcatgagaatgcttagctgctccttgataaatatagcaaacaaagataatatcttgtccccatcaacaagttcaatcttatcactatttttcgatggcactatgaaatatacaaatcgatcagcatcgccatccaaactagcacacctgaattattagaaccaccccagcaattaactccatcactgaagttagcatttagcatcaacagtatatcattaacataactaaaaaggaactaccgtacagccatgtgattaggatttcacaactacgaaattaagataaatgctcgaatcatatcattttattcttgaaaacacaataaaattaaactatcaaactagctttaagtgaatcaaaagtcctttagtagcggacctagtcattgctcaagttcaaaacttcaagtatttcaaaagtaatttcattactccaattgtttagacaaacaactaactcaattcaaacttacatcaaaggtatttacaaaaaaaaaaaaaaaaactacacaattttgctatatattttcattctgcttactgctttcactatatttatcaattaaataatagcttaccttatcccaacatcctgtgaaccaaaaccagaaggaacaactttctctttctgcacaaaatcggcaccaacaccttcatttagcacaccaccgccacttccagtgtttcgaacctcaagttctaaccccttcaagttcaacatttccttcaaaaccaaaagcttttcacctccaacaccattagcaccatcaacaaccaacttatgaaacccctcaatgctttcacctccaccaggaatcaaatccatcaagcacctaaaccaaaacccactcaaaccctttaatatctaatccacagttacaattctcaacccataaaccaaacaaaaacaaactcaactcaactcaccaacctgaaggacatcgaaagctgctcaaagtaatcgaattcggctgctcgtgtactacaattactagctcgaaccatccaatgtagttgaggagtagtcaaaactcccacatcgatagcaacagcaccaataatcgaaccaattcccttcaacgaatcattgatacaaaagaaaaatcaaatcttcaattattacaaagcaaaactatcaggaaggatattgggcctaactcaacctaacaattaaaggtggatcgagtatatatcaccggctaacgtgagactttaatacgtcccctcttgcagaacatacaacaacattgaactaatcgatattaggagtacccaatattgtaaaattaggacgaatcatcagtacaaaagaaaaatcaaatcaaatctacaaatattacagagcaaaactatcaataaaaatattggacctaactcaacctaacaattagggaaggatcgaatatatatcaccaggtaatgtgaaactttaaaattgatattaggagtactcaatattgtatcagtacaaaaaaaaaaaaatcaaatctccaaatattacaaaacaaaactatcaggaaggatattgggctaactcaacctaacgcacaacatagactatgcttaaacaacagtgaacaaatcgttatttagaagcgaaggatgcttaactcaacttaacaaaagctgcttgtgatgagagaattgccctcatcttcttaattggactaatcaatcaagtatatacgacaagccaaattatgaatttaatcaaaactacactttttcaaaggaacaaaccacacaaatcgaaatcgaacacaaaattactattattgaagaagaagccttacaagtttagtagcctcgagcagagaaggaccactaggcctggtatctctcccaaccaaaacctcaaccttcttctcaccacatcgctcgatcttctccgatataagttggataagacaatcagcagtaggtgcgttggcgagtgaatctgcaaaaggctcccaatcctgagaaagcatcccaccggttgggtcgacgattttgacgccattatcagagacctggttatgagaagctgtgatcatgattccaatcacggattgtgtctttaaagcccttaaagcacccaagatccccatcctgtaaagagtggatgggagaagagaagcttcggctctgaaaccagctgtgccgtaagatggcttgaagccttgtgggagtgggaaacgtgaggctgtgcttagaagaagcgatcgctgctcttcttccatggttgatggagtgaaatttgtctgaggagagagagtgagagagagtggcatgagaagaagaagaaaacgaaatggatgaaaaagttaatatatgattcctaattatgtatcttaattaattaattaattctaatttggataagaaaacatttcgggctcgtttggtttgtcgtgctgtattggattgtattgtattagattagactgtataattttaaaaattacctaaaatatgtgaaaatgtcaagagtttacttttttatgacataaataaataaagctaagtggttacgagtttttttgtttttttacatttatatggttttttatgccatatttttgtaaaaaaaaaaagtagaaatcctatatttgtaaaacaataataagttttgccggaaaaatcacggtcaccgaaaaagtcgtcgggaaagtcaccgaaaaagtcaacgtggccggaaagtcaacagaaaagtcaacatcgctaaaaaagtcaacgtcactggaaaagtcaccaaagtaaatgtctcatata

SEQ ID NO: 28840 - DNA, 6155 bp, Cannabis sativa
  modified_base (2500)..(2506): a, c, t, g, unknown or other
tctggattacattgaaatagagtttttttagggcataaaacccaacatttgtcactgaggaatacaccaaggccattcctcagagaagacaaggcgcactaggagctcggtgggtttctcctccatccatagtaaccaaggcaaagatgacgaatttgcagaagcacaattacttaaggaatgtcgaatgcttccttccctccccaaaccagatggcaccagtccaagggaggggcactccacttgttcgggcgctcacactaagtagggtgctatgttgcccttgcttctgtactttaggagaatcgcagattactaccacctctatccgacccagtttactccgaagagcatcaagcacctacctgccctgttcaccctctatgcctcacaaggatggggtgagccatccccgctcaacaccaacaagctctttgatctgaaatcaactcccaagcaaagcacgtcggggtatttctacttttctcagatcaaggaaaagtggcggacgggcaccgtggactccaaggtgagcaagataaggaattttcttgatgagtactattttttccaaggaatggacaccgtccacactcagttctagaaaattccctcgtattgccacactctcttcacattggggctcagggagagggcacaaagaattctccaactgctggacgatgctcgaaacattactctcctggctattgaggccaattatgtcaagtacaaactcttcccaaaagattttgtgccaaggcccgtgaagaagaagaaggcaaagccaaactagggcagagtgatcgagcaagagagactgagcaaaaaggggaagaaggttattccaaatgaccaggcacaaattgagcgtgctatcaggattacggaacctggtagacctgttcaaccatcagtcccagtggagggaaaaggaaaagttgttctgatagagtaggaacaagaggactctttagaaaatgaggctccatccttacttgttcggagaatgctcctgcccatgtattgggtttttttaacttgtatttatttatttcataacgtgctttgcatttacttgctttaactttcttgtcttgtttatatgcagacatgtctcaaaaagtgcttcaatccctgaagaaaaggattggtgatagttcgagccagactcccccacacaaacgatcctcaggcgacaaggttctgtccaaggagaaggtgtcggccagagaagtgattgacctctctaaggtggtgcctgttatggactctccggcctagaaagtatctaagtctaagagttccaaaggtgggagctcgaatggatctggtacagccaaaacctcaccaactaccgtggtactgagcctagaggccaaaaagggaaaggacatgctccagtactaccttgatcggtcacttcttaaggtgagtgatcagttgtccggggtggacaacgagctgtccttgtagttggtgatgggtggagtcttgaaggaggcagctcgggtaaatattttcttctttgtttgtatcttatctttttacccatgcaggttttaactttttttgtgtaggtcaatctaaagatggcctacgcctactcccgagccaagtccacagctgcaaagaaccttgccaccaccaacaccctacagagggaggtggatatggccaataagaaggttcagaatgtgaggaatgagctcggagaggtaaaaaggaagctccttactgccaacaaccgggtcgatgagctaactaaagagattcaagaaatgccatcaaccacccagctcaaggcagataatgaggccttatcgaaggaggtcaatccgctcaaagatgagagggagagtcttcgcactcttctttcaaagttggaagaggaggtcaagactaggcagaccagggaggaagagctcttcaaggaggtggaaagcctggaaactgctgccttggaagtcttctatgaatttcagaaggccaacccctaaggaaattttaattacctcggtgattccaaagaggcatatcttaattactatgcgggtcaggcagccaaagaaaaccttgaggcagtcgattctacagttccaactgaccagggtactaagacccctgtcgtccaatgtgttgagcctccggcccccacagacaaagctgacccgtacaaggagcccaggacccctgctatttgaagcatttttctcttttttatttctatctattctgcccatgggcctttattagagacaaaatgactgaccaagcggtttttaaacttgggttatatttttcattttgagataactagctgaccgggaagcctttaaccccaagtatattgtgccttatttatcttttcaatgaacacttcaccttgttttaataattattcatgcaaactgttatgtttatttgagcttgttatttacttttaccaatgctctgtacaggtattgttaccccccaagtgaccgagcagacttatgannnnnnntcacttgcatttcacaagtatggttttcgtctgtttggccctttggattcgagcagagctttgtacgcatttaatggtaaatttataacttgctaatagaattgacacaattagaatttaaataaacatctttattcatttattggtagaaacagtcttgttaccgtagtaacttatattcatagagctattacatgatctaatttgatctttagctaaatttaaacataaaacaattgtacttataaaaagaaattggacttttaaaggtggtcatccaacctgagtacttaattattttatccaaacctctgagcaggatccgtccagaaggccatttacttaagagtaaatgttcttgctttgtgtccttaaagtggtcatccgacctggcacatttactaataatactttatcaaatattccccattccaatatcttggtaccagaacaagcttcatatttttgtcataccacccaagtttgtatgcccttgattctacaacttcgaccacctgatacggtccttcctagtttagtttgagcaccctactcgtgctgtcttttgtgttcaggaatacttttctgaggaccatatctcccataaaaaatatcctttccttcactttcttgttaaagtttgagccatcttttgttgatgggctactaactttaggtttgctgaggctcgtttttcttcaattttgtcaagtgattctactaggaaagcatgattagcttcttgatcgtggtcaatcttcttttgtgatggaggttctaattctacgggcaacatagcttcatcacataggccatagcaaatggtgtttgtccaattgctatttttttggtggtgtggtagttcctctggtcagttccatttagcttcttcaagtaattttttcatggtgtctttcagtatcttattaactgctttgacctgaccatttgattgagggtgtcctactacagagaaactttttacgatccaatgagtcatacgaaaatctgtaaataattggctgtcaaattatttgccattgtctgagatgattttgtacgtgagtccgaaccgacatattatattcttcaccacaaagtccagtacttttttagatataattgtttccaagggctcggcttctgtccacttcgtaaaataatcaattgcgaccacggcatactgtaccctgaccttacctttgggcaattatctaatcaggtctattcccaaaacagaaaatggccaaggactctgcatctgagttagctcgttaggcagtgcacggggtatttttgaaaatctctggcatttatcacatttctttacatacgcctttgaatcttccatcatggtcggccaaaaatatcattgccttactattttctttgataggctttgccctgatgcgttgttgccacagaatccatcatgtacttcggacaaaagtcgtgcagcttcttcttttgttacacatctaagtagtggcatggagaatcctcttctatacattacctcttccacgatgatataccatacatctttcctcctcatctttcgagcttcgtaactatcatttagaagttctccaatattgaggtaggctggtatgggtgtcatctagtttagagttttgtctatcattttgatttcctccgcacaagtgatgatggactcttctaagaattgaattgggaatagattgaccttatcagttactgtgctgctctcaagtcgggctaaggcatcaacagttgtgttttcttctcttggaatttgcctgagagtgtaacccttgatttgtgcgagcaaatcctatattttgcttagataaactatcattttctcccccgaggcttcatactctcctgacacatgatttactaccaattgtgaatcactacaaatcacaatgtattcagcatgcagctcccgagaaagtttcaagccagcaatgagggcttcatactcagcttcgttgttggaagcattgaatccaaatttgactaccccgtgcagaggttgcccccaggtgtgacaagggcaattcctggaccatacagttgttctgtaactgacccatccacgtgcaatttccgtgtaggtctatctttattgttgttcagcatggattcttgtattggctccagattgtcccttaaggtgctttcttctctgcccgtgcactcaactacaaagtctgctaaggcatgtcctttgactgttgttcgtggttgaaagattattttgtactgacccaactctaccgcccatttaagtaaccgtctagaagggtaatggttggtcggagtatacccgaacatgatgagccttgacgtatggccttaacttccttgttgctaagaataggcagtaggtaagcttttctatcaatggatacggtccttcagcttcaacgagtcttttgctgatatagtacactagattgtggagattgttctcttctctaatcagcacgacactcacatcgtattctgtaacaactaagtatattcctaattcttcgtcgtccacgggttttgagagtacgggaggctttgcaagttgtcttttaagttcttgaaaggcatttttgcaatccttcatccattcaaatttattgttacctcagacgatgttgaagaaaggaacacacttgtctgttgactttgaaacaaatctactcagtgcggctatctgacaagttaagctttggacttccttagtttttgttggcgatttcatatcgaggagggcttgtatttctctgtattggcttcgataccctgagcattaataataaaaccaagaaacttacctgatctgactccaaatgagcagtttaagggattgagtatcatgttgtattttgtaaggattttgaagcattcatccaagtcctctatatgcccccccagccttcctggatttgacgagcatgtcatccacgtatacctccatatttcatctgatccggtctttaaatattttgttcaccagcctctagtaggtagctccaacattttttagaccgaacaacataactttaaagtagtacagacccatatctattcagaaacttgtgtgttcttggttggtggatgcattccgatttgattataccccgaataggcgtccataaagcttaggatctcgtgttcggctattttatccatgagctgatctattcttggaagtggaaaacaatccttggggcacgccttgttgagatggataaaatcaatgcatactagcaattttttattgggcttgtttcactaagttatggctcgattgtgaagaaatagaattttaggtttatttattaattaagaggcttgtggagtctaattaaaaaaataatataaatgaccattttgtttgataattaattttaattattaaataaatagttttggcatctatagaattagtgttggaaaatatggcatttgtgaaataatagataaatggttgaggaaattgccaaaatataattagtgtagggcccacatcttggccggccactaagtcccaattttgctattattttattattttttattccatataattcaatcctaaccctaagtgaattagtataaaaagaaaagaatagtctcttaatccaactaatacttttaaacc

SEQ ID NO: 28841 - DNA, 4555 bp, Cannabis sativa
gaatagggtatttaaggatttccttgatatatgtgttatagtatttatcgatgacatccttgtgtactcccaatcagaagtggggcatgaacaacacctttggaatgttttgcagcgattacaagaacacaagctctatgccaagtttaaaaattgtaaatattggttgtctcaagtgtctttcttggacacattatcaataagaatgggataatggttgatatgggaaagattgaattttttagtgattggccaaaaccgaagacaatacaaaagttagaagttttctaggattacctggttattatcgtcagtttgttgagggattttctaagatctcaacgcccttaacagaactgaccaaaaagaatcagtggtttctatggacaaataagtttttaatagttgaaacaacgtttgattacagctctagtattagcactaccatcggataaaaagaagtttttggtttattgtgatgcatctagatagagtttgggatgtgttttgatacaagctgatcgggtaattgcttatgcctacagtcagttaaaggaatatgaatagcgatacccaactcacaatttagagcttgttgtagtggttttttccttgaagatctggcgacattattcgtatggggaaaaatgcgagatttacaccaatcacaagagccttaaatatttctttacttagaaaaaaattaaatatgagatagaggcgatggttggagctggtcaaggattactattgtgaaatcctttactatcccgagaaggccaatgtggtggtagatgctctaagcaggaagggtcctgggcaagtatctaacatgatcatgatttaaccccaactagcaaatgacatggtcagatcaagtatagagtttcttatgggaaaacttaataatttgacactacaatctaatttgttagacaaaattaaagctgctcagctagctgatccagaattggtaaagattcgagaagaggttttagttggtcaagttaaagacttcacagtgtcaggtaatggaatactattatacaaaattcgagtttttgtttcgaacagtgtagaaatttaaaatgagattctcgaggaagcccataccactccttattcattgcatccttgcactactaaaatgtatcaggatttaaaacccttctactggtgatacgggatgaagaaagacatggtagaatatgtatctcactgcttgacttgtcagtagattaaggctgaacaccagagacctgtagggttgttgcagcctttgactcttcctgaatggaaatgggaggatttcaccatggatttcgtggttggattacctagaaccacgaggttgttttattctatttgggttgttgtggattgatttaccaagtcctcacattttctactagtaaaaacaacatgtacagtgaaccaatatgcgaacttatatgttaaagaaatagtgaggttacatggggctctgaagtccattatatcggatagaaatctgaagtttacttcaaagttttggaaaagtctccagcaagccatggatacgaatttgaaattcagtacggctttccatccttagactgatggacaatctaataggataattcatatattagaggatatgttgcgaacctgtgtgatggattttgaaggctcctagagtaagtacttaccactaatagagttttcatacaacaatagctatcagaatactatagggatggctccttatgagatattgtatggtaggaagtgtagatctcaaattcattgggatgaaactagagaaagaaaatatttaggtctggaatcagtacagcagaccagtgaagcgatagaaaagatcaaggccagaatgcttacctcacagagtaggcaaaagagttatgcatatccaaaatataaaaatgtagaattccaagtaggagatcatgtattcctatgagtgtctctgatgaaggggataaaaatttcaggaaaaagggcaagttatgccctaagttcacaaggccttttgagatccatgaaaagatttgattggtagcttattatctagccttgcctcaaacactttcagcagttcataatgtatttaatatttctatgttacagaaatacgttttagatcccactcatgtgctaagatatgaaaacctagaactccagccagatttatcttatgaagagcaaccagtacagattctggataaaaaggataaggtccttcaaaataagaccatagccttagtcaaggtactctggagaaacagtaaggtggaagaacccacctaggagttggagtctgacatgagggctcaatatttgaagttattcaggttagattttgatgaagaaatctttttaacggggataattgtaatgactgcttaactttgatataaaaattagcaaataattagggtttaatttcataaatggacttattattattatttttatgattttggggataaatttgaattctaggcgtgctaataatacacaacatgtgaaatttatatttttttatattttatgctcggtaatagtggaacgcgacatttacccggtaaagtcactttctcttatggtttagtattttagaaatagcagggcaattttgatagacattgagaacatcgggaatatttgaggtttaagatttgaccaaaatatcctttaatagtaagattacttttggtgaaaaaaatggcaaattggtaagctaccctcttttgtccttattgaaatttcgagaattaatattctctttatttccttagtttctaaataatagcagttatctcttttttaattagaaatatcaattaagttaagttagaaaaatcaactcaaataagattgatttctctctctcgaagtctctctccctctcgacctcttttagaacctagctgaaagctagcgcttttttgattcaattgttgggtgttctagcaagatttctctaggatttttatggattcaactcaaggtaagatcctacactcttttctctttgtttttgtaagttttaagttaagtttgtagcttattttctagattagggttgttgtatgatctgattaggtttattggagttttctgaagtttgtgtttgataattttagtgattttaagctaaattgagtgcttgttgtggtctttgaacaaagtttgagctttagaactcaaactttgttctctcatggtgatttatgtatttgaggttatttttcagttcttttgcttggattatgttctttatgacttgaataggtggtctggaaggtttggtgcaaattgggattgaattgagttgtttttgttgttttttggggttcttgcattgaaccgatcgatcggttcagtttggtcctgtagaatcagtcaactggttccttcccaggcagaccccataaaagcagttttctggttgggaactggcttgcgggttgggacttgtctgacaaggataagctggacgctgaactgcgtgcttatgaacaaacattgtcaattgcaaggagggctcgcttcagtgttccagataagggaaaatgaaagttgaagatattaaggatgattccaccgataatgttgcttcttcaagttcaattataagagctacaattcaaattgaaccaccaattgagacaatcaaagaacaactaaacaaacgtattcttctattttctcactgtggagagaaggaacattttaaagcaagatgtcccaaacttctaaagcatgatgtcctaggcttctaaaccatttggattgttgattttggatctactaatcatgtttgctctttattgcagctacttgaaacttgggattacttaaatctaagggagttgaaggtcaaggttggaaatggcgaattagtatcgctccaagctagaggaaaagctcgcctcaagtttcagaacaaatttttgattttagacaatattttgtttattccaaattttagtagaaacttgattagtgtttcatgtttacaaacataacactttcaattgaatttttcaagttctatttccactatttctcgtaatggcattcaattatgtattgctcacatggaacaaaggctttatgttttaagaccagatatattaattgcgctcatgaacgaactttttaatgttgctaaacctagaaatcataaaaagcaaaagattgataataatgatatctatagcatttgcgacttagtcacataggctataatagactacacagattagccaaaggtagtccattaaaaaatgtcaccttgggtgaattactagtttgtgagtcttgcctaaaaggtaaaatgactaagtgttctttctctgtaaagggagaacgtgccaaaaaaacctctagggttagtacattcacatgtctgtggacctttaaatgtaaaagttagaggaggttatgattaccttatcactttcattgatgattactctagatatagttttctttacctaatgcaaaagaaatctgaaatgtttgagaagtttcaagaatttcatgcttt

SEQ ID NO: 28842 - DNA, 1622 bp, Cannabis sativa
gaggtgatttgcctttctcaaaatttgctccaggacatattaaagatagttttaagtttcttcatattgttaatattcttagacaaattaagtttgactagatactttcaacttcaaatttatctctattttaattttattatagttaaaatttacttaggtcatttggtctgtggtgcacgaaatttgactcaagtttttaatgattagttggagtcttttaaagttttacagcttagttatttttagagcatttctctcatgttgatcttgcatcgcaatttttccgacccaaatagagtaactttataggtagacaatgaattttatatgaaattttttatgtatttttcctatattttttaccataaagaagttttaacaataaattttgaacattataataataaaactacttattgcttatataacttaattatgattaagtattaagtttattattatggagagtgactctaaggtaataattaatactttcaatggcaaggagactagatgaaagattgtgaactatttttcattttgtaaaagaatatttcttattttgttggttgtttattttaatattagtaaaattggtaattttattgcccataatatgataaaagaactttattttttgctcatcaatcttgaaccgtatcagagtggacattgtccacaataatattgtttatcaatatcctccgttccaacaaacatcttttataatgatcacaaagtttaattttatcaatcaatgcacatttatatctaaaaaagaagtggaataactactatcagtgacagattaagataaattatgaattgatgtagataactttttgcgaaaatatatatgaaaatgtgtaggtaaaaaaaatctataccatgtagttttaagattggtttctttagtgcttaatatcgttattattagtgcatttattatcaaatttaacatatcttaattaaattaataatataaaaaattactaactacttaacgtattatattatagtgttggtcatcacattaaggtgtctaataacaagactctaaatatattatgaaaatagttcaagatcaagattaatgtaaatatgggtcgaactttttgacatgaaaccggcacaagcacaacctaacacaaaaaaatatgtgcacacaatgcggaaaaatatgggcttaaacacaacacaaaatgacacgatattgtgaattggcatcagacaacacgaaaatataggtttaggcacgatacggtggacaagttgaccctcattgaacctgccctctaaaaaatcttaaaatgtatatatattttagttaattataacatatatttataataaaagataatatttatggacataatattagttttggtgtagtagttaagctatattgcatatatatattagaggtcaaatgttttaatcctaccaactactgggtccaccactaatggcaagcccgacgtaagcacgaattaattagctcgaaaatatgacacattaaaaacctcaataatttgataataataataaatgttaaatatttatttatcaattaaaataatagtaatattcacatactattaattataattattttttaa

SEQ ID NO: 28843 - DNA, 4021 bp, Cannabis sativa
catgatctatactatgtatagaatttgtaagtggattcatattaattaataatttttagaatagataatcatacgaacaaaacttctcattttcccattgatttagcattattttttcgcctattttttggcctttttttgtcttgacccgacttgagagaatcgagtcacgcgacccactttcagacccagttcaaggttaaagatgaacccctccaacgaagcccattcttagcctctacgcgtgggggcgcgtgcagcacctcttggagtcattttttgacgtttcttttttccaacgtgcttagaatttaattttaaatttttctataattttcaattaattgtttgactccatttagtatttattattaatttaatgataattatatagttaaaaattattaaaaataatttttaatgatttttcgaaatcattaaatcatagaatattttccgagcttcttctcgttctatttgacatagtcgctcgcttcttttgattcattttgactatgtagtctccatcaatactttttttacgtctttttatttttattgttataaatttgtaaaaacttgattgtttgatgcaaaaaataatatgttatgatggacactttatttattgattatcgatatattataagcttaaagtgggcacttatgttgaaattgacgttatctaagttgtctcatttattcttgaattacagtttagagttaagattgtcttgaacaataatttttttgttcctacttttaagagtaatttagtttcgcttccgcttttggttaaacaaagataatatttttctttttgcaataatcatattgatattacatttgactcccaatttattggaaacttttattctattggtctttacaattatactcccttagctttcctttatattaagaaaatatcttattgtaatggcacaaaagattagatcatatttttgaagcaagagttgatcgattacttcaagttaaaattctttctcctctttatgcttctagttaggatacttgtgtttattgtgctcgtggaaattgactaaaacaagaaagaagattgctaaccgtagtcaatatttattaagaattatctacaatggcattagtggatcttattccactacgttttacaaaaaaaaaaataataaataagtattttataactttcatcaatgaattttctcgatatgccttaacctaactgattaaagaaaaatttgacgctctagataaactcaaaatctttcaaaatgaggttgagaaacaattaaaaagagtcatcaaagttgtttatttggatcgtggagaagaatattatgatcattattcaaaatcttgacacacatgaagctttttgcttaatatttacaagaaaattatacagtttctcaatacaccatgcctggttaaattgagaaaaattgtgttgttgaaagaagaaatcacactctcatggatatggttagaagcatgatgagtagatcaaatataccagagtttgttatataaaattgtaaagctacgcaagtgcaagtatcaagcagtgcagcagtactcacataggtgaggtcaaatcacagggacttgaaattgaatactactaaataagatttatatttcattgtatccctcgtacggtgtggcctgaggaacctctttcccttctccttcaccttcaagagaaccagttgcaagggcttcctcttggccatcagcttcccctatttcctcagcagccccaggcatctcaggttcattctgtggctttttggcaaactccacagtagccatagcagtaagtcaggaaagatggggatcctcaatagcaacctcctcgggttttgctaagtctttgccattcttttgggtttgggtagaggagtaagcttgacggtatgtttagctacagtaattgcaatttttgcctgcgtggagtttcttctccaaggccctaggtggccctccgaaagtgtgtcagggatgcttgcgcacaccttatatgcccaagaggtcaggaggtattgcctcaaacctccattgatttcccaaatgaaccttttgtaccacttgccgcctatctatttgggttaatgatggtgctgaacggtgggttccaaagactctgaagaaccactagatacttcccactcgtcgaagcttgaagggaatgaatctccacttgctgatgatgaatctggtcggggtcttggttgtttttcatggagcagttggagtagattgctaactatttggtgttcaccttccctaaattttcctaggttcacctacaaaaagagagggaggtgaggaccgaacatatgagagtgatactctgaccaaaaggatttgaggatcaaaaagggaaaaaaattcatcccggcgatgaaaagtccaaaacagaaagcttcaaaaactcaaaaattacccagaagctccgaagggctagagttaagaggccgaacaaggatttacaagaaattcgcaataaaaaaggtgtaattccaattggaaaccaaagaccaagaaccaagcgcatgcattcgtgttaccaattgaaaattctaattctactcacaaagaacaagttccaaaaatctagattttctagaacactttaaggaaaatagaaatatgtcaaaattaaaaggaaatggtgagaaaacttactcactatatcaagcttatgaaaatcattctaggaatggtttgtgtaactttgaaatatgagaacctcaacaaaaagcttgaatcttgaataagataagttcttttgctctgagattttaaaatttaaaatgggaaaaaaatgaaaaagaagcttgtttccctttttataagttgtctgaggggtatttggcatccccccccccttaagaaaggacaataagtactcattaaagagtataaccatcagaagcacgttcctatgtaaccgtactcacaatagccaagattctatttcctatgcaaggcattaaatgctaaggatactaaagagacaaccaataatttgcaacttacatactgaataagttcacgtacgagcggttgtttccacacgaacttgggggcaaatattatttcaattttcgcatgggatgacgtgacacccaataaggtgacacatgaagatcattccaagacctgaacgggttatttgcctccagatgctctatctagaagagtctacactcaaagtttcctagtaagcacctaaactagacttgtgcttaatgctccgagtagaatgtcttttgctagctaagcagaatcctccgcatagaaggacgcaatgaatttagattctttaatatatttaccttaaatattttctaatttatagcatggttaaatctctacatttatggggtttattttgcacagctgaggaattcgagggatttggcatttgattttatatttatttcttattatatttggtaaaaaatattcattgtatcttctcaattaatagtggagtcattccactgttaagggggctcgagttcatattttctaaacaacacttatgttgtcaaaatatttgtaagccttcatcaaggttgttaagaaactcacatgggcagctccttgtgatctaaataatctttgaaacaatacaacaaaaagagaaaaaaattattaccataattaagggatcgaatctgtataaaaaaaattctcatgttcttattgctcatagatattatttaattattatttttaattataattccatcactttaaacacgcagtgtcattgcctaaaatcaaagtcaaatcagctaaaagtcaaaacaaaatatttaatagaaattaattaataaatattgaaaaaataacaaaaaggtaataaaaatctgaatttacaatattttgtatttttataggtttttttttaaaataaaaatacggactattattttgaaatttttacatgaaaaatcctttttactcactttattacataattaccctcacacgcctattactacat

SEQ ID NO: 28844 - DNA, 4029 bp, Cannabis sativa
aatgatgacctcgccgtacccattcgcaaggaggagcaaagtacgcagtagtggcagttggcttcttcacaaaatggacagaggctgaagctctagttttcataacatgcaagaaagctctcaactttgttgtcaagaacataaattgtaggtttggaatacccattaagatagtatctaataatggaactcagtttgatggtgaattattcactgagttctgcgagaggaataaaattattaagcgcttcttgttagttttaagacctcaagcaaatgggcaagtagaagttgttaataaacccttgaaggatactatcaaaaagaagttggacgctgcaaaaggtagatgggtagatgaactaccattggtactttgggctcatagaacgacggagaaaacatcaacaggacacactccgttctcactggtatttggctcagaggcaatgctgtcagtagaagttaataccgcgacccacagacgatatttctataatcaagaagaaaaccaagaactcttgaagctttccttggatctacttgatgaaaaatgtactgagctgcaaattactaatgcagcataccaacactgagttacacgatatttcaacaagaaagtgaagaaaaggctctttaacgtcggtgacttggtgctaagacaggtatttgcaaacacgagagacacatctataggagtatttaatccaaactgagaaggtcctaatgtgatcgaagcaatagtgggagtcagggtttataaattagctcggcttaacggctcgctaataaagaaccattggaatgttgagatttgtgaccctactaccagtaaagtcacagacatgttgtaatctctttttctgatgtaatttttttttaattcaattattaataaagttgaagtattttccaagtaattacaaagttttattatttaaattacttgaggggcatatgtatgtgtatgatcaactagaatttatctagaaagacataatatattgcaaacctaggcaatgcaaagtcaatagtagcagtaaatgagatttaactcataaaaaacaacactaagctacatgcaaagctgagtatccaatggctcgcatcctataggaaagtataaaatgaggtaccaagatgccttgaaaaaaaatacttaacctaaaatatgaatgtggaaggcacaactatttatataagcaatcataaatgtacaaagtaatacacaagatgaattattcaaagtatgtttaagtctgcttaaaaaaaaaatttaactatttacgcaaagtagaattgataaactgctcgcgaatgcctagcagataataactgctcgcatacatagtagattattaactacttagggactacaaaaaggaaaacaagagtagtggaaatgcttacttaaagtattttaaatttgatcaaagtataatagtttaagttgtgaattaaaaggcaaacaaacaaatatattaagttcaaatttaaaaatacgaggcaacatatgaaagataaaatgaaaaagttggccatccaacaatgaaatttgtctttacaaaagtgccagaaggagcaaatcattgtctcgcccacatggccactttcctacataaataaaaaaaaccaagactacattgtaggtgacttggatagatctgttgttcctcgacttcctcttccttgccaagcttctccttcctggttttctcacaaaaggctcacatggcttcagctccttagccgaccaggtctgataaatggtcctcctggcgatgctatgaaccatgtctttggagtcagcttccgcctctttgagctttttgtcatgatcagcctggagggacttgagggcatcctcgagctctttgatcttcttctgatccgccagatgttgcctttcggcctcctcctttgtgcgagaaacctcggccacagaggttccattttttggccagggtatccctgtgctccctgacctagcgaacctcggtcttaggcctctcaacttgctgacacgacctatgatgagtagcaaaggagagaagagaggcctccgagaaggaagcaaaaaatatatataatgagaaaaagaggaaaaggaaactaacttgatgcaagagttcataactcctttttctaagatccataacgttgttttgcgtaaggagctcccagttgctaaacccaaggatcatgaagttatgccacccattagtaaagttcagcgagcatattggtgagccctctgtttcgaccttcgggggtaagggacaagagggctcgagaagaaccacctctagacgagaaccagagaacttcacttggtgcactgacctagtaggttgttcattggaattcgtcgcagtagggacctcattctctggggatttggctggcttgatggtgagttggccaaatgatttcttcttgttggttgtggtcttggccctcttgggttccttagtagaacccgagacctcaccaacttgggctactctcttcttggacttctttttggctgggggatgactcttgaacatattccccaagtcgaggtccaaatctgtgatgtggaagaagcacattagcacttaagcaaagtaaacaaaagaaaatgggaaataaactcccatttgagaaagttaccataatcttcagaagatgacgagggaggactataatattcactaagctccctagatcttgtgataagggtttcttggatctaagtcccaactttaatctatgtgacccgatctatccaacatagtttcatactgctggacaatcgcatagaaagaactagtgcatctaatttgaacgtgaaactctaggtacaacctatcaaacctatgagttatacgatctatgaggaaggggttccaagtataaaaattgtatcgactatctcaaaaagatacaagggtgttacgttctgccctaagcacagtgggagaccacccacattgattacctcgggatgcttccccttcagcttcccgaggagtgaccttttgaagttaatgtacgtgagccacgtaatcctcgctctcttcatcggttggaaccagaaccttttgccacgaagtatacttatgtactttataatcttaagtatatcatgaaggcaaagaaggccaacattcttcagatttgtcttgttgcacaagaaatttatcgatctcaaccccttgcagctcgcttccttgtgaagactgccttaactgagtaaaaatatactatctccaagactagggtactccattcctaaaatatggtataggaccttcaagctcgcaaggatcctatacgagattgggtttagctagaaaggggtaacctcaatgtagttacagaactccttaaagtaatctctgaaggataaaaccaccctaaccttgatgtgctcaaggctctaggcaccaatgctcgaggaatctcttgtgctgggtccactgcactcctcgcgtattaccctttctggaggaaaatagctgaattctcctagagcaacggaccttatagtgcaacctttcctctgctttgtaccgcatgacttcagtatgccaccaaaataagccccaattgatctaaccttggatgcaatgagttttgccccaaaggttacattgggatcctgtggagtatttgatttatgaggtttaggagacataatgtcaaactcaaggtcacctggttcaaaagcaacagtgacttggggtaaaaatattggtctcgcaggtggaatagaagataatattgagggtttaggccaggctacgtctcgcaaaaaatgacgtctactctaaaaaatctcttgaataaatcgcctacaccgactgacaatttcttgttcgacttaatcaaatgatctccaattttggcatcatttatctctaatttagaccgaggtttgaaacttttaggtttcaatgggagggctatttctttagggctttctgtttctaaaaactctagagaataaacttctgaactagattgggacatttctacaaaaaa

SEQ ID NO: 28845 - DNA, 2190 bp, Cannabis sativa
tttggccttgatttgagcaaagcttatgatcgtgttgagtgggattttgttcacgttatgatgctttgtacggggtttgctagttattttgccaacttaatcctagaaactctcagcatggtggagtataatgtgttccatggtggtaagattcttggtccaatttgtccaaaccgtggtattcgttaaggtgacccactttcctcctacccgttcttaatttttgctgaaggtttttcttcactgctgaaacgttttgagagcaatggttttattaaaggttgtaaagtagcaaacggggctccaaccatatctcacatgctattcacagacgatagttacatttattgcagagctaatgacagagaagcatctaatgttatgagattacttcaactctttgagacggcttcggggcaacaagtcaactttggtaaatcatccatcttcttcagctcaaacactaatgctgaagttaaagaccgaatttgctcaatacttcacatggagattgctcctgacaatagtacatacttgggacttccttgtacaatggggagaaacaagaatgcaatactgggatttcttaaagacaaaatgcagaagcgaattcagagttgggagggtagactcctttcaaaggctggccgagaagtgttacttaaaatagttgctcaggctcttcctagctatgccatgtcggtttttttgctgcctttagacacttgctctgctctggagagtatgatgtctaaatattagtggaatactacttctcaagacacccgtggcatcacctggatgagttggaagaggcttacgaagagtaaaaacgatggaggaatgggattttgtagccttcatgattacaatctttccttactcggcaaacaaggctggcgccttcttcttaatgatcatactcttttgggacgtgtgtataaagcgagatattatcctcaaggaaatttccttacttcctcacttggaagcaacctaagcttcatttggaagagcatctttgagtcacaagaactaatcaaagcaggtgctagaattcgtattggttcgggtctagaaactaatgtcctcactactccttggctcccatcagatacgtctccttatgtcaactctgatcatctttctctgcagacttgcaaagtctatcaactaatgaagactgatcttaaagaatgggactctgaagtgatatacgatcttttcaactcaagagaagcacagatcatactccatatcccacttaatagcaattccatcgaagatgtttggtattggagcaaagaaccaactggtttctactaggtgaaaagtgctataagcacctgcaagttatgaagggtaactggtttatggatgatagttcgaacttgtggaagaatttttggaagattaaagtccctcctaaagtcctccactttgcttggcgagtcttaacagattgcttggcaacccgtgttaaacttcagattaagcgtgttctagttcagagccattgtttattctgcaactctacagctgagactacccttcatttgttccccgattgtccattctcaaagtcttgttggaacatatcagcggtgacaattcccccttcgactgctaccagttttcttgactggttttctgcagtgtggaatcggcacaaaggtgatgctattgaagaagttttaatgatcagttggtctatttggaaagcctgcaacaacattgtttggaacaataaaacaagtacggctgctgaagttgtttctatggcacatcaagttcttggtcaatggaaatttgctcaaagttgtcgctttgagccgctgctcctaagctcaaataatagtagcagcagcgattattggacaaaaccaccagaaggaatgatcaagattaatgtcgatggtgcaacattcaaagctgacgattcctacgggacatgtttcattgttcgagactcgaatggagctgtcatttttgtctcttcctcctattcgaatggcctttcaagtgcaccctttgctgaaatgataagcatcaaagaggccttaaactggataaaggcgtctaatttttcggagtgtatcaccattgagactgattgtctcacggctgtccaagctttgcattgtcagcttgatatgccttctttatttggagttattgttcaagactgca

SEQ ID NO: 28846 - DNA, 2477 bp, Cannabis sativa
ggtatggcgattgggttgcccctcggcctcaacccaatagccctctccatctctttttattttaagtttttttttttttatttaaatattagcccataaaacccacacaaactttttgataaaaaattatttgaattacattttattttgtactaaaaaaatacactttatttaccaaataaaatacttatttttaaatttaccaaataaaatataatgagctaaacattcgaagatcataaatgatattattacgaagaaaaatagtgtcttaacaggaaaaaaaatggtgtaaatgattattaatttattgtgacaattttattaaccactcctaaaaaaaccacataattaatttgtgtacaacattctataattattgttaatcaaaatttgatgatgacataaacataattactgccacaatgttttgtttctaaagcaaacttacactaataaaagccaatatttattattaattaaccaagataaaatcataacaccctctaataaaaagtaatcatatattttctcaacttaaataattagattaattggtaataagtttaatgagaacaattcaaaatagaattatttatttattattaaaatgtggataaataataattggtgtattcacaatacaccccttttaaaggagatgtattgatgcatcattcacttgtttcggcatacaaaaaaaaatttagtctatttttttttttttaatattagtgcacgttataattatttaagatattttacaaaattttaaaaaaattcaaactaatttacaatataaaaaattatgttcaaacagtctattttacaagcgtataaaataaattagtcacacgtgtaacacactatttgaactatgttttcagcgtgttaaatttttctaaatttcttaaagttttagagaatatcttaaataattataatatatataaccatgagaaaaattgactaaaatattattttgagtatcaaaataaacaaaggtgaatcggttcatccttttaaagggttgtatggttgaatttttcaataataatacataattaataatgataaaaaaagtaagttaattgaggagagggggttgcttacaataataagtacaaaaacaaataagaccatttttacatactccaaatccacttggctctaatttagaacattcttcattacaactctcatcaccacattttgtcaacttcaccaccttttgacacgtgtgctctggtatcctcaccattccttcactcaaaaatcccaacaattcaactgcacatacaaacataccatattctaattccatcatcatcaaaataacattcaacaacaataataaattcataataattatattactacttgaattaatcttataaaacatgttaagaccatttggatttcaacaatgtataattttattcataaatcttcttcaaacattcctaacaactagcttatatctaagattgtctctatttttatcggacctaaaacaaaataaaattcaaataagtctttgaaccgtttctctaacaataatttttctagagtattaagattagtgttaaaaaaattaagaaaaagaaactgggaggccctcttgggttaaggggccttggactactgccccggtcgccctactctgaaaacgatccagcttataataaagagagagagagagtaataacctgaaaaaagaagcaagagcaatagatgggaggaaatcttcatggtttttagtatccctttgtaataaacttggccttaggataaaatcacctaactacttcaaaaattggcaaaatgttattgttattgcctagtcatataacaagacaagcctaacattcttaaagctaagctatatataatataatagaatagaatttctattggaatggaccaaaaggatggcaaggaataaaaatgtaaaatgtatttcttaagataattataataattaattaattaattacacctcttctctacttacttagtaattaagatttcaccatatatagtcacttttgtgtgttaataagctttttggcacaatcaaattccttgcttggctcatacttttcaatacttatgtgttaaattgttataaactcattgctatatatccctaaaaaataagaaataaaatttatttaaacaagttgtctaatccatttaaggacagtacatactaataaagaccagagtcagtaaaaaagtgacaatcttaaaagaagcttgtgcagtagtatagtcaaattaagactaaatgaacaaagagaattgtatcatctatatataccattatacattcaccaaaacaaatatatgattagtaatgtgttttaactatgagaattgggtaaaaagatttgctttaccttcaattgaattcctaactcataaaagaatataacaaatgtcaagaaaaatcactaagaggctcttttgacttg

SEQ ID NO: 28847 - DNA, 2068 bp, Cannabis sativa
tgacttcattgttggacaaccaatgtatgaacaagtcgtgaaaattgattgtaactttgtagaagacgatgttgaattcattagaaatgatatcaatgaaggaatataggtcaattgtgattaaacaagagataaacaaaaaaaaaaacgtgtctaattgataacttgtaattatgcttgtttatgtagttactcagttatagttaacttgtgataatgtttttttatgtagatactcagttatagctaatttttgattatatttgtttatgttgtaaatatgtcaaacttagattcaggtccagattcaaacttagacccagcagcaaagtgtcctaggtcacaaatgtcccaaacaaattgatggtcacaaaatgttcgaagcaaattgacgatgtgttaagaaggtaataatgcaattactctctatataaaaaaaaattagctaagttttgtttattaattaaaatagtaatataattttcaaaacaatacatatacaagaagattaggggacacatgagtttcttgaaccatatccataaataccagaagtaatttgcccaaaatacccaaaaaaaaaaatgaagaatgtagtttttattgaaatacatgagtgacatcatcaaatctttaaatactcaaattcatagagggaaaaaaaagtaagattaattattttcttatttattatattaacaaacaatgtataatatatataacaaacaagaatattttttttatgtttagataattctttagtactttatgtcaaagatttttttggcacttagaataattttaaaatatcttgtaatatatttactttaaataatgtaaatatatacatttatttagtttcttaattaatttaatttttaattatacttattatataaatttaatacttaattaaatatattaataaaaataaaaatatatataaaaaaaatctgatttaatatcaaaatcaaatttttattcaaaatcatattttaaataaattcaaaaaaaaacaaaccataagactttggttattacacaataaccgaagtaatacacctatacggtgtcagttatttaataataactgaagacataggggttaatcgcgcttaggtagagaccctatagaagtgattatttcataataactgttgtcataaggggtctttatgccttcggttattttaccaccctttagcgacccttgagatggcaacagttgcaaaatttgccaaaactgcctctaaaggctatatttgtagtagtcgtctttcacacattatttgatataagaccatcttgaatgtatgatataaaaaaggtactaaatttagcacaaaaagaaagtaaatgttatattagcaccttttttataggtgctatataaaacctatggagattaattgtattatcgtgtcaatacaattatgacatgatatgattattaaatgtgttgacatgatacggctaaagtaaacatgatcacgacacgattatcaaaataaagtgttacccaaacttatttattatatgtttcttgtcattttcgtattgtgactaggggcaaagctaaaaataaaatatatatgtggggcgattatctatttttatagtgacatgttaagggtatctatagtgcctagcaccctttatgaagtgtcataagctattggtgcaatttaatatcgaatttcacttattttacttttaataatgattataaaaaaccaataactatttatcgcgcgttacctcgtggtggtaccaaagatcatgtgtttaataacaatacttattcttatattatgtgtggacttcaatatttaataaaaattatataattgactataataaaatataaaataataaacaattacattaaaatatattttaatgtaatcacattttaaattaattgctaagttcaaatcccattaacaatacaaaaattaaaatgaaggtatggaattttgaacttaattgtgatctccttaaattttaaatacagatttaccaatatactaaacaatacaatttgttaatatttgaccagattaatatt

SEQ ID NO: 28848 - DNA, 1425 bp, Cannabis sativa
ttcgagtttaggccaatgctcattacatgaacgctatgtttctaatgatcttgtatgtttttctttagaaaaacagagagtcctataatttttgttaaacatatggtccaaaataatacttaccctgttttatataaggttatttctagtttttgagattcgagtttaggccaatgctcattcattacatgaaagttatgtttcaaatgatcttgcatgtttttttttaacaaaacagagagtccaatcggaaacttttgttaaagtttaaaataatgcttaccttgttttatataaggccatttccaggtcttgaaattcgagtttccgccaatgctcattacatgaaaacaatgtttctaatgttcttgtatgtttttctttgttattaacaggtttccttgtgtacgcttgtatagttctgattgtggttgctgtgcttattttccaatatgttccacattatggtaaaacccatatggtggtgtacgttggaatttgctctctcatgggctctctcacggtttgatgtcctctctattatatatttttttttcctttgcatagagttagagagaaattcgccattcattttcgttattctgctgcagttttcccttatggtattaactcattcttttgtaggtaatgagtgtgaaagcattgggaattgctttgaagttgacatttgaaggatcaaaccagttcatttactttgaaacatggttttttacagtggttgttataggctgttgtcttatgcagataaactacttaaataaggtacttaacttacctaacctatgtcttctaaggcgattttgtttcggttgtttaggctcgaccgaccgtggatcttctcgtatcgtagtgctattagaatgtttaatctgttttacttggatgaatcttttgtaggccttggacacctttaacacagcagttatatctccggtctactatgttatgtttacgtcgttcaccatcctcgcgagcatgatcatgtttaaggtgatttttaactaactttttcgcaagtttcttgagtcgttttcttagaaatttatgatgtcaaaacctcaatcataattatgtatgacatgaaaatctggtacataatatataaatagactgttgttcaggcaatgtggtttgttctcacaaagattaaggttcaagtctcacctttagtacttacatagcaattgttatagttttctgatcccggaatattgtagggttaagccgaggatcttcaaataaaataaatagattgttttgttatggctcacaatgttgtctaatctaatttagccataaagtagcaagatatgatatttgagcttatatttaattcaacataaaatggattcttataatatataaatttagtattgataaaagctattttagattggagttttc

SEQ ID NO: 28849 - DNA, 2998 bp, Cannabis sativa
taaatctatttttataatttttattagctaatttattagatttggccattttcttaatatttttaaaaagtggtcatttactaacttagttaccaaaattatgaccattttgcatctcaacccattttgaaaaccacttattaggagtttggttacatagacccatgatcctcacattatttgggatgggcaatttaagaagtaaagagatagcttctttgttaattaagacgagtttaattaataaatatatttaaataataattttttttatataaacatatttaattatccaaacatatttaaaataaatatatttttataaatatgtttggataatattactttcacatgtaatcaactttccatagcataatatgattttgatgttattctattgtgtaagagaatttaagtcttcttgctcctccaatgttttgtagttggttaaccgcaaatgggatgcgtctatcttgtgtcactcacaaagtactacgccccatattatgctttgaaaactggcacattatatatatcaccaactctctatatgaaattgaaaattcacataaagacattggttttcttcatgtccacacgacttgggattgatcatgtaaattcttctaagaaactccatcccagttttttctttctttacaggttaattgtatttgcatatgaacactaacaagttgtataaataattgctcaaataaataagcatgttgtacaacgcaactagattacagttggtggtttctttcattgcataaataaataaataaagaacaaaacaatagagatgtttagttaccgtagcttcaattttcgtttgtcaaaatgggacatgtagggcaaaaaaatagagttaccttatgttacaagactttgggttgtgctatgctacagtttataaacaaaatgtgagcacatcattggaaaactaactagtatttgattacatgatggcgtaaccaaagatcgtacatcaccatatgaaatgcatcgtatttgattggaggtgagttccattggaagtgcttttgaatctgatttaaacatgccatgtaaaaatatgctctttgaacatataaacattttgtaaacgaaattaagtaatgaagttgaagatgagagaggctctcttacctgaattaagttcctatgaagagcaagaaactcttcatcaggtatgtccttaagaatttgtttaagctggtagacatcactctccttaagtaccacagaaaattttcgccaatcaaggatatcgttgaatggaagatcataatagtttgataatatcactggaaaagacatcagattataatacgttagcatagaactcttcaaaagatggaccacaaaatgttttcaaataatgacaccagattcttatcaattgtttttagtacaaacccctgtaagccactgctttccccaaaacctaattgactaaatcggttctttcatttaatgaacagaaacaagagtagtgttattgtttgagcatgcaaaattcaataagataaaagaacgaaaagtcatgggctggcccaaaatttcatattagatgtttataggttaagcaagctgaaaaagtattaatgggccatcatgtgctggacagcttactgatttcaaaaataaaaagaccaaattcttaccaggaatgcatccataatggatggaatcggtaattcgagcactgttcacctgggaacctccagggcatatgcagtacttagtgatgtaaaatctcttttggtacaccagattcccagtagctctgttaattcggttatttaatacataaagctctgtgtcattttcccaaacttgtgccaatataactcgaattttggagttccgatgaccagcccaaaaaccaaggacagtcctgaaaaacatcatttgattagccagtaattaatacacagtaatacaaaatcaaattaagttaactacccagcactaactaattggcaaccactactagatagcgagaaactaatgtctatactcatacctgttctccacatcatttcctccagcgggcagagcaaaaggctgtaatatttgaggcagagcaacatctttgtgtggaatgaacccaacatcatagctcggagagcatacaactcgaattgaattctttacaagaagtgaaagtccttctgttgccctaacaccgacatcatgacaagtgacaaaaaagtgatctgctcccaaggttctattccagtaaggatatttggaaattaagccctccacataattccggacaattatggtcatattctcataagttgttccctgcaaatatttataagcacatggttaaccagaataaaaaatgataaattagagtaacacactgttgggtcgtgatcatgctcatttagaagcaagccagttcaggatctcatgtaaggtgcgaaaaatttcagacaataagaaaataaacaaaactgacaggaaaatgggaaaaaagattaattagcaaaaagaggattccacaatgtggagtaaatttactgaagaatggaaaaagagtgaatcgaaacagaaaaaaaaaatccagcaatgcctacagacaacttgtaccataagaatacacagaaggttaagcaaaatgatttaaatccagaaacattaagtaatgttaattgcatgtcgattccaaagtttctgtcctgaagaaaaggagttccctgataagcataaaaaatatatatttattatttataattacttcggaccttttaagatcaagcacagagaattcaaaactcagggtcaaaaaaataaggttaaatacaaataaaattagcacaacgagtgtgatatcctgtattaatcaaggattgtaataaaactaacaaatcatctttacctcccccaaaagcattccattaggtaaaatgctaaataagtaaataacctttccccctcacataattttaataagttatccaaaatatatccttccaat

SEQ ID NO: 28850 - DNA, 1188 bp, Cannabis sativa
ttattatttaatatattcggtaaaattttaaaaaattcgaaaaaaatttaacatactttaaatagagtttaaataatcaattacatgtgagatttttttatttaataataaattgttgaatattattttcgacgtattaaatttttctaaatttttcaaaattttacaagatatatagaataactacaacgaaaacaaccataaaaatataaaacgaaatttcaaatactaaaacaagtaggggtgcatcggtggactccttttaaaggggtgcattgtgaaattttcctgataataataataataataataatagtaatagaaaattctacaatgcaccctcataaaaagaatgtattgatgcatccctatctattttagtgttttgaagaatttttaatctaatttttttcataatcatgttcgttgtagttatctaagatatcttgcaaaattttgagacatttagagaaatttaacacaccaaaaataagattcaaacagttagttgcacacatgactcttttattatatacgtgtatgtaatagactgtttgaaaactatttcttatattgtaaattattttaaatttcttaaaatattgaagtatatcttaaataactatataaagtacacaattaagaaaaaaattatactaaaaaattatttcgagtgccgaaacagataactggtgtatcagtgtatcttttttaagatgtgtgcattatagaaatatccaataataataagagtaatttgtggtataaatacttaagtttaacttccagttgcaaataaatacctaagtttaatttttggtggtaataatacctaagttatatttttgaaactctgtaggtaaaccgttaaatattaagtcattatccacgtgttattttctttttggtatatttaaattaattttttctaaaaaaaataaaaatttaatgactttgaccgatcaagaattgccacatgacaatttacttaacacttaacagccaggtacctacaaaagtttcagaattataacttaggtattattaccgctaaaaattaaacttaagtatgtatttgtaattgggggttatgttatattatttataataatataatatatagattaaatatatgtaataaactaataaaatgtaacatatgacaatgtatattagttgtcatctttt

SEQ ID NO: 28851 - DNA, 1771 bp, Cannabis sativa
taaccaagaaaaatcagcggttaacgtggacagatgggtgtgaaattaacttcaagaactcaagcaaattttaatcactactctagtattagctttggcatcagatccagaaaatttttggtccattgttgggcatccagaccggatctagaacgcattctgatgcaagctgttagagttattgcttattcttttcgtaagttgaagtagcataagtaatgttacccaatgtactacttagaacttgtgacaatgattttacttttaggttcttacaaagctatctctatggagaaaattgtgaaatattttattatgaaaatagattggaatatgagacaaaggcaaaggttggagttagctaaagactaagatgatgaaggccaatccagtggtggaaactcgagttaggaaatgtcctgggtgggtctccagtacaaccatgatttttttcctcattcagaggctgccatggttggtttaattttggagtttagaaggggtaaactcaataagttaacacttcaaccagatttatcagacaaaatagaattactcaattagtggatgcaaagtttgtgaaaaatatatagatcacctctaaactccaaaattaatccaaccatgacagcctacaaagtgccaggagtacaaaactgaagctgggcatagttttctacccttagatagatgaccagtctgaatggataatttagataataaaagatatgttgccagcttatgtgatgaatttttaagaatcatggaacagtatccgcctttgataaatttttattcaacattcagttaccaagttatgatagggatagttccctataagatgctaaataatttgatatgtcatttttgaaactcggaacaaaaatatatagatcaaaagtcagtttagcaaattagtaaggccttatagaagattatggccaaggtgactacttctcaaactagatagtaaaagatatatagatttgaagctcagaaacacaaagatcctgagtagggggaaatcatgtctttctatgaatatcatcagtgaaaagagtaaaatatttttgggataaggagaagatattccctaggttcctaagacttttagcttctcaagaaaataagattaataatttctctcgtttacccttatgattagcatttccaacactcatgatgtttccatgttgtatgctaagaatgtatgattgagaattgacaaatatcataagttatgaaatattagaatttcaggcaaacctattttgtgaagagaagtaatttgagattcttgataagagagataaagttctttggaacagaattatagtattgatctaggtacttggtaaaatagtagggttgaaaagccaccatgaggactcattgtccgaagtcatccaaattagattttgacggcaaaatctttttaacagagataattgtgatgactgtattattagatcataggaattagcaaataattaaggatttaaatattatattatgattatgtacttcttagtaggcattaaggcttattgtcagaaataggccttaggaaaatattttctcaattacagatatatatttgaattctagatgcattatatatgttatatatgaaattttataattttcatattttgtgcccaataaagatggaatgcaatgattgggccaatagagttgcttaattatggttgagtatgttagaataagcggggctagataattaaaggtttggaatgtcgagatttatttg

SEQ ID NO: 28852 - DNA, 3524 bp, Cannabis sativa
aaggcaacaaacatacactacatagtaaacatacagaaaatattttctagcagaataaactaagtaggggcatttgtggactaatcagcatctctcaaacataggaagcacaaagaagattgcctagtgcgacctgctagaccattagggatcatgttcttggctttttcttttttattcttaaacctacaatccaacggtgatttgctaggattcttcacatattgaagtttgataggattggccttaggattgtcaatggtttctgttacctctcggtgaaatgcttccattttctttgtcacttcctcctttttttagttagtttcatcaccaacaatttgtaatgccaagtcaagtctggcagtgtggctatctacctaccaacattcagagcaaataaaagtcaatgtaactaaaaatgactataaattgagactagtcactcaaaaaaattatgaaaactcttcaaggatttaccttatccatttcggtctaagatttggtgctgaggtgatgcatatgttgcatcataaagatacgataatctttattgttttcttgggactgagctctctttgcttcataaatttcaaactcactaaatgatatttcaccaccaaaagctatgttcaactccaattctagaatctcatcaagggtattaagctaggcattgagaaatcacaaaacacagtgaaaacatattacgacactacaccaaacaatgaataaggaaatgtcacactaattatatccctaatgatttcattcctttctcttcttgctaatgttgaagtcatggaatccaaaatttcaacacatttcttcttaatgtcaatattcgataggaactagtgtccggaaagtcccgtcggtgctagtaatagaacaagtatctgcagtcagccatattcaatccaataaaaatcatttaatgcatctaccttttataaacacatatatgtataagataatttataagacagttaagtattattagtgaattgtttaacatgtaggcagtgtttcagttcaccactgtagtgatattgtctccattgctctttgtcagaaataatctttactgacattttttaaaattgttttttctgcataaaataaaattccaccaagtaaactatactacacttcttataagtaatttatacattgaagaacactaagtggcataccgaaacagtggttggcgtgaccaatatgttccgttgcccttttgttcttactttgctaaaatttgagcatagcaagtaataatctacaaataatagcgttactacagtaattattaatggcaaacaaaaaaaggcagtagtaattacaaggcaaattgaaattagttattcgtatccaaaattatttacatttccatccataagatgacatggtaaaaagctggtgaactgatctctaaccagagtattactcccattagcatataactcttcactgcacaatggaataagtggcagcattaaaaaaaatcattcaaaatattccaaagagaaaaaacatgacgaaatgaaacaaaagtaataccgcctttccaggttatcagtgaaaataaactgagccaacttcattgattgctcgtctacttcattcattgctcgtctttttcttcttttaggttgaaggcacacaattttagtctgttggttgtctcaaaatccttccaagctacctcttcttttggaaacttgcttattttctcaaccactagttccaatagttcacttttactttcctttgcttcttgagtatttcccaaatgtcccaaaagcataagagaatagtccttagcattatcagaaccgacagctccaccagcctcatctcggccacgtgtgggaggattgtcatcaaacttctgcttcactccaccagtattttggagctccattaattgtttacgaacctctactctacattggtcgggtatatcattcagcctctagtcaatttgctcagcaaatgtttcaaaccgatgcagtatagtctcaagcaaaagatcagattggctagtgctggaggtcgcctctcagtgagcaacatgaaaaaaatcccttttcttttgggtgggaatgatcgggtctacgacattgctaggagtcgtagatttcttttcagttagcttaacctacacaaaattaagcggcaaaagcaatcacacaaatgttcggtacaacataaaaatgaaatcttacaaagaataaaaaaaagaatagctataaaatgtaaaaatacatacagagctatctcgaaaacctcctttgcgactgatgaaactccaaaatttcttcaaatggttgttgtcccaaaaaataataggaggtatgcttctctcaacatgtcctcgaggccattggaccttattaatgtacaatggtatgtttcacatttaattatttaaaatattccaattacctggagaaaaaggctacaacttagcatataattaattttcccccgtttataattttgcatatatgaattcaaatgtgagaatatgtgagttgcccaattcaatgatcttattttgttgacatctcttacaacagaaaggtaggtattcttcacacgcactccagatgttgggcacaatatggctccaacaacatacaatacataccccatgatgaatattgcatcatcagcagctgaatttcccaaaaggacctccaaatcattgagtttgcaaagtttatcgggcccaagcaataattcttgataaggatcctcaatatcacaatgagttaaatttatgggtgtacctccatcttttatacccattactctctcgacatctttcggttccaacacatgcagagtgccattcatattaaggacttttccaccaatgtccagggagtccatcacatggtatattaatgagcctttaattttgtctatattcatctctaaaaatgacccaaatccaactgcacgcactgttttcttctgcttatcattcaaccttgcattaacccttaacaatgagctatatttacaacaacaatttaccaaatttttttgatgctagtctgattttaatctcaattcaccatactttgccttctctgatggtttcaaagtatcccataactcacccatagcacttcaaatctgtataatatagaaaatcaagtcattacaaacgcttcccaattccaaaccattctaaaatttgagttttaacaagttcacgtacttcattcagcttcaatttgggatgactaattttaaaagcttcgtaattttttcggctgcccaaaaattagaacgcatacaataaataaactagacataaaattaacattggtaatattactatgtgaaatttatgtacttactagaagtcaaagaattgaacagtctttggcaattcaatggtagtttggacattagaatccagtgaatcgttacaggaatcactgtaagcatcacttggcatgtcaccatcacttaacacagattgtttcttctctttcgaatgcattttt

SEQ ID NO: 28853 - DNA, 1676 bp, Cannabis sativa
  modified_base (708)..(711): a, c, t, g, unknown or other
ttacctccgttaggagtgaccatggtggtgagtttgacaatgatgtcttagaattgttttgtgatgaacatgattttaaccataacttttcgacttaagaactccacaaaaaaatggatttgttgaaagaaagaatagaacaattcaagaaatggataggtcaatgctaaatgaaatttcactaccaaaatatttttggctccagactgttaatacttcttgttatattttgaatcgtgtttttattaggcccaacatgaataaaaccccttatgagctttggtaagggagaaaatcaaacattggctattttagagcttttggatgtaaatgcaatattttgaacaccaaggacaaccttgaaaaatttgatgctgaatctgatgttggaatttttttagggtattcaacacatagtgtagcttatagaatatataaaaaagaaccattgttgttgaaggatctattcatgttgcttttgatgaaactaacccgcctacaagcaaaagtttagatgatgatgttgtaggtttgggagatgaggtctaaaatctcgatattggagaatcttccaatgctccttcacaaactcccaaagaggaaccaccaatggaaaaggtgaatgaaagccaaggtatgaattctaacattccacatgagtggaaattcaaaagttctcatcttatagaccaaattctaggtgatccnnnncaaggtgtcactactagaaattcctttagaaacttgtgcaatttcattgcttttatttctcaaattgaaccaaagaattttaaagagaccgaattcgatgaattttggcttctagccatgcaagaagaactaaatcaatttataaaaaataatatttgggagttagttcaaggactgtcacatcagtcggtgattggaacaaaatgggtctatagaaacaagatagataagcatggggtcattgtgcgtaacaaggctagattagtgacccaaagttacaatcaagaagaaggaatcaattatgaggaaatatttgctctagtagcaagacttgagtccattagaatgttgttagctttttcatgtcacaataatttaatcttgtaccaaatggatataaaaaagtaaagtcttaaatcggtacattgggtttatgtctctcaaccactcgactttcaaatcacaaatactctaaccatgtttataaattgaaaaggctttgtatggtttaaagcaagcccttaaagcttggagtgaaagattaagtatctttcttatttcaaatagtttttcaatggataaagcagacaatacaacttctttataaaaaggaaaatcaaaagacattattatagtacaaatttatattgatgatattatgtttggtgctactaatgatgctatttgtgaaaagttttctaagtgtatgcatagtgagtttgagatgagcatgatgggagagctcaacttttttcttagacttcaaatcaagcaataaaaggatggcatattcataagtcaaaccaagtacatcaaagatctacttcaaaagtttgacttgataaatgcaaagtctatgaaaacccccatgagcacatctataaagatggacaaagatgaaaatggtaagaatgtggacatcgccaagtatcgaggtatggttggttctttattatatttaaccg

SEQ ID NO: 28854 - DNA, 2327 bp, Cannabis sativa
ttttcttgtcatgaccaagataaccgcagttgtaacataactttggtagtttaaaataacggaattgaatccattctttccttcctctttttatgtcaaggaaaaacccagagactaactggtgggaagtgtctacttcaacttggaacttcaagaaacctcttctgataacagttctctggtctgctaaatcactccgaatgaaacgacccgcctttgctgccagagtacgagagttgacaccattaagatatggagttggtaacccggataccataacccagaaaatggctttacgcatgtccgcattgtaccaatccccatcctctggccattctttgatgataagtagcttcccatttatgatccacggtctgttctgaagcacctccgcgcaatcttcctctttgtcaaagaatataccccaaacaccgggtttcaaggtcttgaacttccaatatcctttaagcttccatatctgacttaggatttctttaagtctagaacgtgaaactccttttccatcaaaaaaaactgacaagcaccccgtgcggacaatctcctcagtgagttcaaaagccggctccaaatcaatggtcattgactgcaagaagttgttacgcaaggtttcaagatcctcattggttttggcattaatgtctttggggtccggctcaacaaacccttccttagcctcatcagcattaactccctcattgacatcgttggaaggttgttgggagtcatcaatgttcataatgacttcaggattttcaagagaatgttctatgccaatcgaagttgaaccacttgaatcatcaatattgtcccccataatagcaagcacaagagacaacaaaaggaacaaataaaagaaacagaggaataaggaataggaaaggctggaatcaagaaagaacttttaacttgaaaaaataccaaagactgcagacgggtttgatatagataagagtaaatagagtcaactcttaaaaaaatagcaacactgaaatggattctggttaaaagacatgattttcaagttggataaatgtttaacactttatcatgttaattttatattttagcagttattaattttttaaagtatagtttcattgccacaaaaatttacaaatattgtgagttttcaaaatatctaaactaacattatatttatttgagcaactccttcctttgatgtgattgtttatgttgctatttttatgagttcttcttttaaaataaattattatttttattattgtcaatttattattatttttttaaaatattattatttatttatttataattattagtgttttctagtaattgattattagaataataaaattattgagttattgaagttatagagttattgaaatgaaaaatttcgagttttagcaacttcaaatgatatgcttactttactatagaataatatttttagcagataagtttcttatttattttattattattgtactttaagttccattacaaatggattatagtgattttattagttgctaattttcttttttttttatgcaatttagtacatttggaggagtagaataagcggttgttaacttaggagtggaagatggagattatcagtatttcaagcacattgtttgatatattagtgatattagatagttttttcttcaaagttcgttgaatttgttaattatgaccccttagcaattgtgtttgcctttgttaggccacagacattctttttccaatgatctaggattattgttagacaatgtaacaagtatgttatatctagatttctcagagcaggaacggaggcagaagttaagaataaagggggccaaaaaataaaaaaaaaataataattaaggggggccaaatgcataattttttgaaaaaaataaaatttttaacattaaattgctttataatttttttttgtccaaaattttgggaggggccatggccccctttggagctaaagtagctccgtccctgtctcagagtgtccgtgatccatatacatcggtcggtcatatgactacatatggattagttgtgcatgctttttggatggataaacaacttatttagctacagactgcctatttttttattatttagaatgtataatcatttaatatacgatatttattgaattatcaataatattgatcattgcttgaaattataagaatacgaaaaaattacattgattcacttctttttaagaatgcatgcaccgtaaaagcacttaactcctcatcttgctcttaagggacatggagatgtaaaaaagagagttttatcaacttatt

SEQ ID NO: 28855 - DNA, 2593 bp, Cannabis sativa
  modified_base (36)..(45): a, c, t, g, unknown or other
  modified_base (71)..(81): a, c, t, g, unknown or other
accttttagtgacaacataagaataataatttatannnnnnnnnnattttttcacttttagtcacaagttnnnnnnnnnnnaaaagtaaaaaaatttgtagtgtatatatataattaagatagaatttagcacccctaaaagaggtctatatatgtactgatgcatttttatttgtttcgacatttaggagaattttttagtccaattttttcatgggtcttctatgttgcggttatttggggcatcttgaaattttttgagaaattttaaaaaatttaacacgccagaaataaggttcgaacagtacaatataaaagagttttttgtgcaaccgactgtttgaatcctattttcggtgtgttaaatttttcttaatctcttaaaattttgcaggatgtctaaaataaacgtagacgaccatggaaagaaattacactaaaaaattctctcagatactaaaacagatagggaatgcctcaacaatggaccattttttaggggtgtattgtaaaagtttccattaatatatagatgatcaacatcaacactatatagggtgctaattaattttataatgcaacctccttaaaggggagcaccgatgcactctttatctataggtattcagaataatttacaatataaaaagtaatgttcaaaaatagtctatttcacacgcatataaaataaaagagtcgcacgtgcaataacaatttgaaccctattttgaacgtgttaaattttttcgaatttcttaaaattttacagaatgtcttaaataactacagcgtacacgaccaatattagactaaaatattatcaaatacttaaaaaaacttaaaatgctttatatatagaattttcccattatatatatgattcccttttacaaaagaaattaattaagtagtttaaatgattaatatggaaaaacaaaccttggagattcagtgtaattaattttatgtcttactagctagggtttccaaaacaataatataaaatatatactataattactctgcagctacaaacctagctatattttgacaaaagttccagtagcctttccaagttcaacttttaataagtattttatgatcacacatatataatatatgatctttaccatatttgatatccaacaattaatccatttactgaaattatattaattaatcaatacatatatagtacaatattagtacgtacaaactgcttaatgacacatgttataatatatagtatatatataatgaaatttcatgagttagatcttaatatatatatatatatatttaatatgaaccacaaagccaggaatagtacagttcagcattgtctagaaactaaactcgatcatcatatatattatataacacaaataagaaaaacaaaatctctctatatattataataattttgttttaataataatatatatataatcaatttgctttgcagatgaaaagactaattaataaatcaaatatgtatacatgcttttggaataatattatgtactgtagcataatgcgtgctacattaattaatatataattttattattaactataatatcacagattgatgccctctaattaatatataattttattattaattattaatatcacatattgatgccataattaattaataaacattgctatgactactgtgtaccattgctttttcgtagcaaaaaacccattaacatatcacatacattttctattttaattaattatactttatttatatttattattatcatatgcaggtcatttatatcatcatttatattcatatcacagagtttggagatctatgctttattatattatgtattttaagttttgtgggcgcagatttaattatgtacacgtataagaatatatatatatattatatataattaatataccaaacaaaaaaattaaataaaaacaagaggccaacacaaagcatatagtatatataatagtgtataatcaaatctagtctggttttaattttgactgttcatatgatccatatataatatataaaagagtcttcaaatataatatgaagaacatatcccatttcgaaaaaataaataataaataatattatatataatatatattcaaaaccttatcatggtacatgtagtattcgattgtatattagtaaattaatttataattaagccgatctatatatcttttgttaagaaaataacatatatcattatgtgtttatatttagttgtgtacgtaagtaagccattttctatatttgaaattaaataaaatatatatataatatatcattatttatcaaaaaaaatatatataattatttaattagtatatattatatatgatgtgctcatgtgctattattaatatctttgatttcctattataaagagagtttttctgacccaccattaaaatcgaccatattatataggaaaattataatttaaagattgagttattttattagcttatctattaagagtactcttagttaaatatagctacaactattattcatgagttaaaactattttatatattttttttatgtcatatgctttta

SEQ ID NO: 28856 - DNA, 1364 bp, Cannabis sativa
  modified_base (32)..(73): a, c, t, g, unknown or other
  modified_base (617)..(626): a, c, t, g, unknown or other
actttataagtgtttatttcatcgttttagannnnnnnnnnnnnnnnnnnnnnnnnnnnnnnnnnnnnnnnnntctaagatcctcgtaaaataatttgcaacacttctcacctccatagtccatctccgttgactcactgcccttccttcctagctgcccagtcgattctaactctagacctaccattgacgggctcaatgtctcaaaatcaaaggctaggatgcctgtggtggcctctatttcaaccattgatggatgagagatgctcgtcggactcgcaccgtgaacaacaagggagctattgagatcgagaggaagagaacgagagagaaaatcgagtcttcagtgtcaggctttctcggagatctcgatttcaatccatttggaccatctaccgcgacgattgcatattcttgtgtgttggcacgaccatgcaagggaagacagagagaggtgttgcgagtgagaaagggaagttgggtttccgggtggtgaggtttaaggggttgggagtgtgggacttgaggtctgcttgaggtgggaaggccagagaatgctagctccaatcttggttctaggcccgcatgaaagaacgaaaagagagagagagagagannnnnnnnnngagagagagagagagagatttagattttaggatttcaaattttatacttatgcctttaaaattttatttattttattatttcatttaatagttaaaaatatgatacttcaaaaagaagataaaccgagtcagatcgaacctaattcaaataagtcgaatcgaatctaatccgatttgaatatcttatccaacagcagaacgaatcattacatgatccaaatcaaattgggtcagatcccaatccatttacacttctaatttaaattgttatgttttgtctaatataagcattttttatcaaatttcccaattgtattcatcaccattttcatagaatcttacatgtattcatgtaacctaaactccacctaataaataattcttttttttttttttgaaagaagcgttcatatcataaataaaatcaacgttagacctctcggtcgttacataatatattgtcaggtaatgaggacaccgggatagtcccaaacacctgatgagcaaacgcccatctagccacattgtgagcagcaaaattacaagttctagggatataagagaaattacaactaataaacgaaggagaagatttagtacaaaatgagacatagttttcaagagcccaatgagactccattccattaagcgcattgataaccatcctcgaatcattctccacaatagcaaatttagttccgatatccaaagcagccgacacagctaagcagcaggccg

SEQ ID NO: 28857 - DNA, 4431 bp, Cannabis sativa
acgcgtgacgtgccctttttacacccttaacaaaagtataataataataaccaaaaatatttttatttaattattattattatttgaaggattaatgtccggcggaggcttccatctatccacgtacacttcaaaaaattagtaagccttgctcaccaaagattaattattggaaaaggaccaaaaataaatctaaaacaataatataataattaattgagttaaattccgataaagctaagagtttcacacacaaaaatcttaagagtaaatagagatttcaaacctctagtatctagacacgtatgccatcccaaaaccacatccgcttcaaatattactccccggtttacacttcttcttccttcacccgccacttctctttctgctaatttaggctcagccttccttccttatctttcttcttcttcagtcctcactgattttccttccgatgctttcaaaggtacgatttttcctttcgactttgtgattttctgtaatgggtcagttcttgtttccgattaaatgttgagttttgtctttcaacttgttccggttattgaataaagaattcaactctttagctgccaagcaaccttagttgttgttctcccttggatttctttatttcgagtttatctcatgtatagggatttgtttttatctgctttgctgacctgaatctactaatatttgtagttcttcagttagattaaaactagttgaaatggacttgatttctttctgctgtttgcctttttttttttttttgttgccatgaataattgtaaattttcttctttaatgttgcgaaaatttccattttccttataatttatatttattttatcatgtgatatgttagttccattttccttgtaattttcttattttattctgtgacatgttatttagttttattaaggacatgcaataaagaaatgaaaatagatttgctgaggtaagaaatttgtaggtccagaaagttgtttttagcttgggcatattgtattattttattttcatttttaaactttgtgcttggacttattttatggactagttatttcatgtttgagttctgattttgcccgggtaatgacagttttttatattaattacattacatgatgatttaaagattgtgattagttttatggaatactgagctagctgaactgaaatgttgctagttgaatgatttttttttaatcttctcatattgtttctgacattgaaataaatcaagcaatctattatagtgtttggattttttgtttgatcataattgttaatttatactgtatatattgctgagtttgatatgttctatgtttggggtaattatttgaatggctttcttggtacttacagatggcagcagcatcatcagcttgccttgtgggaagtagtttatctactcatggtactaaaccagctttaagcaaggacttatatgggaggcagtttctgccttcttccagccttccgtccctgagtcaagtgacgaaaaaagtttctataaaggcttctatggagcaaaagcaacatgaaggtagaagaggctttcttaagtttttgcttggcaatgcaggagttggtgttcctgctttgttaggagctgggagtgccagtgccgatgatcaaggggtttcttcctcaaggatgtcttattctagatttctagagtaccttgacaaggatagggtgaaaaaagtagatttatttgagaatggaaccatagctattgtggaagctgtttcacctgagttgggcaaccgagtacagcgagttcgtgtgcaacttcctgggttgagccaagagcttttgcagaagtttagagagaaaaacattgactttgcagcacacaatgctcaagaagactcaggttctttgttattcaacttgattggaaatttggctttccctctaattttaattgggggtttgttcctactctcaaggcgttcatctggaggcatgggtggacctggtggacctgggtttcccttgacttttggtcaatctaaggctaaattccaaatggagcctaacactggggtgacatttgatgatgttgctggggtggatgaagccaagcaagattttatggaggtggtggagtttttgaagaaacctgagaggttcactgcagttggggctcgaattcctaaaggagttcttcttgttggtccccctggaactggaaagactctgctagctaaagcaattgccggtgaagctggcgttccctttttctccatctctggttctgagtttgttgaaatgtttgttggagttggagcttctcgagtacgtgatcttttcaaaaaggccaaggagaatgcaccttgcattgtatttgttgatgaaattgatgctgtgggacgacagagaggtactggaattggaggaggaaatgatgaaagagaacagacccttaaccagctcttaacagaaatggacggttttgaaggtaacactggtatcattgttatcgctgccactaacagagcagacattcttgattctgctttattaaggcctgggaggtttgacagacaagtaagcatatgttatgtataattacgtgcatattactctaaagtcaacatccaaattgctcagacttgatctctaatgcaggtaagtgttgatgttccggatgtacgaggaagaacagagatcttaaaggttcatgccagtaacaagaagtttgatggtgatgtatctcttgaagttgtagcaatgagaacacctggtttcagtggagctgaccttgcaaaccttctcaatgaggctgctatattggccggtcggcgtgggaagacagcaatttcatccaaagagattgatgattcgattgataggattgttgctggaatggaaggcacagtaatgacagatgggaagagcaaaagtctggtggcataccatgaagttgggcacgccatatgtgggtgagtatgatattaattcacttaaaactgttattgttaacaatgcatgggcacacacatttatcaaacattgaatgccaatttaagccacctaagttggtggcttgatggatcattatttataattttagtccagtagagactgggttctgatgaaatgtgcctggtttatacattgagaaatttaaatcactagaggtgatggcttgatgaattcagtccaccctagtagaagaaagtgggttgtgattgaaagaataatacttggttcttcttatgattggattctaaccaagttccttaatgcaggacattgactccaggacatgatgctgttcaaaaagtgaccctaattccaagaggtcaagcacgaggtcttacctggtttattcctgcagatgaccctactctgatctccaggcagcaactatttgctagaattgttggaggacttggtggcagagctgcagaggaaattatctttggtgaacctgaggtgacaacaggtgctgctggtgatctgcaacagattaccggtttggccaaacaggtatcttaattttgttatatgttatgtcctagtaatcttacttataagtgtctctcagatttatatatcaaagaatgcgctagctgaagaattttattgacatgttttgcagatggtagtaacatttggaatgtctgagattgggccatggtcactaatggactcatcagctcaaagcaatgatgtaattatgagaatgatggcaaggaactctatgtctgagaagcttgctgaggacattgattctgctgtcaagagattatcagatgaagcttatgagattgctttgacccacatcagaaacaaccgtgaggccatggacaagattgtggaagtccttattgagaaggaaacaatgaccggggatgaattccgtgccatcctctctgaatttgttgaaatccctgttgaaaatcgggttgctcctgcagtaccatcgcctgtgacagtgtaaacaactcaaaatatactttcagtaaacacttgaaatcatatatatcctcaattggttaaatgtatcataactgtaattttgatcatatgtaaagtactctagattgaaatgacaggaatttatcagctgtagagctttttggtttaaatagtcactatgattagctgcttgatgaaagattagtctttgtatgtaggctttcctttgatgataattcttataaataagtatagacaaaagcttcaaatgacttgagtaatattaaaagaagaatggaaatagtgcttaaatagtagatacagaacgtctttgcattcttaacgtgtctatgaatgaaaatttgaaaccagtgaaatatataatggtgtattattcataaaaatcactcataaaatataatagactgtttaaattttatattcggcatgttaaatcacttagaatttttcaaatagaaatgtacc

SEQ ID NO: 28858 - DNA, 3117 bp, Cannabis sativa
ataacttggtacatcttaaaattcagaagaaaaaaaatctcttaattagttttttagaaaacagtattacgtccagtttatattgtttaaataaaatttgtgaatacgtatattattattttaagattttttttttttaaattatgaaaatcattactctaatttaaaattagagaaaatatgagaagaggagtactatataatcattataaaagatagagagatatatatatatgtggggaagtgaagatgatggggtgcaaagagtagtggatgattcactatgaagacctccattagtactctttttgagttggtgatgagctataaaattgacccaacatcacctcattaatggatcaaaaatgaacaccactttagacttttatataaaatgtcaaagttggctttcacttttttaagtgcacaaaaagattttagaagagtacatgataggaaaagagaacttttattaataaatcccacttgtttgtttttatatattaaaacaatcaaattgtgtttctaattattattacttacaaaaaggttaattaagtttcctcagtaaattaatagcatatattatccactttatgtggacatttttggctctcttattttgtggggtcgaattcctcaagaagtagaggagcataattatatcaaattttggtttttctttttcactatattataaaaacaagaccaatataaactattagttcaaaagactatatcatataaattaagactaagagaattttcaaagttgtgagagccaacaaggggtatgacaatttgtataattttgtcgtagtttgtgtcaacaaaattttgatacgatattattatactaattaacacgaatacttacaacactatttaaataatatgtgaaaacttaaacacaaatataaatttatatatatattaggaattttctttccaaattttaacatataccaaattatgctctttaaaattttgaggtcgttaaaaattgctcttgaattattgagattgttaaattagacttttgtccaataagaaaagcctaacatgaatgaaagtttaagagacatgatttggtacatgtcaaagtttgagggagatgatttggtagatatcaaaatctaaggagtatgatttagtacataaacaatcatcgaattagtaaaattaaatgaaactggacaaaagttctaaaatctaacaatctcaatagttcagtgaaaatttttaatagccaaaaaagttcaagaaatatgatttggtacatgtcaaaatttaaggggcaaaaatcttaattagccatttacatgggtaactatggttacatttttattgtaactatgatggttacatttgttttaacctttaatagtaggttaccaataggtaaattttcttttttagaactaaattaattataattaattattttcttaaaataattaatttttaattaaatattaaataaaacctttttgaggaattaatatttataaataattttatttttaggtcccttttgcggaattttatttacatcccaaaaacatataagagcaccctatttaataatttttattttacataaaatatatatatctttaattatattaattttaataattttttttccaatttatattcttaaaaaaaacctattaaacaaaattaaattgtattttaaatattataacaaaaaaattaaaaattatatgaaattttattagaaaaaaattaaacatgattttaatatatatatatatatatatgaaaataaaatttaaataagtattgaattaaacatgatttaaaaaaaaatatatatgaaaataaaatttaaataagtattaaaattaatacaaaattatgtgataaaaaattcttcaaaaaatattaagactgattttaaaaattattttaagcttattttttaacaaaatattgtggtgtacttatcattttgtaaagtgaaaatagaactctcctaatttttataaaattaaactttatttttttttttacaaatattagacttccaccccttctaaaataaattttttgaataattaattagtttctacttccatgcaatctcttatatctctaccacaaattcattcctctaatccaccagctatatcacattctttccatttctctctagatctcaactgtcctgtcgcacggccagactcaatgatgttgtgccgttcataaattaatcaattgacaataataacaaaatattattttgacttatctactttaatttcttcaaataattctttccacatactttatttttttttttattcacatgatgtctttttataggtctaaataacatcaatttctagcatgatcattatgtcattcatatataatatttgtatttttttttttttttgctaatctgaaaattccataccaaagaaaaactaatataccaagttcatagtggagagtcttgagacaagaggctccacctactcaatcaatgttatttctcggtgatcatttcactatgtaattttgtcccacttctttcaaatattttttggaacacgatgatgaaggaaaatagaaaaggaaaaaaaagttaacttattatctttaattttataattgttattagattttaaactttttttatttaatttttaaattaaaaaaaataactaaatgacttgaactaatctggaattgacatatttatttggtaattaaagtattgaaaataagattgagtgtagaattacctctaaattagaggttattcttactatttttttattaattaaggttatttatgtaataattttaaattataaagagttttgttacaaatacttcaataattaagtataaaaaaaattgctaaaagatttttactgagtaacaaattacaaaaaaataattaataattattagtaatttaattttaaatataataattttaattaagattttataaaataaaataaaatattaagttactatcaagtagaagttaattattatttatttatttttaatttctaattagtcataattatagtaatctaataggttgttgctccagaattcgcccaaaatacgtgg

SEQ ID NO: 28859 - DNA, 3491 bp, Cannabis sativa
  modified_base (1670)..(1675): a, c, t, g, unknown or other
ggtaaaataatatccaacagtacggtcgttcctagttatgtcgtttggattaacaaatgctccaacaacattcatggatcttatgaacagagtattcaatgatttccttgataactttgtaattttttttatcgatgacatctttgtatactctcgatcagaagtagagcacaaacaacatctttgcatggttctgcaacgactcagagatcataaactttatgaaaaattcaagtgtaaattatgactatcacaggtgtcttttcttgaacacattgtggtgtattgtgatgcatccagacagggtttgggatgtgtattgatgcaagcagacaaggttgtagcttatgcttcacgacaattaaaagactacgaacaacgttattcaacccacgacctagagcttgtggcagttgtgtttgccttaaagatttggcggcattacttgtatggagaacgatgcgagatttacacggaccacaaaagtctcaagtacttctttactctgaaagatttaaatatgaggcagaggttgtggttagaactagttaaagactataattgtgaaattttgtatcatcttagaaaagctaatgttgtggcagatgctttcaaccgaaagggtgctagtcaagtctttagtaccataatgatttctccttagttatagctttagatatggttagggcaaatatcgagtttgtagctggaaaattgcataacctgacactccagtcaaacttattagaaagaattagaatggtacaattggaggattctgagttaattaaggttccagaagaagtataagctggtaaagctaaagatttctcaattttgagcaataaattgttacgctcaggtatgtgtttcgagtaatatagagcttagaaaagagataattgatgaagcacacactacaccttattcattgcacctgggtaccactaagatgtatcaagatttgaagcctcattactggtggtatgggatgaatagggatgtagttgaatatgtaaccaaatgtttaacttgtcaacaaattaaagctgaacataagagactgacagggttacttcagccattaacacttcttgaatggaagtgggaagatattacaatggacttcgtggttgagttgcccagaaccacagaaatgtatgacttagtatgggtcatagtagatcgttttacgaagtcagcacattttttgcttgtgaaaataacttatgctgtggttcaatatgcagcattgtatgtgaaggaaatagtacgtctccatggagttccaaaatttattgtttcgggcagagatcccaagttcacatcaaaattttgagtgagtttgcagaaagccatgggtaccaactgaaagtttagtacaaccttccatcctcaaacaggcgggcagtctgagagaacatttcagatgcatgaggatttgttatgagcttgtgtcatgaactttgaaggttcatggagttaatatttgcctctaattgagttctcctacaacaatagttaccagagtaccgtaggaatggcaccctatgagatgctatatggcagggaatgtcattccccaattcactgggacaaaactggagaacgaaagtatgtaggccttgaattagttcaaaggacaaatgaggcaatagacaagattaaannnnnnatgcttgcttctcaaagcatgcaaaaaagttatgcagatccgaagcacaaagatattacatttcaggtaggagaatatgttttcctgcgagtttcaccaatgaagggtattagacgctttgggaagaagggcaagctaagctctaggttcataggacgttttaaaatacttgagaaggttgggcatgtggtatatcagttggccttgccactaacattatcagttgtgcacaacgtattctatattttaatgctgagaaaatatgtatcagacccgagtcatatcttgagttatgaaccctagaattacaattagatttgtcttatgaagaaaaaccagtgcaaatcctacatagaaagaaaaaagttctttaaaataaaaccatagagttggtcaaggtgctctggaggaatagtaaggtggaagaagctacctgggagttggagtccgacatgaagactcaatatccagagttattcaggttagattttgaggagaaatccttttaacagggagataattgtaatgactgcatgattgaaatatggattagaaggactatagatattaattttattaataataataataattatatgtgaatatttatattaaatgtaaaatatgttattcttgtgattctagctcggtggcaatagaaaatgcaatagagagttatttaagtcacatgggtaaatctagaacctttcattatagaggattatagtatgctaagttcgagatttgagtttaggcggggtaatagttttggaccattttacccctaagtcatttattgaatttgttgctaggtggcaacttagttttatgacagctggccaattctaagttgaaaaataattaattagtttatttgggtgaaagttagcaaaacaaaaaaaaaaagatttaaaattggaaaaccctacttgttcttctttttcttcacttcagccagtagggaccagcaagtctagaggagaatttcatcaattttcagtggctaactagaggaaatctaagagctcaacccatggtagaatcctaatctaagtttattctggttttgtagtgttgtttgataatttctttgagtttagagttgtaaattggagattttatttctgtttagctaggtttcgattagggttgtattcaacaagttctagttgttgttgtatgcttgtttgggctgtaattgttgactgattttgagtttgtgagcaagcttgagttcttggaactcaacttgactcaactatggcataatgagttttactgtattttttcttgctgctttcacttcaaaattatcttagaatggtattacagatattctggaaagtatggttgagtttggggttaatttggtgagatttcaaaaattggggatttttctacaggagaaccggttaaccggttccccaggcagggcccaaacaaccgattcacccgttgggaattcgatctactggttaggccagggctagaaccctaatcttttaattttcttagagtttagagcgatatcgtattatttatcgattagggttacctctaattttaatttatgttcctaagaaggtttacccaagttatttacccatttatgtaaatgtgatataagaccttcgtttagctcgtaaattttccattcaagtcgaccgacacgcttgaatatgaaaacaaggtaagattagcataaagtatgtatatgaatgtgtatgcatatgattgcatgttaattatattgttttacactaccaacattggaatatttgtaatagagagtgcgttggtacaatatatagtattt

SEQ ID NO: 28860 - DNA, 3049 bp, Cannabis sativa
ttttagctcaaataaaataaaaattttatctcatctaatgaagctaatatttagcatctttcaagatcatactttgctgcctttgctatcgtgaccctcatggatgtttgtttaacaacaggtgcaaatatttcagtaaaattagtgccttccttttgtgtttattttttggtaacaagtctagctttatacatgactttaccagtactagtttcatcttctttgtgtctaaacaaccatttgcacgctacaagcttttgaccctcaggtttgttaaccacaatccatgttctattcttcttgagtgatagcatttcttcatcaatggccttgttccatttcttgctgtctttgcaagtaattgcctcctaaaatgtctctggttaagagttgtctaactgctctgcaacagcaagagcaaatgctgtgaagtcagcaaaaccaaatctgacaggtgccttgtgcactctttttcctctatctctagtaagctgataatcatcagcttcaatacttgcttctgcaactgtaatctcttcaacttgagtctgatcagtgccattttctatctgatctgcaatggcaggctccacctcaacctcaactggtttgtcactagagctttcttctggttttgtctcacccttagacttcatagccatttcatcttctctgaaaacaacatctctactcaataggcatttcttgtatcttggttctaagaaccagcttgtaacctttcactccttcaggatatccaaggaatagacatttcagtgcccttaattggagtttgtcttgcttaatgtgggcatatgcagtgcatccaaacaccctgaggtgatcgtagctaggtggataccctgtccatttttcttgtggaattttgaagcctattgcagcagatggaaatctatttatgagataacttgctgtcttgactgcttctccctagaatggtctctcaagacgagcactgtgcatcatacatctaaccctctcagtaagtgtcctgatcattctttcagccaatccattttattgaggattcttggggactattttgtgtctgccaatgccttattttctgccaaattcactgaattggttagaacaaaactcaagaccattgtcagtcctaagtttcttgactgtttttccagtttggttttcaacaagctttctccaagtgtcaaaggtattgaaagcttgatccttggatttgagtaagaaaacccaaactttcattgaaaaatcatcaatgatgcgtagaaagtagttgacacctcccaatgttttgatctttgatggcctccacaagtctgaatggatgtaattcagtggctctttgctggtgtgcataccagttgtgaactttgctttgcaacatttcccatagacacaatcttcacagaaacctagtcttccttcaagcttgccctttaacaatccttgtttttcaagctcttaaagacccctcacatgccctagcttcaggtgccatagcctggtttggtcaattccttgaactgttatagcaggtacccataacattttttccaattaaagaatacaaaccattctttaattcccctttcatcaccaatgtggagttctttaaaattttcaaaactccaccttccaccttgatgatgcaaccaatactgtccaacattccaatggaccataagtttcttctcaagtcaggaacatatctaacattttttagtgttcttggaatgccatcaaacatggtgatgacaactgagccaattccaagtacactacagaccttattgtttcccaatagaacagtaccccctgcgactttcttgagtcactgaacatctcaattttgggacacatggaatgaagaacctgagtccataattcattcatcttcacaggccttactagagactaccaaaacatcaacagatgtgtagtcttgtgaagcaatgtcagcttctcccttattcttgccttgttctctggcaagtttggctttcaaagccctacactcatctctaaaatgtccttctttttgacagttgtagcattttttccctgacatgaactgagacttagattgattactagacttggacttattgtaatggttcttgaaaccttttttactagatccccctttggttaatagaccttctccattactatcccctatttcatcacttttcttttgaatttctttagagttgagggcagactttacatctgtcattgttagtgattcttttccatacaaaatagtatccacaaaatgttcaaatgatttaggttaagaggataggaggataataccttggtcttcttcatcaatcttgaccccaatattgttcagttccaagatgatcttgttgaattcatcaagatgcttccttagttctttgttttcatccatcttcaatgtagcttcttcttaagatatagtttgttagctaatgattttttcaggtaagttccagctaatttttcccataaaccatcagctgtctcttcttcagagacctccttaaaaacttcatcaccaaggctgagtaaaattgcactgtgagccttgatttgaatttcgttcttcttcttatgatcttccatagcagctagagaaactatatccaaagtttcatggagaccctagtgaacaagcatggctttcatcttgagtctccacagtccaaaatcattttcccctgtgaatttgtccatctcgagcttggccattgacattcttgatttctctgtaatttgatcgagcagttcttgatctttctaagccaaccttggctctgataccatttattgtgcaagaaccaatattaaaccagcaataaaaccagagaaagaatgctgagacacaaattcaatgagaaatcttaatgaacatgacattaaagaaagacaggaagaaagtttaggagaattgaaccaagcaagataaaattagtaacacaagaacttagctgaataattggaaaactttattgatgaatccaatgataagattacaaccagaatcgattacaatcaa

SEQ ID NO: 28861 - DNA, 2867 bp, Cannabis sativa
tggacccaaacccaaactcaaactagaacatgaatagggacctggacccagacagagatgtgaaacccagtacctggacccaaacctggattgggacccaagaacagggacccagacccagactgggacctagactcaaattgggactcaaacttaaactcggtcctggaccaagaccaggaccaaagaactggatttggattgggaactgagactgagatttaggccccgaaattgggactgggatttgagactcgacattggatgcgaacccttagttcgtgtcttgggtctgggttcgggttctatctgggtctgggttctaggtcccaagtccaggtttaggtttcggtctaggtttcggtctggatacaagtgacgatcctagtgtaggtctgggttccagtctcgatatgggtctagagcaaggtccgggtctgggtccaagtcctagtcttggtcctgttccaacgtcccagttccagttctagttgtggtctcgggtccaggtctaggtccgagtcctagtcaaggtttgggtcgtggtccaattcccaaatccataaactgacaatggtttgggtccaagccttgagtctcgggtcctgggttgagatttgaatcctagtctcaggtctcggtctggtttcagtttgggtcctgagtcttggtccaggtccgggactgagactggggtctttaggttttagtccaagttacgggtctcgagtcaggttctgagttcatgtctaggtcaccaatcaaagtttgggtccagggttcaggtctggctccagggccaagtccacgtctaggttctggtttgtatcttgagtctcggtccaagtttggatttgggtccaggtctcagtctgggtcctgctcctagtcctagtcctgttctcaagtcctagtctgcttcttgtttcggttccaacttcaggtccaagtccgggtccgagtctgggtctcagtcccagtgtgggtatgggtccatggctaggtccaggtccttgttcaggttcaggtctgggtcccaaatccagaaactgactatgggtcaggtccaagccccgagtccaaattcaaatcccggtcttcagtctcggtctggttccagtttgggtcccgggtctcggtcaggtctttgttttaaggaccgtgtctcggtcccagttttgaggcccgtgtccgagtcccagttctggggcccgtgttcggtcccagttcgagggccccagtccttggttcgggtccccaataaagctccaagtcatggtctgggtctaggttcgggttcacggcctgagtccatgttcgagtccaggtccttatccaagcccaggtccttgtctgagtctaggtcatcgtctgagtccaagtccctgtccgagtctaagttcctgttcgagtccaagtcttggtcttgggtcccaggtccgggtatgggtctgagtcttaacccatgtgcaagtcttggtcagggtttgagcttgggtctcggtccaggttcaggtccctggtccttgtccaagttctagtctaggtttgggttcaagtttggttctggtcccaggtccagatcctagtcccggtcgcattccagttctggtttcggttccatttctgggtctggatttgggtctgagtttgtctcttggttagggtctgagtcctagtctgagtctgggtctgggtccaagtctggctttaggttcaaacctcaatcttagttcgcgtttgggttcgagtctcgggttcgggtccaggtctagtctgggtcccaagttttgatctcggtctgggtgtgggtttcgtttggggttcaggtccgggtttgggttcgggtgaggtctagatctcggtctgggtgtgggtctgtgtttaggtctgagttggggtcctaggtttgggtttgggttcgagtttgggtctgagtttggatctgggtctagttctcggtcccagtctaggtctgggtctgggtctagttctggctctgggtcctagtcctactcccgtttaagggtcctaatctggttctggttcaggttctgagtccgagtcttgggccgggtctgagtctgggtcaaggtctaggtttaggtcctggttcaggctgggttcaggtgccggtcagagtcccaaatccaaacaccaactacatgttgggttcaagccccgggtcctaggtctggggtcaagatccagatcctagtctagtgtcctggactggtttcggttcaggtcctgggtcttgggtctcggtctgagttcaggtataggactgagacaagggtcaggtcctgggtccaagtcccagttttggatctcgcgtctagttttgtgtctgggtttgggcccctaatccaagcttgagtcctaggtctgggttcgggtttgagtccgggtctgggttggggttcggtttgtgactccctgattgagtttggatttgggttcaggtttcggtccgagtttaagttagggtttgagtttggatcgtggggtatgggttcaggtcagggtctgattctgggtctgggtccaagtttaggtcccaaaccaagacactaactacgggtctagtacaaaccccgagtttagatttggatcttgggctcaggtcttggtctggttccacttcaagttttcggtctcgattctagggcctgggtctcgggtccgagtcccccatctaggtctaggtcttagggccttatttgagtccaggttcgggctcgggttcgggtccgagtcagggtttggctctctatttgggaattgggtcttgggtccgggttttgggtctcaagtcatagtctgtgtctgggtgttggtcttgatgagaacactaaggataaaga

SEQ ID NO: 28862 - DNA, 2002 bp, Cannabis sativa
acacttttccaaaatttatagattagtgataataagtttataaaagcacacacgtggcgtccctaagggtcagggcgttacatgtcaagcacttggatgcataatccaccgcattcttttcctaatctgatggaaaggctaatactgaagctgtaattgatcattgcttcaactctgggaaattggcttcacatttatcgatccatacaaacttctttttcttctaattcaattctattaagggtgtagaaaccttagaaagcccttctataacatgattgtaatacctagccaagccaaggaaacttctgacttctgtagcggttttcagccttgtccagtctctaactaactttatcttcaccaaatctactgtaataccatatttactcaaaataggacccagaaaagccacttgtaacaaccataactcgcactttttaaacatggcatataacttacactatagtatgatcgataaacacaataacacatacatcaaagaaattgttgaatactcagtttatgagatccatgaaagttgtaggagcattagtttgctcaaaggacataacaaaaaattcaaattgatcattcatggtatgaaatgtagtcttcgtaatatcttcctcttgccttctcaactgatgataactgaattacgatctatttcaaagaatattatttttctcccaaaattgattaaacaaatcatcaattcttggtaaaagatatttcttattcaactttcggtaatcaatgcatatacgaagtgatctatctttcttctttacaaataatactaaagcaacccagggcgatacacttggttgggaaaaccctatatccaacattccgtgaagttaaaattttaactctttgagttctactggagccatcctacaaggtgacttagaaactgattcctctcccagaactaaatcattaaaaaaatccatttcctgttgtggtagtaaactaggtagttctttaggaaatacatctaggaactctttcactactctgataccctgaggcccaactatcccgggtcttctagtctctatcactataactaggcatcctatgcatccatctttcaataggtctctagccttcaagactaaaatgatcaagatttgagaactctgaaacaatcccgcaagaacaaattgtttttcattctcaagttgaaaatttgccatctttctcttacaattaatagtggctgcatatttagataggaaatccattcctaagatgatgtcgaaatcttctatggatagctcaactaaatcaacgcttaattatctatcatccatcctaactagcatagacctatttaagcttgtagagataactgactctccattaggaagtagggtccaaactctaattcataactatcacaggtcctatctagataatcaatcactctacttgcaatataatagtgtgtagctctcaaatcaaataatatggagtaacaagaatttttgatagagagctaacaggtcactattggcgggctagccttagcatcgacctgagtaattggaaaaacccaagcttgagtaggtcttactttaaattccccataacacctcactcgaaacatgcctttcctttccactcactcatatggtgcttcttacagactaagcactttggataagtgtaacggcctttaggaccaccctgacgaccacttctattctggttcctctaaacctcttattttgactgagaaactagatgtcgctagagcctttcttttatgatcatggaatgaatcaccaccacccgtacaaaaactcgaagtagatgaaacaacaactccactattctgggtcactttaaactcatgtataaactctaccgctccctctgcttgaagatccttttccaccatctaagcataagtgatggcatcatcacttattgtgacagtcagtattcccgtgatccgtaaggggaaataccgggtaagctgtgcaatccc

SEQ ID NO: 28863 - DNA, 2122 bp, Cannabis sativa
  modified_base (1630)..(1635): a, c, t, g, unknown or other
tattaatagataaaatattcaattcctatcatattagctacttatcatagttatctatatatatttatattaagccgatcacttaaaaaaaagaaataaaaatttactttattttgtacagcaatcaattgccggaggaacagatacatcagcactgacattagaatgggcaatgtctaatttactaaatcatccacatgttctacaaaaagttaaagccgagatcgactctgaaattggccaacggcaattgatggaagaatctgatatctcgaaactcccttacctccagtgtgtaatttctgagactttcaggttatacccagtaggtccacttctcgtacctcattactcctccaatgattgtaacatttgcgggtatgatgtgccacgtgatacaattttattggttaacgtatgggctatacatagagatcctaaattatgggaagatgctgagaatttcaagccagaaaggtttgaaaacattaatattgagaatgaatttggatacaagctaatgccatttggagttggtagaagatcttgccctgggagaggcttagctagtagagtcataggtttggctttggggtcattgattcaatgctttgattgggagaaagttgaccataacaaaattgacatgactgaaggtaaaggtcttacaatgcctaaagttgtgtcattagaagccatttgtaaggctcgtcctattatgaattaccttatgtcacaatccaattaattgaggagtactacggtcaaacttttattacaacttaattaactttcatgcttgaaaatacatgttgaaatatttttttttcaaaaaaaataaaattatatagtgtccgttatagttacaatatcttcgtaaattttataattttttgtaatagtttacagtaccaaagatagatttaaagttttttaacacacatactagtaaattagaatatcacgaactctatttttgataatgtaaactattcaaaaaatttcaaaaatttacaaagataatactataaaaaaatattccaacatgtaaatttcaagcataaaagttaattaaaaaattgtaataaaagtttgtatattgcatttctataattaaattactaaggtataataattgattgtaataaaaagattttcataatagaaatataaataatggtctttgtattattgtgttttacattcctatagttttagttatcattagtttgatagtatttgtaattggtaacttattatccttgcgtttttaataattaatgtaataattaatataatacaatagtcttttgtactttaatatagttgcagaataattttctttttgtaatgttctaaaactttgttcacaactcttttataagtttgtttattgccataataattaagatctatttatagagtttacaaatctctctacaaaaaactaacaagaagatgaaaacaaaggtattaagtcttcaaaacttgattttctttggattaccattcccacatatactttttccacttggactaatattgtttaataataattattaattaatgaacacatgtttaacaacttcatatcactatatggatagatacacacacatatatatatatnnnnnnagagagagagagagagatgaataagactcactcaaattcaatctcatccattttaggcctctctctgagccattttccttcaaacacttctcagctatttcagcaaccaatgaagggtcaatgattttctctaatactccattccccatttagccaagcttacattttccttcttgggttgagagaatagccaaagctacctttcaaaaccatgctttctttgtttggatcatgagcacctgatttagaaagaccgaaacgaaatcagcaactttagcattgaagtttttatcacaatatccaattaaggaaacaagatggcaatgtcagatttgagacaacaccagtatctttgtatggaactctgttaccccttgtccatgctcgggttggcttcggttcacagcaacttcagttgaatgaacgagacccaatgattatagtagagaaactccttgtgtggagagctggagcaggccttgaatta

SEQ ID NO: 28864 - DNA, 2174 bp, Cannabis sativa
gcaaagaaaaagttctggaccgaatttttgaaaattggcgaccggtttggcgggccatggcttatcttgggagataccaacttcgtgcttagtaactctgaaagagagggctcctcaggccgggacccctttattccatttatttctactctgattgagagtcgaggtcttattaatatgcctatccaaggggacaaactgacttgggataaccataggcctggaaggcatcacgtgaaatctgcgctcgataaaggcttagtgaatggggcttggattaatgtatttcctcgagctattctctgctctgaccaaacgagtaactcggatcacagacctctttgtcttctctcggagggatcggatcccaaatttaagagatgtttcaaattcgaagaaggctggacccgagatgaccgtagtaacctcgttgttgctcatgcttggaaatcggtccgtcatgattgggcccctgctcgtatctttaagaaggttggtgctaccagggtagctcttattaattggaaccgtgcccagttcgggagattggaggtggttataaaggagctagaacagaagcttaattggatccagaacctcccggctggaacccgggactggaaacaagaatctgacattcggcgtgctttgaacgaatctagggaaagaaaagcgatctattggaagcaaagagcccgagtgtcctggcttaaagatggagacaagtgcactaagtttttctttctctcggctgccattaagggtagaagaaatgccatagagcgtattttgaacaaggataacatctgggtttctggtcgagtggcaattggtcatgaattcactgatttctttaagggcatctttgcgggctctgatcttggaattgactacaactgtgctcacttgttccccgagaaaatctctcaagcagactcgggtgacattgttaattgccctaataatgatgaaattaaaagagtcctttttgctatgtccagccataaagcgccgggtcctgatggaatgtctgtattattctttaaacattattgggattctgttggtgttgatttctgtgatgcggtttctgacttctttatttcggggaacatgcatagagggataaatgccacgaatattgttcttatcccaaaagtacaaaatccgacccgaactaaccactttagacccatctctctatgcaatgtggtgtacaaagtaatctcaaaaattattgcgaatcggataaaacccttacttccttctattatttgtccaactcaagctgctttcgtccctggaaggaacatccatgataataatgtcattgtccaagaaatcatccattcctttaacaggaaaagaggcaaggagggtttcttcgcaataaaaattgatttggtcaaagcttatgataagttgagctggcgatttattgatcacgtattggattgctatggaacccctcagaaatttcgtcgttggatctctcagtgcatctccacaactacgttaaatatatgtctcaatggggggcaagttgggagaattaatccttcttgtggtcttaggcaaggggaccctctctccccttacctctttatttgggcagcagaagtgctttctagactacttcatgatgcccttaatcaaggagtcattcagggtattactcttagtagaggagggccggtcctttctcacatcttctttgctgatgacctgattctggtagggcgagcgaatctttcggaagtgaatggattctggaattgcatagagaagttttgctcctggtctggccaacaggttaataaactcaaaacgtctattttctttagtaagaacaccccggccagattaaggggtgaaattaaggaggcgctaggcattgattatcccgagggttgcattaagtatttagggttgcccctttttcgttcaaggcagaaagatgctgacttcaatttcatcctagataacctctcgtcaaagcttcagggatggaaagctaagtccttatccaaagcaggtcgtgctactctaattaagtcggtggggctgtctatgcctatgtatgctatgcagacctcgaaactctcttcccgtatggttaataagatagatggtttggttagagacttttggtgggggtttgagaaagggaatca

SEQ ID NO: 28865 - DNA, 1460 bp, Cannabis sativa
aaagtttggccggtttgggcgggttaacccgaccaaattgcccaaaccgttggtcggtttatagatttttcttttttaaaattaggcgggttacacttaaattttaacaacccgaattttaaattgagttagaaaatatataagataaaccgtccaaaccgaccgatgtacagccctaattctacaggttatatgaatgtaccaaaagtatatatactgatttttattttccttctcattgtccaataatatatagaactacatatacatatatgttcatgtatatggtatattatatattgttgccttttctgaatttgatgaagagaggacatcgagtttggattcaaagaattggaatttactttcggaaattaaactagtagagatgttttagtagattctcttctataaaaagaaactccaccctagctacctttgctattactatacaggtaaataaataaaaagaaaaaaaaaagaccatgtgttggtattttgagtgaagaaacttcatagaagctctctctttatatatgataataatatataatgtgacatctatatttataaattatatttcaaaagtactgctttatgctagctatatacatgtaatactatacagatatatttatatatacgaacaaaagaagtatataccagtcaatttattaccacgtttggttgggaagatgatcccacttggccttaccatcactgcttctaaattctgtggattcctttttagtaccaattaatagtattcctcattacacactttaattaatatcttaatttttttattagtttatataaaagaaagctaaaaatatctttgtcctgtttcccaccccatcaaataggtcggaattatgtaaggaaaaaatgaatagatagaataaaaaaacataaagttaaaataatatattctgaatcaggttgaaagtgttgaaagtgttgaaggaaaaaaaaacaaaataaaatgttatattccgaatagggttgaaagtgttgaaaaaaaaaactccatctttagttctacttatctttcgtgccttatgtcaagttttaagaaacaaagagaaagagaatgagtaattttattgattgaatgaaatgattttaatgcttatatagactataagctacagctacaccataacaaagttagtcaagtaactaattaactaatcaacagaaaataacaactaactaattctagctaacatcatgagttgaggagaacaactcagctcgattattgtctctaacaaaccccctcaaacttagagtggtggagcaaattatatttgtctttcaaaaaaggaaacttggaattaaagactagcttggtgagagagtttgctagctgttgatttgctggaacatgctgaccaaaaatttcttttgaagtactttgtttctaacaaagtagagatcaatctctacgtgctttg

SEQ ID NO: 28866 - DNA, 2134 bp, Cannabis sativa
caccctcattagtgacgcgcgttgaagtgtcactaaatagttttagagttactcaatgtgtgtcactaaaacccgtttttctagtagtgattgcttaaatatatctgggctatttctagcaagcaggataacctttgggttcgttgggttaatgccatctacttaaaggatcaaaatttttggtcagtggcttttaaacatgatgtgagttggtacttcaagaagctattgaggcttagagattctataaacaaaaatattatgacaaagctggtaataaaggtaagtttaaaatgaaaaaaaatttacttatcttttattaattcaagctcagaaagtgaactacactgataatgtttgcacatgattgtgatttcgaagtatagattcattggttgacaagttgtcaacaaccaatttccaactcgtgatcatctcagcagaatcctttcgatggctacagatatttgtccggtgtgtgctaatgctagagagactcatagacactcgtttggggactatgcttttacgaatcaggttgttgttgagattagcaactggcttggttaattcgactagcctgctgatatttatgacttgttttgggaatctgataaaagcttgcaaggaaaaatcgtaaactcaattgttataactatcgcgtactatatttggttaaatgataatggttgtatttttaattttgtttataaaactggcaattggtcatgagtgttgaaatcaaaacggcagtcaagtttagaatgttgagttttgtatgagcaaaaaaaaaaatagctttgaccaatatttcattaatgtaatgaaaagctggtaggtgtattacaagaaatgtcgtttttgctagcacatttttgtgctggcaataatttggtattgcattggtaacatggaatttacttttgatgtgttcgcaaatcaacgttggtattagaacttttgccagcacaaaatagaaaacgttggcaaaaatgacttttcccaacgcgtaaatgcgctgataaaagttagattttagccactacaaatgtgtgctagtaaatctttgacctttttaccagcgcagtttgcgaaatgtgctggtaaaagtaaccaggacagtagcgaactgtgctagtaaaaatgacatttcttgtagtggtggtttctggggttgtggtaggtttgttgtgtggttatagtttgttttgaataaaaaagttcttttttattaaaaaaaataatttattataataacaattattttaataaaaataaaatattaaatttataaataaaaataaacaaacatataatattgtatgttgaaaaaattatctatacacaactacgtacaagaattctcgtcaaagatctaaaagtcgaagagaatttcttgccaattatctatacacaactacgtacaagaattctcgtcaaagatctaaaagccgaggagatcgaatttcttgccaagaaagatgacaactaagaagatctgttttctggctatttttcttatcttatctcctgaagatcagtctttctatacaacctttgattattttcacattaatgatgtccaatatatttataataatttctttgagtttattatgatataatatatgcatatatatatatatatatatttgcagctagcatatatatattatgcgtgaacaatacataagtcaacatgagaatttgtcctatgtagtttttctaaaatcgaaattattttaatagtaacaactatatgtcctgtgcgtttgtttccctagttaattattccaatttatttatgtttgccaccgtttctttgcaacactctctaataataattaatcaatggtttagtttttttttttttttaaatattataatcaatggtttagatgaccactatatcatcactgtataaaatatatagaagaggtatctttaactctaaattaattaatcaatatataaaacaaagaaacatatagtcatatgaagaattcatcgatgatcaaccgaaaaatgatcagttttaattagttttaagtaataagtatgtacctgaaaaacaaaaccttgacctattcttaaacctaataatgactacataccgcaacagtattattttatt

SEQ ID NO: 28867 - DNA, 5054 bp, Cannabis sativa
ttcatagggaatttttaacagccaaaaaagttcagagagcataatttggtatatgtcaaagttcgggagaaaaaattactaattagcctcttcaatttgtggctctactgggaattgtcatcaaatttcctgctagttggtatttcaacgctctatatctactgttgtggcaaaggctctttatctctacaataggttgggtttatgctctagacttggctattcttaagtgaggggttgaattagactggtgtatatcaatgttattaatagtcatttagtggatcattctcatcttggttgcattatcagatagtgttttgtaattatttttatgatctttcttttacttaaatgtcgcaggcttgctaatagtgttgcacactttttagcaaagttaggtctttctatgaatgatcattgtgtctggtggtttggctaccctcttgtatctatgcctattcatgtagacatttatgattaatgatatttcatgacactcttttttctcataacatatttcatatggagtttactcttgaggttttaataagttttatttttattttaaaaaaaatcatcctcatttcttttgaaaaaaaatcatcttacttaataattttcttaaaattgaattaatagtaatcgcatattttcatataccaaattttaaagtcttgtatttttttgagataatccctaagaatgtttacataaaataaataaataacgtatatttttactatttattcaagttcaaccggtatgaatatctatattttcagcctttgtaaatattataatctatttttttttaatatgattgtaatccatgtttttgaaaactaaacacgtggcataccccaatccaagattaattgatcaaggcctgcttaacagccctacgagatactgggtcgggactacacggagatattggcctcaaaaccaactctcatgcaggatatctatatctagaattagatgtctccagatttggaaggacacctcgcccaagtaaaaagaatcaatcaagaccccccagataggtacccgagatacatttggtaggctttccaagagacacctcagaagtcaggttgaaacttacatggagatcctctcacacaaaatgtatcagggggttttcccttatgtcaaacctaagaatgcacataccaccaaaatgaatatccctaacttcccttttgccctacgaccattattctgacactacattatgcaaaggtggctcacacacgatacttgccgacctcaagtggttccctgtcgtaccaagcataacagccccacggcctgggcctcaatccatgggcccaaagtcaatgtattttatgtatttactttattagtgggtcaggtttacatgcaaaccctagcagatcatgagcatgctcgtacctggatcttagtctataaatactacgtttgccctcatacaaaaggtcgaaaaattcatagtgtaaatactatagcaaagagctagggttcttaagcttgttaacaacttttgtgaaatacttcaaggcttttcagctcaatataaatgacttgtggactagcgttcattaatacctaaactacgtaaaaatatccatcttctttttcatctatttgattcattttattagttcttactctaatatattgatttttcaaaaatctcggcaaataatttgatatttttattaagagttgaggaaagactttaagccaaattgtatctgtaacaatggtggctacttcaaatgccgtcactaagcccaccactcatgatcaggacgctgtcatggacgacgttaaagtatctcggcaaaacaaataaataaataaaaacaaaaatgatatcccttgaaatctttcttatattatatatcaactttcacacagaatttaagttctatttgaacacttatattaaggagtttctaaatcttgttggtgatatatttcttttaattatctttttataatgttataaactattatgtataattatttctaggttgttgattagtgcaatcctgaaggacaacaaataatgttaccaaaccagtatactaatatttttttatcgagcacaagacaaaacatatgcatatcaaaattaagttcaattaagaacaaaagtatgtagtaatattaacataatcagagttatatatatatatataaatagtatattctaataatctatacaatttcaggggaaggaggatgatgaggagggtgttgttggaagatattcgaggatcctaatcgtgtggcattaacataatcttgtggactatgagctggtatgcctggcattaccaaaccaatgatcctaaacaatcttaagaagttcccttctttgtactcttttcccttttttcttggaatagtgaagcttcttaccaactcacaaaatgcattcatcatcattggtactgcccctaggggtgaaaaataattcttgtttggttcttcttccactatctgcagtaatatttatcatatatgtttaatcacacaaacactagctaattatgctaattcttttgtcaatatcttgtgggatacacatacacttatgagaatatttaacaaaataatttatatattctttttgttttgacaaatagatctcttttttaaagttattttatcggttcacctgattttttttttttattttttcaaaaaaaaaaaaaatgtcatgttaccaattatttcattaaagaaaatgtttatattttttgacttattactcgaaattaatattaatgagattaatataagttagttatttacctttccatggtagtggcggttgaagtagaagcaagtgccaaaatgcttgaacaagagatccttgtcatcataaggcaacctaggaaccatgtcattaccataaacaaatctaaaatactttatcttatgctctctcaattttttggtcatgaattccccaaattgcccatctccaaccctaggttgcccaaaagtgtaaacaccctccaatctctccaacaaaaaatcatcctcatgtaataccaaaacagttggaaaaagaatagctagggcaccaccaagactatgccctgtcaatatgaaatttgctttgtcgtttttactcaacaactcccttagtttatccctaatggcatagtaagcagtagccgggcggttctgctgctccctgtccaaatcggtgtcgttttgggcctgaatatctttgggccagcccaggttcttttgtaggcccaaagctttcataaacccaccatggattttgccaactttagaaagctcgtaccaagaaatgtcgaagtcagaacaccaatcttcagcatcgaatggttcagttcctctaaatgcaacgacaatcgtttcatggtcgtttcccttgtctcgaagtaagaaggcttgtgtggatggcttttctagatattctaagggacaaaaaacccaaacattaaattatatatttccaattattcatatatctatatatgatcgtaaaattcatttatattttatttctttaattaccgttccaaaagtcgtaggttcctaagcactccatctgagaacacatgcacaaaaaattaattaagtttaatgatgattaattaaagttacagaaatgttaaaggcgccggtagtctcctacgtgtcaatatatctattggtctaatttagtatcgggtccattttaatataataacttttagggagtatcgttagccaatcgtaaagcgacacgtcataagagtggtagacaccactagtgtccgatagcaatggtcttaaagttaagtgataaaaaatataccttccaatgatggttgactatattttgaatgtaagcagtgttttcataggatgccttagaggccatcatagagagtgacccataatatctggggtccccaaatttgatgttggtgtctagattcattctcttgtccaaatttccaataaacgacacgaacatttctgatgttttatctggctttaccactttccctgtccaaattaattccacaattcacaacataatcatttttgttttcttcattacatttttttaaaaagaagaatgcatatattatggtagctttaggtaattaaaatagttaattaaaaccaatatggtacaaattaaaatatggataaaaaagcttacatacattgttttcttctggagttttcattcgtttttaatacaagtataaatattgtggacattattattgagtttatattggtggcctactttgcttttgacttatatatgtaaaagaaaacaatacaggaaaattgaaagagactagttgattaaagatccaaattcaaaagtaaaatttttggcgaattaatgagtgaaataatctcatttagtgattcacactttttctttcaaaaaagagattccaagttcaaatacattactctcctaatgtcaaaaaaagagagtaaattttagtggtatataattattagagtctgtcaaatttgtgtgactttgtaatgtgccatctcagaaatcaagaacaaactaatttgacagttagtttgttatacatgagtagcagttagaagttaagagtttctatttttgggtataagcctataaatacccttagctgtgtaattagaacaatttaatctcttacttgtaaattcagattggacacagagcaataaagctatttatttcagctaagttcttgtgttcatttgacattggagtttgtttttacttattgttcttggatgttcattgtgtgtgtgaggatcgaattgtcatcaccaataatatcatatatatatatatatatatatttatctgtagagaaaaatggaaactgatatgtggcttagggccttaagcagctacgttaaataattagtttcgatgattagcacatttggggttcttaagtagtattgtattaaataataaatagcactatacttaaataaaatattgtattgtattgtattgtagtaatcattacaaccttatattttaatgcaatatgaat

SEQ ID NO: 28868 - DNA, 1578 bp, Cannabis sativa
aggaatcttttggtacactagtttttaataactcaatgtataatgcatacatatatgtatatgtatcaatcaaaggtgtttttggacatggaaaagaagtgcatggaaaggtgaaaatgagctactctggctgattgaaggccataattctacataatgaccgtgaccttgttctctattattttactagagtttattgttcttacacagaaattgtcattgtgtctttgtttttcttcaataaagactgccaatatattttcatatacactgaagatatgtaatttttttttctgtaagaaagttgtttattatcttcttcaatagaggaatggcaacccacttcaattaattatgagtttcaccttattaaaaatgatttaacacactagtgtattatattagtgtgtattttatgtgcacatatcattattctccatacaatggttttgattgtagttgaaagagaaactttagagttggagagttcggaaacttcatattttgttcaatttgatcactatttttttgacagcataattagtcaaatcaatgagattattgaagcataaatattgtaagttaacaaatttttgattcatactttcatcaataaattaaccctaaaccctattggggatatttctgctggtttgtaataaatatttacgtatgggggatatttttcagaaatcaaaattcagaactaaaattctacaattggcatagtggttaaaagttacatttattattttattttattaggagaaaattctttgttcgattacatttgtatgaagttgttattgtttcgtgagtgaacattctatttatctccaagggtaagatcatgtttaagttgatatcacaattgttaattattggccaattacactgttaaagaaagaccaataagctcatggctcatgataacaaaacaacctcggagaactggtgaggcaaccaaacacaaatgggcaaagagcaaaacatagttcaaaacagtgaaggagacaggacaaggacacaccaccatttgagaaaaatttgacctcaaaaaatgttcgagtgcaacggagccagaacgcctgaaatgtaatcaagtagcaagaatcacacactctaaagcccacacacctgcacgagaaaggccaccacacaactccaaccacaaaatcagcaagggaagcagagctaatgaactccattgcctgatggccaaaggcacttcacccgagacccacaaccaccgcgacggactccaacagaagagaatggagctcgtcacattcgagaaatcatgagattctctatcactaccctcatcaaatataaggtggggttagaaaccataagaattgaagaagtgttcagttttgttttcaaatccactcttaatatgtgtttatttatgtaaatttttttttaattaagcgtttctatattacaaattatgatttgagacttgaactcaagatattcaatacacacgcacgccttaaccgcttgatctaacctcaattgatttttgaagggaatgtatgtagattttttaaaagactcaattatataactttt

SEQ ID NO: 28869 - DNA, 6475 bp, Cannabis sativa
tcgaccaaatcgacaaaaattatttgcgaattatatttttttttattagacaagttacaattagatatttataacccgacatttatattaaattagtaaaaataatttataacctgaccaaacctattgatacactgagagcaaacgtttcataagattaactaagtagctatatagatagagagtagagtaggtgtggggtcaaaggatggaatcccgtctctcggaaatcatgaaagccacggtggcgaaacgctttttgtaattttttgtcgtcatcctggaagaaaacagtccacctgagcctgacacccgatatataaaatcctaaaaaatcttcttagtggtgtagccagccactactctttctttacaaccttttctactgaaacaagataagagtccaaagccttgtgtaccaccagtaatctctttctcttcttcctcttcttcgtgtaagcgatcgatctctttcttctcgaatatgtatttcaggatgtgaaactgaaatttgtttctcatttctgtttggttgcctcgaaagttgacgaaaatatatgtgacaatttagttgtttttttctttttctttttgttgatgaaagctcatgattgaattttattttgattttgccgttaactcttgctcattgagctacctagcggagttttatacgcatatttaatctgaaatgtttattttgttaatattgaatagaatcatttacgttttgcatttaaattgtgaagtgttacgatctttctatatatcttttgcgcttaaattgtttgtttaatcacggatgatgaaataatatcttcgtgctaccgtaccatttaaatatagattagctggacagaagtttacttactgttttcttgtgaagttctcaaccatttgttgttctttcagtgtatcttgataaacgcttgaattcatttttgcttacaatgtatttataggtatagaattatatttttttctattgtgtattcttctatgtaaaatgaaaattatatatttttagagggaaaaagctatagtttgtgttagagttatgatttgccaatacaaaaatatttgtgtatcaattaatattaatttaggctagctcaaaagggaggatgagtgatcagagtacagtaaatatgtcttaataagaagagaaaaatatttcatacattactacatggctggttcttctagaagggctatggtatggtgcaatgttgtggggttctgttttcacatttgaaacttggtttttttttttcctttctttttttggttgagtaagaagaatgtcaaataactcaatgatatagagcacaatggtaatccataattcaacagtagaccatgacttaagaatatttagtgattctttatttatttttattttttgtacaagctcaaaatttattacacgatggaagttcaaatttttatgaagcatagtctctttgttgtaattgctatacatgcagcttactattctgcatttataaattaatcttagtatataatctctcattacttgctccactgtagagatggcatcagttcatagtgccctgacatcagttgtgttcaagaatggaaaccattcttctccaaaaaagttcccaagtagttccttcttacctggatttgatattatggggcgtgtttcatgtccacataaaagggaaatgtcaggccctagagccacattaacctttgatcccccaacaaccaatgagggtaaggacaaacaaaggaagcatacagttgatcccgcttctcctgattttctgccacttccatcctttgaacaatgttttccaaagagcacaaaagagcaaaggtctgatagtactttttacgacaattacttgcgttggtcatgtgtgaacatttaaattctttcaaaccaaaaatgagtaaaaaaattaattacttgattgatgtttattattttgtttattgcgctatactcttcaaagcactgaactcagatatatatatatatatatatatgtgtgtgtgtgtgtgttactaatgaacttgtcattatccataaaacagggaagttatccatgaacaaactggccatgtacttaaagttccatttcgacgtgtccacctttctggggatgaacctcattttgatacctatgataccagtggtcttcaaaacattgacccacgcgttggtatgcaaatttatattcatatattttctttttcatcttggtgtctgtgcgcttcatattttacgctatgtggtacttgcatttgcctatactataccccactgctaacacacactcatactatattcattgattcagaaattagacactagttttggtccatgctattatgttttaaggatacagatattcagaccaaattatcttaattattgactcttactgcgcaaaatgaacttggcaatttccagaagtgaattacctgacttgtttggtaatataaatagtaaataatgtccaacttagtcacacatgctgtctttaaatgctcactacaagtttaaaaaaattgaattatataaaagaaaatagtagttgactcgccatatattttttgatgttgtttattttattttccttacataagtatttctctcatctttgagtggttctgttagacacttggaattctaagataatctgattcggcatttagtcataaaaccatttcatttcatttgacttaactagattcttgtctttggagctcaaaatagctttataattcatttgtttggtttacattgtcaaataggactccctaaattacgtaaagattggatcaacaagcgtgaaaaattaggtgcgcctagatacacccaaatgtactatgctaagcagggaatcataactgaggaaatgttatattgtgccactcgtgagaatcttgaccctgagtttgtgaggtcagaagttgctcgtgggcgggcaatcatcccatccaataagaagcacttggaactggagccgatgatagtgggaagaaaatttttggtcaaagttaatgcaaacattgggaactctgcagttgcaagctccattgaagaggaagtttacaaagtccagtgggcaaccatgtggggtgctgacactgtcatggatctctctacaggtcgccatatccatgagactcgtgaatggattctgaggaactctgctgtaccagtagggactgtaccaatttatcaagcactcgaaaaagtgaatggaattgcagaaaatctaaactgggaagtgttcagagacacccttattgaacaagctgagcagggtgtcgattacttcactatccatgccggagtactactaaggtatattccactaacagcaaagcgcatgacaggaattgtttcacgtggaggatccattcatgcaaaatggtgtcttgcttatcacaaagagaattttgcttatgagcactgggatgacattctcgacatctgtaatcaatatgatgtggccttgtcaattggtgatgggctgagacctgggtctatttatgatgccaatgacactgctcaatttgcagagcttttaactcagggagaacttactcgcagagcatgggaaaaggatgtacaggtaatggatgaacatttgtcctcacaaggtttacatatcttttaacaaaagcaaactgtgtttacttttatagtgtttttattttaattggattttcaggtaatgaatgaagggcctggacatgttccaatgcataagattcctgaaaacatgcagaaacagctagaatggtgtaatgaagcacctttctacacccttggtcctttaacaacagatatcgctcctggatatgatcacattacctctgccattggtgcggccaacataggtgctctgggcactgcacttctctgttatgtcactcccaaagaacaccttgggttgcccaatcgtgatgatgtgaaagctggggtcatagcatataagatagctgcccatgcagctgatttagccaaacaacatccgtatgctcaagcctgggatgatgcattaagtaaggcaagatttgagttccggtggatggaccagtttgctttgtcactggacccaatgactgctatgtccttccatgatgagaccttgccatcggatggtgctaaggtagctcatttctgctccatgtgtgggccaaaattctgctctatgaagataactgaagatgtgaggaaatatgctgaggagcacggttacgggactgaggaagctgtgcagcgaggaatggatgctatgagtgctgagtttttgtctgctaagaaaactattagcggggaacaacatggtgagattggtggagaaatctacttgcctgagagctatgtcaaatccgcagagaggtgaaggtcagtctttttttctttgtataagtttttccttctttttctcatgtcacatgattgtatgtagacgtgaatggttctaataaaataatcgaagtctgtaatccaagagccaaacataagattcgtaatgtagcattaagctctggccaaacatttgtaatttctttagtttaaattaatcattgtagagaccttcactgaatcctgatgtattaaaattgttttctacagtgtaattgattctcttagtgaatcttcaagcttttcttacaatgttcgttgcttgaacttcatttatttgttttacttaaaaggaggtcttatattgggttgggttggtttatattttgcaggaacattgaatgaaaggaagcacattgacaagtttggacgcttaaacagcatgttcagcagatcgagatcgcgttattgggcttgttttaatgttcatgctatggtatagaacgtagcttggtgtttgaaacttatctaaagacattatttatgtgttctacctatttcaatgcgtcagtaataaaacaattgtgctttcttgttttaagtgattatattttttctgtgtttgattccactaacataagagacgcaccaggggtgcctgagtctgcttcgcaatagctaaattgggccagcggggcaggcaggtcaggctgagatagtccctttgaacctgaacaggataatacctgcgtagggagtgtgcatgttattttcctgttttattgtacaggaagagagagagacctgtgatgtgatccatggtccgagaaacccgacaacataatggccggatgaacttcgtttatctgtgcttatggtaaggattacatcgtaattgagtgagtgatccttctgatcttaatatgtgctattacaagctctactaagcacgaaaaacactaaaacactaaagtaccctttcaccgtggcctttcgctggagtaactattattatttttcactccctaatgataccgtgaaacctgtatccatatttaataataaaaaaaaaaaaaaaaagtaaatagtagcataagtacttcaagttttaggtttgtaagcggcataaatccaataattttttttactagcataagtacccaatgtttataaaactgtaattttctttcagtttcattagtacagactctgttattgtcttaaacaggacacatataagactcaaattttagattatttggtctggacgaaaaaatatgtagtttcagttacttctaattttttttaaaaaaatttaaaacggagcctgtactgacgaaaatagagaaaagttacaattttacaaacattgagtacttatgccactaaaaaaaatcattaggtttatgccacttacaaactcaaaactttgggtacttgtgccgctatttaccaaaaaaaaaattatatgattcaatgaatgaaaccaatcctcaaattacatagagtaggctattaaatacacaaaaaaacaaaaaaaaaaaatatataaaaaatacgatttcacggaattttaaatattttttacgattttttttagtcattttatgttgcactattgttaatttgttgttgattttttgttatatttatgttatttagatgttattttcatgttacttttaggtaatttttttgttgttttcgtgttgtctatatggaaaattgtaaaaatatatataaaaaaaaatctttagacgtaaaaatataatttttttacaaaaaaattaatgtcttatgtaattattccttttttttatgtgttctattctttgtaatacagtagaacttctatttaagagtactagaatagcttctaatttgttataaaaaaaaaatcaaatcctaatttgaaccagttataaataagaataacctctaagttgtaattagttatacatttcccaagtctcgtattattaaagtatacctctatacaataataattagatcttaataaaatatatacataaattttgtaaatttatttatgtaaaattaataattttattctaaattataatacatgtataaatttattcaaaaataattctatta

SEQ ID NO: 28870 - DNA, 1782 bp, Cannabis sativa
aaatttaaaaaaaaaaaattaataaaataatatatggagtaattctcctattttttaacatttctcatatatttgtttggttgagaatatctaacccaatatttgattgaatagatataaattatgtttggtttctatttttttttggtaataaattcttcttgaattatgaaaataattaaattttttttttgtcacatttcaattattttgataatttattaatgtgatttcaaaactactcatattatagtatgagtttcttttaactaattaagctagttgaaactaaatataataaccttaaatatttaaatattaattctaatattaatgatacaatctcatattttaccattaaagtattatttacaattttttttctgaactctcaaattacagtatataattcaatcttacatcaggaaactatttgcaaaatttaacaaaaagcgacaaaagggacaaacttacaattagtttcaaagtttgagaagtattctttaaaaaaagtaataattaagatgacgcaatcttatgttataagtgtcataattcacggcaaacatctacttattctatttcatttggtataatcttaaccccaaagaaattactattacaatttcatttcagtttaattttcaaaatattataatgtcttgaaaatcaaactaaaatgaaaaatacaattataatgtcttcaaaatactttaaagttttagtgttttaatgtcttcaattagtttctctcttccttttaatgggtacataaaaaaatacacaagttagagatatattcgtgaggcccaacccatgagataataggtgtgttgactaggcaaattgaacactatcaaatcgttattaccgtgttttataattgtgggtaattaatgcgaattaattacttgatctttattttaagtagtttcccattttaacttgatataatcttctggctgagatttaaggaaagttaactccttactttgtggactttattaaaatgaaattattctaggtgtccaagaatacgttgtctggccttccgaaagcgcggtactaaaattgcttccgggtatgggcggtccttggcggaagctcacctgaacgaggtgggaagatactttcctagaaggtcttgccaaacttgggcttggcccaagttatcttctttgggcccactggtgggctttgaatgctgacctgaatccacgcgtcccttgtcggaaacacgaataacatttaccccctaagcttgcagcatgatgtgtattgtggaagcttgccccaatccatatgagtggacatatggaggttaaaagtaatattcttattgctttccaggtgctatttaccaaagagttactttctagaaaagctttattttgacggttgtttatcattggcgcaaaaattaagaaaagtatttccatcattgatttggacctcggttccagagagcattaaatgcgtgacatgcctgacagttagacttttgagccattagattggatatgtttgtgctttccgagagacaatcttggagcattcatttttcttggatcattcattttagagagacaatcttggatccttcatttttcttcatatggataattatctcgagtataagtacccctaaaagatacaatttaccactttttttctttcatatttttattcgctcaaattcaaattttcttgagagcaaaatacggtgaaattttttagtagtgaatgaaccaagccctcgatgatcttcttcgaattgctttt

SEQ ID NO: 28871 - DNA, 1292 bp, Cannabis sativa
aactaagagagaatatattaagtacagggattttattttatggtatgttaatataagaagaagtaagaactttttgaagcaaaataaaataaggacaaatagtgtgactgttgttgtggtgatgccacattacatagtaattaaaatctgaaagtgaaaaagaatagagaaagaatctttgtttcaaaagttgtccatggcagagtggctgtacacatgaattgattgccaaagctgcctgcctccaaaactgagactcatttttactattatattttactttttcttttaccattatatctctgtggagcagtgagaatttttttttatttttattttaataaattgagtctaaaataggtttgtttgtttgttttttttgtttaagatgacttcccaagattcatttgactcatttgccaaaattgctccaatgtatgtctgtcaaatcaatggcacaaagtacacccacaagaaagagtgtgaaaacccttcataaggaccacagaaagacaacaataccacagccaaccactaacaatttagaaaaactaccaataccacttgtaatagggtataatttacggggtcggtcctataggacccgagacgaaattaaattttgggacctctatatatatagttttaactattataaaaatgatagttctagtgcttattgtaatggttaagtttttaaaaactcttaagagctccaaggtttaatctctcataactacacattaaatattttttaaaaaaatttaaaaagtcatggttaggaattgatcacatgatttcctagtttaaagaaagactttttaccgctacaccaaataatttttgttatattttcttcttatttaatattttatctatatattaatatatttttttttcataatttcgggaccttgaacgttcggggacccgagacgcacacctaatctgcttaccctcaaggccggccctgcatatacaaatacaaaactctattccaaagtacaaaacaaagaaccatcaccactaatcttataagacaatagattagttgcctagaaactggaataacaaaattttaacttttgcatatttattaacaggatcggccccgaaaatatataagcccaagacgaattaaattttggcgccctaaaaaatatataaaaaaaaaaaaaaaatcaaaaaaagagtgttatggaatttttgaacctattaccttagacattatgtcatccacctcaaccaactaagctatgaatatttgttatttataatatacttaaatttta

SEQ ID NO: 28872 - DNA, 1669 bp, Cannabis sativa
tacacggtattaagaaattagggtaacaacctaaattaatagggtgttacaatggcactacaaaatcatgttaaaaaatctgacgaagaagttagaagattgaagaaaatatgtctaatttggcatctatgtttttgttgcagttttgttagatttgtcttttttaaatctctttggcctgagataggacacgaagtgtgcaaatttgtttggcatttctttgatagtggtaacttctcaacagatctacatgctacaactattttcatgatcccaaagatggagaatcctagccatgcaatggaatattggcccattgcttactacactacactgtataagtgcctttcaaagctcctatgcctcaaacttgctttaatcctacctgtaatagtgcatcaaaaccaaggggccttcataaaaaataattaaaaatctcataatataatgatatttcacgacttgattaagcattatggctgcaagaatgcttgtcctagatgtgttataaagatcgactttagtaaaggttatgacaatgtttgttggatgttcctggaggatctatggaaagctcttttctttccctctaggtttattcactggattacgatctatcttaaaaatacttcatactctctttctatgaattgaagaattcaaggcactttcaagaagatgaaaggtctaaggcaggagacccaatttcacctttattttttgtgttagttatggaatactttaccaggaatcttcaaattgtttctcgagaaaagagttcgaattccatctaatgtgtaagagtgttcaaattattagcctttgttttgctgatgacttgaccctcttctgcaaaggtacaagagaagttacaacactgttaaaaattgcctcagatgagttcagtttcatgtcaggcctgcattttaatctatgtctcaaatttactttagaggagtttcagaggaggtcaaagctagcattctaaatgatatataatttgaagagggttgtttcccccttaaataccttagagttcccatgagccctgcaaaatggagatttgtagattatgagataattatcaggacaatcaaactcaagttgcatacctgggaaactaggcatatgacttttgcatggagagtttagttgattcattcaattttggttgggttatgaaattattggatgagcctattttcccttcctcaaagtctgagaaacaaagttgagcatctgagtaggttgtttctttggggttcaaatggaaactggtttatgctccatttgctagctgggaaaaagagtgttgtcccaagtctatggaggaattgggtttaggaaggggttttgattgcaacatggccactttagctaaataaatttgggctttaactaaaaaaacatgatgtgttatgggttaaatggataaacaccatttatctaaaataggaagatttttgggactaccaactaaaacaagattccagttggtatcgtaggaagctttgtaatttgaggaaggtgtttcgaaatgttgatattatggttgtaggtgcttgtgtaaaatttagctcatccaggctttataacaactttcttgtccaaactcgggtgttgcatcattagaatgtttggaataaacttaaccttcctaagcatagat

SEQ ID NO: 28873 - DNA, 1299 bp, Cannabis sativa
  modified_base (823)..(826): a, c, t, g, unknown or other
aataaataaattaaaatacaaatatatatatgatgtatagttattgagcatcagtatcagtactgttcaacaccttcgataagtgacgtcatacgattggttatcgatattttttaaaaattatttttttaggttatacgagacctgatactcaattacaccaatagtaatataacacggaggagagtgctaaacacctagtggtatcttttaatatttctcatatataatgattgggatggagttatttttgaaacattgttatattaatagtgcctacatgtcatcttataattaattagcggtatatgaaagtattattatattaaattatatgagataatatgatacttaattaattgtatcaatagcgatattgacatatatattatactgctggttgcttttaacattgaatttttattcttattattgaatttttttctatttttaatacctaaaaaattatatttcagcttttatattgcgtttatgtattgtagttataaaataatatttatttatttttgagaaactgtaaataatttaagttttcaaatataaaatttaaaataattaattctatgtatataaataaaataaaataaacagaggtgcaattaaaatgttttaatattatttttaattaatattactataaattattaaaattcaaaaataaatacaacacctactctaactataatatacataaaaataatttgaatataatgttttcatatatatactaaaaataataaaaaaaaaatactccaccggttgaaacaaaagttatcctacctacatatatatatatatatannnntatatatatatatttattattaattatgtggggataaaagaaattaataagagtatgcatgagataggtcacccactttcattactatatctatatatatatatttatatttatatggccgctatatatatataatgatatgattttaatttataaccaacttctcttagttagtaattattttattatttaattattggttctattattgaagtataatattaaactagtccatgttttctgccatgtgacttagcaagtttaatttatatatttatatatataatgtttggaattcttaatgaggtattggtgtcaccttttcccatcgaaaatccatggtttaatttttaggtgattccaatatttgtttttcaagttttttttttaattattatatttaatatatatttatatttcattggtatatatattttcaattaaagctagagctagggttcaatgggctcttt

SEQ ID NO: 28874 - DNA, 2271 bp, Cannabis sativa
ctaaaacattcaaacccaaacgttcttcattatataataaacatacgaactatagaaaaaagcaaatatttttattgtcaaaatatattacataattattatttggtaaccataaatttgtttcacatgacttagagctagtttgacatagttgtgttgtggaaaaaagcaattgtagttgtgctatgagaaaaagaaacagcagtagaactatagaaaaaagttgagcagggtgtttagtaaaatttcatcttagtacaattaaagaaagatgcaattgataaactaaaaagttgatgaacttatcaacatttataagaatgaaacatatagaaaaatactagatacttagagcagttttttttttaaaaaaaattaatataaattattatttttggcaaattttttacacatttacattgaaagattttgttttttttaatacttttatggtgttcatcaaaataataccaaaataacaaaaaaaaaaaatcacagtaaaacaatatccgaataatattaaaaaaataatatacaaataataaaaagttaacaataaaataacaagagtataacataaaaatacatgaaaaaaatcttatttttattttatgtaaataaaatctaaaaaatcacaaaaatatttaaaattctattttgtattttttttaattatttttatctgtgtatgtattttttaaaataatctctttctattcctatctttaaagtaatgctatagacatatatattcaaattggacataattgttatacataataaattttattcaattttagccatatataatttaaagtagggtcatagcacttttaattatatggttgaaattaattacacattactatataaaaatataaaaagtgtatataatttaaatttgtcaccatggttcatttaacaaccaaaaaaacatattgttggggctaatagccaataataacaatgcaaccccacctcaaaacaattacaacattgattaaatattttattttattgtgtaatccaagtaaacaatttggaaaatcttatttttagaaaaataaaataatataaatggggtgactatttcttattagctatttgtaatttggcactatcttaaattaattcaagttcaagttttttatatatgtgttttcttcatgagtggccaaatgtgtttcatgagctttcttttacaatgacagaagataaaaattgaaacatacctcctaccaaaacctatatttcattgcctttaatttacccaaaccactaacactaatgttaatcctagcttttaatacatcttatttaatgggctaatttataatataggttacattacattatgtagatccaacctagaattatttcttcatttaaaagcttaggataaattcacctaatttaatgatacggacaaaaaaaaattacgttttacgttaaatttattgtctacttatttggagatctccctgtaaattggactactggccggtatattttaatctattttcggcacgtggaaagttaaaattttattagttacttttattcataacggtatatattgttatagttgtccttctactaattttagaagtttatgaataatttatttaaccgataactaatttatatgcttgtatttatttttttatacacacgtgaaataagttgtttgcaccttgattctaatataataaattatttaattttttataaaaaaaaaaattgtggaaattttattataattataatttccctatgtgatcaaaataataataataaaaaaatatatactaataatcttctttttaggggatacaccataaaaaatttcaaagttattttatcctaatgtattgttaataaataattaactcattcattattattattttatttttttggttatactttttaatctaatcatatgccttttaatcccaattcccctaactaggtttagggcattaactcaatttaagaaacatctcttccatttcaaaaaaaaatcctctttatttttagtattaatttgttaataattttctataattaaaatatatgaaacttaatattaacacttatttagctattttcctcatttatgacattaatataaatatggtcccaaatccaataaccaaattacatttgtagttattattaggacaaaactcctgcctcatgcaaaaaatgtgtccaaagatattatccaaacacaatcccaaaaagatgagatttttattttattttatt

SEQ ID NO: 28875 - DNA, 1809 bp, Cannabis sativa
tatatatatatatacacatgtatacacactactcatattgatggcttttttttttttttttgctcttttctgaccagaaaaactggggttaggtcaaatatctctaagtataaattttggtcagcaaattaaagtaaggttttttttttctttttggctataggtgtttcttggtctgattatcttgatcaatatgtgtttttgtatggtggtatatataattataaagcaaaaagttgaaaagaaaaaagaagaattgattattaatatcacttaattaaactcttttagttaaattcataattataaaaatagagaaaaataatttatttacattacagatataatgatgttgcctgcctccataaaattgactatatatatgtgtgtatatatatatatatcatccaatcaaaattgttttcattttgaaaactgactacaaaattaatcatttgatatagtttgtcaatttttttatggtttatggaccaaaaaaaaaaaaaagaaaaaatgggacttaattgtctaagataatatataattaattataatcaaattattgtcaaaatgttgaagaaaaaaaaactaaacaaaagccaatttggtatatacaactgaaaaataataattaattatatgaaacataataatatgaagaattctcattccaaaaaccttgaaaaaaatgtataattattattattattattataattattattttttattggaattagaagtattgaaaattatttctcatagtaaatgtagtgtttggtagtgaaaaataattatcaaaataaaattattgtcaaaagtgacaccaaaaaaaaaattattatttttttaaaaaatatactatatcagtgtatatttgtattattatgtttggaaagctggttagttattactgaaaaataatcaaaataatataatcgtcaaaactaaattatttttttttaaaaaaaaaataaatgaataaaaccttatactatatcagtgtctatatttgtattattaattttctttggctgtatgttgttgccatttactcaattttgagatccttttttatctaaacagagaaacagaagccataaatttggacccaaaattgtatgcaaaagattttattagaggaacatgaaaaagagtgatcttgactgaaatgttacttctttttattatttttttttctataaataataaaaataaataaaagaagccaaacttttaaagaaccccattattaatatttgcttgctctagccaaacaaaggtgcagtttcattctgaggttgcattatatttaccttttttaagtaaaaatcattgttttaaagaataaggttataaattaccactaattagtatgagtggatattattaaaaaaaatgagtttttagacttaatttttctatttaattaaaaaaaatattttattatttatattatatgagattagatttgttctgaaaaaaataaaacaaatattaggtagaaaaataagaaaaaaaaattgaggcttatatatttttatgaaaacattttttgatatagtgtaattttttttttttaattaagtatagaaattcgaatttttcttttgttattcgtcgttggatcaaaataagtgaaatttttttaatcacaacttaaatattttgtgactaaatgtgaaaatgttacttgtgacaaaacataatatttagatataaatcgtcactaatttaattttagtcacaataaattgtaattaactaatatatttagctataaattttttagtcacaatataagaataa

SEQ ID NO: 28876 - DNA, 1212 bp, Cannabis sativa
  modified_base (1147)..(1154): a, c, t, g, unknown or other
atgtagagaagcattgaagcttctttatatatatttttaaataatatttttgtcatttcctctctttctctctcctatcaattacctttttattagtttttttttctaactttaattaatacactcatagcaataataaataataattataaaagaaggtttttttttattatttaatgaaaattttgtgtgtaataaatgcaaaagggaaatgattggtgcttcttcttgcggagtttttttttactgttcagtcaacatataaaatacatccaaatttgctttaataaacaataatgaatgcactatttgcagtcaatgagtggatttttttcttttctttttctgaattagtttcaatattttgtatatataaaaactcaattaagatattgcccaggtgtagtgtagtacgtactcataaaactaataataagcttggaatgttcaaatgaataatttctaaagacatcttttaaagcatgcaaatgtataaatatatgtactcgattgctagctagcttgtgtatgaatatatatatacacatttataattgtatatccatcataacattatctgcatgttagatatgattagtatttgcttcagaattcaacctcaaaacattttaaaagagagagagagagagagagagagagagatgagagagagagagagaaaatatacacacaactaacgtaaaacacatccataaggcgattaattaattaatgaatgtataatgcttcataatattataaattatgtaatgtaatgcaatccacgttgatactcatatttatatattttatataaatatattattatagtcttggcccttccatgatcatattacacaaacgtacgtatacaactcaacttatattattatatatgtcggtcagtatatatatatgtatcgatctataaatataatataagaaaagcttatttgcgtctttttcttcttctcctaattgaacactatatattataccaaataattaaatgattaaataatatataatgagaacaaattgaagttgatgagacaatgaattcttcatataaagtcatattgaaatcttcttctaagttctaccctatacttacttaattcttcgattctctctctctctctctctnnnnnnnnctctctctctctctctattattattattattattattattatgggtaaataccatttt

SEQ ID NO: 28877 - DNA, 2260 bp, Cannabis sativa
aaaaaaaaaaaaaaaccttaaagtgtaaaaatgaaaaagtccttatttttttgttttcttttttaaattggtttcctcttctctttttccctctcattatatatatactaatttgctttcagaatttctcacaaccactcttcatctaccccaatctttctcttctctatttttctctctttgtttttcataaactttcatggccaaaacaaagaaccttggttaaccaaggaaactggtcgacaccaaggctaccccatccaacaccgtacctgagccgtcacaatctctgtctgctattattcgtgcagtgcctacccctgcaacagtcgattcattgtctcctcggtgtgaattagagaaagcttcagtcaagaagccatcttcatccaaatcgaaggaatcacttgtgtctcaggcccttgttctagtacttgttgtggtgtccccttctcttccttcttcaagcaagggaaaattaaagtctcaagtctaaaaatttgttggtcatatccctaagcctgatgttttcttctctagttcgaagtctccatcctcaccggaccacaatcttcctcttactgctaaggaatctcattctcaaaggtcttagtctccatttactactgttggtgcactttctacaacaactactctgaaaggaccctcttctcaaactcgtgctcagcaagcttctctagaacatgaagaacgaacaaaaaagaatcatgacaagccttttcttactgctaaaaggttcaaactcaaccctcctttagtgtcctcaagtgaagaagaagaagaagaagagcccctagtggcttttagttgggaaactgattccaaagagatgaaaccttttcatctagaagaggtaattctgttgatgaagatcttaaatcaactgaatataaggaagatcaaactattgtcgaggaagaaaaagatgaagtgtcctctgatctgtctcctaaagtgtcactgaccaaatcttcattaataactcctcattctgcttctacaaccaaggtttcatccaaagaaaagggtaaacaaccaatgaagggttcttcctctggtaatacctcttaagctctcaattctaggttttgttataatgataattaaaggaattggaaattgtatgctacccataaatttaaaaatgagaggaattttgatttaagtgctcattgagtttatggcattatcaagtgtttacaacaaagaaattgggagggtactttatctagttttgaaggttatattgatggcatagtcaaagaattttatgctaacttgtctgatgattttcttgatgaaaattttgagttctttggcgaagtttatgaccgagggcattggttttcttttaccgaggatgatatagttaaaacattacaatttttgaaaaatgttgcaagtgaggtcgtctcttctaaacgtgatttgatcatttccaagatcaccggtgaacaagttcaatggcccactggtcatggtgtccgcatcacacatctcacctatggtcatgctttgttaatgtggtttgaccttagcgattggtttccaaattccaagaagacaatggtgtctcaagatttggcctttcttctctatcggatcactaatagtgtttctattaatttgacttcatttatcatggagtaaattgtttccttctgtcgaggtaagaaaccaaactttaagcttattttccctaacctaatctataaggttctttcctctcagaagaatgttttccatctaaatgagactcttgagcctctttttattggaataatttttcaaccctcggagtactttgatggagccttccccaagcgcccaaaggcttctgttggtgcaagtccctctgctgctgctgcaagttctaattctactcatgtagtagtgcacgaagtcaagtaggaagtggctttgatgagcagttgcttggctgctatggaagaggttcaacaagagatgtcgaagtaattgtcaactttggttcagttttatgagcctcaagattagtgttctctttctttttcttttttcttatgtttgcttgatgtcttgttgcactttgttttgatttctttttatcttgggcccttatagataaacaaaagtaagagtaagggttttaatttactaaaatttggactcttttttcaaagggagtttgagtttgttttatatgtttacttttgttaaagttagcattttattttgtgttgttggtgtgttttttaag

SEQ ID NO: 28878 - DNA, 4937 bp, Cannabis sativa
cactactacaaaaatgaccttttgcttcagtttttaagtgacatatacagaatttgtgtcggtttgtgtaactgacgctataaccatagacacaaatagtctacttttttgcttcacttagaaacatacgctaaaagacttttgcttcagtttataactgaagcaaatagtaaagcactgacgcaaattagttttttgcttcggttatgaaccgaagcaaaagaataaaaaaaaacataaactttaatatcaccacaacccttcggaccaccacaacaacccaacaacaataacaataataataaatactgccaccacatcaacccatcgtaccaccaaaagcacatcgaaccaccaccatcccactgaaccaccaccatcccaccggaccaccaccactacttgcaaaaaaaattagagagaaaaagagagagaactcaaacgagaaagagaaaaaccatagctggggctaggagcgcaagaaggggaacgataaaaaaataatgaatctcacctttgaagagtccattttcttgagagagagagagagagggcgagggtggcgaagatggtcccgtgctccatgatggccaacaatgaactccaatgccacgtgcaaaaatatgagaaagagagagttagagtttgagtggttcatgctatgggttgggttaagaagaaaggaagaagatgaaggtgatgatgggtgaagagagggaattaggttagagagagagatagatgagagaggggcggctgagaagaaaattagtgttagaagtgtttatattttacgattagatttttttaaaatgggctaaagctcataattgatttttttaatgcctttttgcttcagttgtgcacaaacgctaatagtgtatataatgactttttgcttgggttgtagaccgatgctaatagtgtatacaaaagtttttatatctcatcttttgcttcagtttttgttttagcatcggatagataaccgacactaattaataattatttgcgtcggtggataactgaagcaagaaagtgtggtttgactttgcgtcagtcaacaagtttgaccagtcgcgttgaccgacgcaaaactcctttttgtagtcgtgagtggacggtgagaaacacgggcttgaggataccagtggctagtcatcccgccagggagttggctggctagatctgggttcttaagggcaagcgcgagtacggtgagcctaggcagtgtgtgttcatcttttgcacttccttcaggcggtcaagggcgtaggccctcgatcttaataatacctctggccgaaaccctcatggcctttggccaaactttgacaagcagttaagtggccttccttcttctttcttcgcacagcctcttctttgtaccggcttgcgctggtgaccaccatgcatgtttctttcctcagctctcaataaaagcaccaaaatatattacagagtttttcgacaactaaatatttttagcgctttaaaaagtaaagataggataaataacaaggtagcaaacgagagattttttacgtggttcaggcgtcaactatcctttgtctacgagtctattttattaggctcatcggctggtggttgttaatataaatagagatacaatagactagaacttctttccaccgtgttcctcttgaagaagaagaagcttagtaggaatatactggagctaatcgtaggattacagaaatgtgcttatctcagattatcaagaatcgatccgaaagaacattccccctcccttgggccttgtctgggatattataggccaacttttttgcatgctctaccttggatggatcatcgttggggtgaaatccgatgttggatcggtaggtgctatatttcccatttggcatttaagggtgtgaaatcgtacgagcgggcctcggacgcgtgtcgctttagggcttctcgtatttgaattgccttgtccctagttgttggatcatttgatcaggtacacaaggacacacatgctctttacagtcactactacaaaatatacaatttgcgtcggtcaacgcatctcaccaaaatggttgaccgaggcaaaaaataagtagcaattttttgcttcagtggataactcaagctaaaagaaaataattagcatcagctattacactaacgctaaaagaggaaccgaggaaaaaagtgaaaaattaaaaattatcttttaccttttgcttcggtggaaaaaagatgcaaatttctttagcttaagttataaataaaggtgaaaaagtttgcgtctgttatccactgaagcaaaagaatttaatttttgtatacgagcttcgagcttcagacccaattaaaaaaccctaacttaaacataaataaaaacaaaccgcacctctctctatctctatctcacagtcgcacccttcaccatcgtcttcatcctcccaccagttatctctctttgccccaaactccatgaacaacaagcactagtatttgggctatctctcgcctaggccagcaacacctccatgagctgaaacacaaaggccattttgaccactcaatctccctccaggctgaatctctttcccgatctcccctaaatctctattcccttcacccttttccttagaaactcgtagcccaaaccaccagcgccaccagcccgatgatccaaccacaacaatgcgcacggaagacgaattccatggacgcctaagcttatgggaaaacttaggtaatttcaatccattttttctttttttcaatattgatttttatgtgttttttagtgttttcaatctataatttgattattagtttatttttggtgtaagtctaaggatttcaaagtttgaaaccctaaaccccaaattttagggtctgaattttttcagtcaaatatagctaaaaagaaagaggaaatagaggaaaattagggaacaaaatgctctgtatattgctgaatttaatgcccctttttctgcaacgattatagtagggaatgttcccttatataaacattcggaatatgctagaagctattttcctattggacaatacaataacagaaatatattccctatggcccacataataatataaagattgagagaatcattttcctaatgattggtaactgtaataacgaatctagtcagcatcttggatatcctcaaccaattgggctgcctttgggcctttcatttcagcatgcccctcaagctgtgctgtgttgaatgacacacagtaagcttttctttgagataatgaaaggttgttataggttgggactttgtcaatatatcagctatttgttcctcggatgctatgtatctaacttcaactgatttgttcatcactttgtctcgtatgaagtgaacgtcaattttgatatgcttggttcttgagtgaaagacgggattggaagcaagttgacaagctcctgaattgtcacaccagatcacgattgtgtgactgtgctctattctaatttcagtgaaagagagattgcaaccaagtgacttcagtgcatgcttgtgccaatgatctatactcagctttggtgcttgatcgagcaacagatttttgtttccttgaactccagctgattagatttccaccaaaatagacacatatactagatgtggactttcggtcatcaatggaactagcccaattcgagtcacagaaactttcaatgatgggattggttgctttggtaaattgaatgccttcaccaatgctccctgcaatatatcttagtattcgcttgcaatcaagccaatgattttgggttggagcttggagaaattgactcaacttgttgaccgaaaaggtaatattgggtctacttaaggtgaggtattgcaacgccccaataacactcatgtatttagtaatgtctttaaaaggtgggatgtcctgtagatggagtttgttactttgaatcatcggtgttggactctgtttagttgccagcatatgtgttctttgaagtagatcaagtgaatacttggtttgagacaagtgaagaccatcttgccccctactagtctcaaaaccaaggaaatatgtgactgatccgagggtcttgagtgagaattgttggttcagctgagatatgatatgtcgcacacgagtggagctgttactagtaagtaaaattttgtcaacgtaagcgagtacatagagttgagcatcaccttaagcgaggaagaaaagagaggcctttctgatgaatattgcgctcttaaaaagaacaagacttggtaccttgtcgctcggttgcctcatatgcatgttgttgatgacaagtggattttccgtcagaaattcaactccgatggctctcatcaacgctgaaaatcgcgccttgtggccaagggttttcaacaacaacccagtgtggaattctttgatactttcagtcccgttgttaagccttccaccattcgagttatactctctcttgttgtcaccaatgattgggatgtccaacaaatggacatcaacaatgtgtttctaaatggcaccttagaaggagaagtttatatgtctcaactggtttgctatgttgatccccaatttcccacaactgtgtgcaagctcaatcgagccatctacgaattcaaacaagccccacgggcctagttcgacacacttcgccaagctcttttgcgtctcggtttgaagaactctgtccttgagtttcctggagcaagaagattcgggtaaaatatgcacttccttgggatttgaaaatgccagcttttgagcgtgtcaccataggatgggagggataggactgatgtggtgactggtgtagagatgattgcggttgttgatgtggttgctggtgtggtgcatttgagggtgcggtggctggtgtgttagtagtatgggagggactggatgatgagggtgacatggggtgg

SEQ ID NO: 28879 - DNA, 2228 bp, Cannabis sativa
caaatcaagtttttcgaattgtgttttgattatgatgattcttaattgtttaattatactagcaggactgagtaggaactgagaaacctaaagaactggttgaaggagatgaaaactgaagatggtgaggtccaggagggtatgctggtcgaagaagatgttcacacagagcctgcatgcaaggttgaggattcaccgtatgaattgcttcaagagagcaaagcttcggttgaggacataattaccaaaatgctttctattaagaaagagggaaaacccaaaactgagctcagagaactagtcactcagatgttcatacactttgtcacacttcgccaggcaaatcgttctatcttgcttcaagaggatcgcgtgaaagtggagacagaaaatgcgaagggcccagtggatttcgcaaccctgcagcttcacagtctaatgtacgagaagggtcactatattaaagccataaaagcttgcaaagacttcaaatcaaaataccctgatattgagctcgtgcctgaggaagagtttcttcgtgatgcaccaaaagagattccaaattctgtactgagaaatgatcctgcacacaatctcatgttgaagaggctcgatttagaactttcgcagcgcaaagagctatgcaaacttcgtgaaaaacttgaacagcagaagaaaagtctttcagaaaccattgtgaatcgtaaaaagttcttgtctagtcttccatcacacctcaaatctctgaagaaagcatcaatgccagtacaaaacctattaggggtgctgcatacaaagaagctgaagcagcagcaatcggtagatttgcttccacctcctctctacgtgctttactcacagttgctggcccagaaagaagcattcggtgaacaagttgatttagagatacttggaagcctgaaggatgcacagactttagttcaccaacaagctaatgttgacactggaatttgtactaatctggagaattctggaatggaggatgatgcagctgatgagaaagaagatggccagagaaggagaaaacgaacaaggagaatttcagccaaggacaaccttgaacagatagaacatcaagttcaccccctaaaagtggtgcttcatgtatatgatgatgacgatgaggtttctgctcctaagtctacaaaacttgtcaccattgaatttgagtatttgttgaagttgaacgtcgtatgtgctggaatagaaggatcccatgaagggcctgagaataacatattgtgcaacttattccctgatgacactggccttgagcttccccaccaatcagccaaacttcttgttggtgattctcttgtatttgatgaaaagagaacttctcgtccatacaaatgggcgcagcatttagcaggaattgatttattgcctgagctatcacctttgcttactcaacatggatttccaagcagtgatattgctaaaggtgatgcagttaaatctgacctttccacatccggccagcagaatcgtgtggctgcagtaattcaaagaatccgctctcggataaatggtcttgatccacttatgcagcttatataagaatggagaaggaatgagatggattatgaaaatatattataactgagattttgctctagggagagttgaggtatcactttgttcttattatttccttcataccatatcaaataccagatcgactatttacttccataatgttttattctaaaatttctctcgatcttaatatattgttgctgtcattatttgaggatcctagttgggacttattataagaaggagctgttcattgcttacagggccaatatatggaacaatagtatttacagagctttctggcttttttatcgcttttacagtcaatttcagaatttgatcaccctcttggctgcttaagtagtacttaaaagaaaaatgtgtattatggccaaacatttcttttataccaagttgaaaattcaatgaaagtggtgctatcttgttaggcccaagttaatagaatatagaataagagaataaatgaaaagggttaatgtatttggggtgcttgtgagtgaaaacaggttagtatataatatatatattggagagttccctactcttggctcgtttggttgtattaggtcgtaatgtattgtattctactatattaaattagattatatattatgtttttatattatactatgttaaactttaattta

SEQ ID NO: 28880 - DNA, 4259 bp, Cannabis sativa
  modified_base (1969)..(1971): a, c, t, g, unknown or other
tctaatctttcattgataacaaatcagattaggttgaaatgggttttatttagggcataaaatcccaacaccacttccattcaagaagggctaatggttgcattaaccctaccgggctctgctgtttagctttgatttgctagcaggttaaacacatggatacgtattctaccacatctattttcattccatgcccccaaaaatagggttttagatcttggtacattttggtggttcccggatgcaacaaataaggcgtggcatgggcttcatcgaatatttccttcttaagctcgctaatattaggaacacaaacccgagctttatacagtaacattttgttattcaagattgacaagtccttaggccgaccggccatcacctcatctcgaatcttgattagctcaggatcttccaactgcgcctttctaattctttctaacaaatcagattgaagtgtcaagttgtgcaactttctaactataaatttgattttagctttaaccatttctgaggccagttgaggagctatcattacagtagtaaaaaacctgcccgagacctcttctactcagtgcatctgccacaatattggcttttctggaatgatacaaaattttgcagtcataatctttgaccaattctagccaccgtctctgcctcatatttaaatctttctgggtgaaaaagtacttgagactcttatgatcagtgtaaatctcgcatttttcaccataaaggtagtgtcgccatatttttagagcaaatactatagtagcaagctctaaatcatgcgttggatagcgctgctcataatctttcagttgacgggaggcataggctataactttgttaccttgcatcagaacacatcctagaccctatttggatgcatcacagtaaacaacaaacttttctcgatccgatggtaaagctaacactggtgctgttatcaatcgttatttcaactcctgaaacttgcttcacatttgtctgaccatatgaattgttgattcttcttagttaattcggttagtggcatagaaatcttagaaaatcctttgatgaaatgttgatactaccctactaaactaagaaaacttcgcacttctgtcatagattttggcctcaaccaattttttactgattcaatctttcccgggtcaaccatgattccatcttctctgacaatatgccctagaaaggacacttctgacaaccagaattcacacttttgaattttgcatgcaacttatgatctctgagtcgctgtaataccattaagagatgatgctcatgctcctcttctcactgagagtatacgaggatgccatcgataaacactataacacagttatcgaggaaatccgtgagtactctgttcatgagatccataaaggccgctggagcatttgtcaatccgaaggacattaccaagaactcatagtgcccatatctagtttaaaatgcagtttttggtatatcttcttcccgaattctgagctgatgataaccagatcgtaggtcaatctttgaaaacacactctttccctaaagctgatcaaacaaaacatgaattctgggtaacagatacttgttcttgatcgtcagcttttttaactcccaataatccatacacattcttagggaaccatccttctttttcacaaacagaattggagctccccagggcgatacactgggtcgaataaaccctaaatcaagcatcccctaaagctgtagttttagctccttgagttcctctagagccattctatatggtgctttcgaaacaggtacaacaccaggtgccaagtcaatcacaaaatctatttcttgttatggcgataatcccggcaactcctcaggaaatacgtcgagaatttctttaacaatcctaactacttcaggcccaaatgtttcaggtctgctggagtcaatcaaaaccgctaaaaatcctacacatccnnngtgtagtaaatctctagcccttaaaactgaaataatcgggattcgagacccctgaatagatctaacatagacaaacggatcttcttcctctgcctgaaaagttaccattttccccttacaattaatgttggccgaatacttcgacataaaatccattccatatatgatatcaaattctgttaattccagctccactaggtcagcactcaactcccaatctttgatcctaactggcatagacctaattctcctattggagataaccacttccctgttaggcaatagggttccaaaccctcttttgataaaatcacaaggtctacctaatagattaattacccgtgctgccacatatgagtgtgtagctctcatgtcaaataacatagtaaaataggactttttgataagaagctgacctatcatcacagatggactagctgcagcattagcttgagtgatagcgaacacccgagcagttacgggttttgcctccggcttttgctcttctttctttgcctgagggcaatctttcttgaaatgcccaaccatgacgcactgaaagcatgtctttcggttgcactcttctggatgatgtttcttacaatgtgggcactcaaggtaagaataaccttggcatccacctctgctttggttcccacggaatcgcttgctttgtcccgaaccaccagatgctggggtaacctttcttttctgcttagtggttgaatcaccactatccctaccgtaaataggagtaggaagagtgagggtcccaccaacacttggagtcacacggggctcttgaagaaatttcacagcaccttcggctcgtagagccttttcaaccatctctgcatatgatgttgcctcattcgtagtataatcaccaggttgtgtctaattttcacatttagacttgccagatatttctccttcttgctgaagtccgtaggcacaatacccgaagctaacttggccagacgatcaaatttttttgtatattctgttactgacacaccctcactctgcactagctcggtaaattctttccgcttagcactgcggactgcctcattataatacttggcattgaatagatctcgaaactcttcccaggtcataacagtgacgtcttgagtgagggacaccaattctcaccacaagagggcgtcttcctggaactgaaaagtagcacaagtcacccgatcatttccaacgacccccataaaatttagaattctttctatcactttaagccattgctcaaccctacattacatctggacctcccaggaaaattggaggtgcctgcttgcgaaacctctcgtacagtggctccatacggttgttagtaacaggttgttctgctggcataacaggaactaaagcggcctgagcttgcggttgaggcactgcaggaggaccatgctgccttaatctaagaatttcttcatcctgctggtggaatacgatcttgcatttcagtgaatctctgctcccaatctggaggagcttgaggtggtttcacatgtcaaccaccctgaaaccttccaaagcctctgccgcatccaaggggattttagggaatttcatttccctgaccacctccagtctcatccctattaccttgactccttgtatttcattgggcgtccattgaataggacttagcctgcgaacccataagccaggtaggtcagacagcgatcacaaaacttaataccgctcttatggattttaaggcaacacattaaaaataaataattataaactaatatgcttcctaacatgctttaataatcacatacaatactaaacaagtacatgcttactgaactgcgagccgagcatttctctaatgataattgtacatgtctttgcgatcttcagtagacaaacttagcggctctgataccaaaattgtaacaccttaataccaaggcacactacagtgattttccaattacagtgctatctttgctaatcaataaaattttcttagaaattgtgtcaaattaaaactttagaattaactatgaaacattataaactatatatatttacaaaagtcgagatcccgttgttaaactttttacaaaatattctaaaatataatagtgaggtggcacaacgactacaaaataaaaaccccagatgtcctaagaccgaacactctaggtcgcgccaccatgtcatgtacaacgtcaccctagctcgaggttcactcatgtttagccttcgcctttcctttacctacacatgtgttgtaatttattttaccaggatct

SEQ ID NO: 28881 - DNA, 2205 bp, Cannabis sativa
caatgaaaacctgaaagttgagaataaataaatcaacaaacattaataagattgattatttcaaaagaaaagtgagcaaaaacctcacctggtcttttacaacaacatctccaacttgaacattgtcttggcttaaaaaaccagatattgatccagaaccatagtttatctcacaagattttcctacatgacatgcctagaattgattagtagtgtatttagtctagctaaatactattttagactctgtgttttgtaagagttaccaatttgaccatccgttttgttaaatgataattcataccctgtgttttttaaaatctaaaaaagtattatgatcagactggttatatttttgtatctgttcacgttggaaactatcttcaggttgtttatattaaaaaattagacaaaaactgagtacatgcctacatggtattattttgtactattttagataatacaggtctgatttttcgtttgacaaaatacaagatttgatttgttatttaactaagagttcgatcaatcacttttgcaaaacactagtttcaaaatagtatttactcttttaattttacataacatataacttgaaatgaagtgtgataactaagaattttaccattgctagtataggtggtagaccggcttgatttgtaccgagaatggaaataacaagctacctgcagaagcatttattatggtttcatgattaagtgaacattagatgaaaaagaacaagaaaaaattgcaaaatgagaaagaaaaatcttacagaaaagtaacattttgctgatggaacccaaagattggaacttccagtgtcaaaaatgacagtaaaattctgaggaggtgaaccaatactaatctctccaaagtattgggcatccaaatagttcttcaaaggtactatatcttcatctgatgagctactactacccaaatatttatgctctctttcaaattttgctgctgctttgatactttcaagatcaaggtctctcttcctcaacttaattctcattaaaccattggaagaatcaggaagaagtgaacatattaaggcccataaatacaaacccaccaccagatacttatgccagtacatctttagattgatcactataaataatatatcctgtcaaaaatagaatctttcaaaagggttttgtttctttttttctcttttgacagaaaagagggaaaaattatcatacatacatgatcaaagtacaaacaacaaaaataaatgaaggctttacactactgaataacttaaataaaccatataaagcaagcatgaagtgaataaaagggaaattcacttaatttggtcaaaaataaattagaaggatatatgatcactattcatatatatgtatgtaattagtgatgttaaagatgattattatgaagaaaaagctcaaaaacataccttggtaaagctaagttgaaaatggtggaagaagatgaaaacgatgaagtagaaggtggtgagagtagtgaccacaaagacaagcgtgtagaatctcctcagaagtaggaaattacccaattttcaaaatgaactgaagcctgaagcttggaatggtacacatacacaacactcacttgttttgttgtgttgtgtttctaccataaataaataagtaataaatatggctacaatacaaccaaccaaccaaccaaataatgctttatttctttttttttttttttttttggtaattacgatttttatcccaaaacttttacatgtataaaatcatgcttcttgaacttttctaactgttaaaaattctccctgaactattgaaattattagatttaaggatttttgtctaattttactaattcgatgattgtccatatactaaattatgttccctaaactttgatatctaccaaatcatatcgctcgatttttgacatatatcaaatcatgtcccctaaacttccatccatgttagacttttcttactaaaattgaacaaaaatctttaaatccaacaatctgaatagttcagtaaaaatttttaacgaccttaaaaattcagatgacatctttaatacatgtcaaaattcgtaggacaaaatttttaattagcttctcttttttttaaagaattctttattttgaaattatatgtgtttattaaattaattttgtaagcttagtattttgatttaaatatatatata

SEQ ID NO: 28882 - DNA, 1679 bp, Cannabis sativa
  modified_base (1638)..(1653): a, c, t, g, unknown or other
cattcctgtagttctaggcaaaccggttacaaaatccattgcaatgtcctcccacttccactcaggaagggctaaaggttgcaataaccttgccggcttttgatgttcagcttcgatttactggcaggttaagcatttggacacgtagtctaccacatctcttttcatcccataccattagaagtagggttttaaatcccgatacactttggtggttcccggatgcagtgaataaggtgtggtgtgagcttcatcaaggatctctttcttaagctcatcaaccataggagcacaaactcgagccttatacaataacattccattattcgagacaaataaccccttacgataaagcttcccatctagtatcacatattgaggagcctagtactggaccttctgagaagcagctttgtctgcgaaaagctcccctaaatttaggaattggtagatgagacatatctaggacttggaatgatcatcgatggcatttacccctacgtcgcaataattgaggctcctaagtgagccacaggcaccactctttattgaataatcttcaagtctgtggtgagttttgctagcatgtccgcaaacgaattttggtgtagcctttaaacccttgcaccatctcgtaggacatcatcacataagcagccatcttttcacattcggtatgatattccctagatatttgattcaccactaattgggagtcactaagcaccttgatatgttgggctctaacttccttaggcaatcgtagtcccgcaagcatggcctcgtatttagcttcattcttggaggtaggaaatttgaaacagatagaacttcagagatgatgtccttacaaagagaatagaatgattcttgctttgactccctttttagttgatgctctggcaacgtagatttctaggtaggtaactctggaactggatcatccgagaggtcacctaatctgaaatattccttcacaaagttagctagggcttgacctttgataaacaccctttggttgatattggatatcaaactacataagttccattgcccattttaacaacctaccagatgcctttgacttttgaagcactttgcagagaggatgagctttctggaggtgactagtaagcaaaaggtcaatttttcaattaagggatacctgaatttcgcacccagtaatcttttgctgatgtagtacatcagtagcaggacccttcctcattctcgcactaaggcgggacttatggcgtgattagacactgccaaataaaggtacaaattttcaccttccaccagcttcgataagaaaggggctttagtcaaatgctcctttaatttttggaaggcctcttcacattcctcagtccattcaaacttcttgtttccttgaaacacattaaagaacgggatgcatttgtctatggacatcaaaataaattgattgagggccacaattctttcggtaacactttgcacatccttgtgatttttgggaaaggcatgtcaacgaaggccttaatcttctttaagttttctacaattccccaagaggtgatgatgaaacctaggaacttcccagaggagacacgaaatgtacatttcataggattgatctgttggaaatattttacnnnnnnnnnnnnnnnntaccatgtatgtttcattaacatcct

SEQ ID NO: 28883 - DNA, 1785 bp, Cannabis sativa
agtgttttattagggccaaaatatatgttttaaatgctgacacaaaaaaattaaaattatatgaaattttattaaaaaaattatacttatttataaaaatataaaaataaaattaaaataattattgatattaagaaaaattaatctgaaaataaaagttaaaaaatacgaaagtaattttttaaacttaatttaagtttattgatttataaataaaaaaattgaatgaattataagattaattccaatagtattggtatttgttgatccctcgtccactcgccgtgttgaaaagtccgtactaacaagccagacgcggccacgaaggttagttcttgtgtcccaaaatattaattcacacactaatcgtgtgcgtcaaaataagctcacgcgcgcgtgtgattctttagccttgctttttctgtttcatgatttatattgtttggggggtatgcatgcaatttatctatagtttatgtacttttcgcaaagttgtcggcggtccaaatttactacctctgtattcggggtgataagctgagctaaactccagaccaaatttttgccaatattattattattattaatgctctaataatgtgttactatatataacataaatcaaccattattttatgttggtggaagttgaagtttgaagttgagtgaataacaaatatatatttgtgtatctcaatatatatttataaaacgattttcttttgtgtaatcatttatccaagtaagcatgtgtgattgatttttaatgctttgcatttaataaatgttgaggaaaattgcattgcgaaatttttagatgatgaatattatttgatagctagtatactaacttctttttttatataagtcatcagttagagtatattggttcaatcaaaacttacaacctatgcacaagtgatcatcaccctgctaacaaactaaagaatacattaacaaattgtaaaaccaacctactaattacattgatttaaataaaattcgtatttatcatgatacattggtgggtaacatcctaattttttttttttttgaaagcgggtaacatcctaattagaatgcacattgcttagtattaatacatgatcatgatgattcatttaagttagagaaatgctaaagcactttaacatgtattgtaagagatgacatatccttgaagcaatttaatattagtcccatccacacacatattttgatggaataaattttttttaaaaaaaacacaaaaatacaaaaaaataataataataataataaattatcgaaatacggtccataacgaatttttaatatttttatgagtttttaaattttatttaggataaatagacggcataagtattcaaagttttatgtttataagcggcataaatctaatgtttatttttagcgacataattaagtatccaatgtatgtaaaactgtaattttttttctagtttcgtcagtacagactctgttttgaatttattaaaagaatatttgaaaggaactgatattacatatttctatctagacccaatgatcaagaatatatttaggctttatatgtgccttgtttaagacaataatagagtctgtactaacaaaattagagaaaaattatagttttacaaacattgggtagttatgccgctaaaaataaatattgggttagtgcagcttacaaatataaaactttgggtatttgtaccgctatttacccttttatttatataaaatacagtatttttatgctgtactcttaatattttattgtta

SEQ ID NO: 28884 - DNA, 1746 bp, Cannabis sativa
  modified_base (444)..(449): a, c, t, g, unknown or other
tggtagtaaatctagatcctgataaaacatattccaacagccactcctcatgcatgtaagaatgtcagaggtgctgttggataaaaaggatgcatacttttggtggtgtgcgcactaccatgacctgacacaagggacactatctggttttttgtcaaaaagatagccatgtcattttttgtagaaatctgacattcgtcttgtgttttgaagctaatttaatgctctatcaagtcatgtctctaactctagacgttattctgaagctattcttgtcaaaatttaccaccatgagagttacgaaaataagttctgagttaccaacaacaggacctactaggcactaaaaaatggccatcaccactagaagctaatttttcactgttagatcatcatcaatggccaaaaacatcttatttttatttttctcctatttttgtgggnnnnnntcacctataaaaggagagctccattaactcatttttcacattcaaaaaactacccccaaggatagatcttctctctctagagtttggagtttttgatacttaagtctatttttaattatcatcttgtgagaaataaaaacttgaaatagacgtagtcccattactatcacaatataggggtgaactattataaattagatgtgtctcttttaattacttaactactttttttattctcgccaaactagcgagcgggtgtagcttggaagtctagtccaaatttttgagtcaacaacgtttagtgtgtgtgattttgattagggttacatatgtggatagacatgtagtaaaagtgttgtgtataatttgattttacatgactggactgatatgtaataacatctttcattaacgtgtcgtttaccatgaaagagttattcatattacaaagatgatcattagtagattattccattgcctcgaggaatgtttcaaaccatataaagatctattaagcttgcatactagttcaacgcctttcccttccacttgaaacccaggtggttgcttcatgtaaatctcttcatccaagaatctattcaaaaaagcagtcttaacatcaagttgttcaacttcaaactccatttgagcagctaaaggcatcatcagtcttattgtcttgtactttaccacaagtaaaaagatttcagtgtggtctataccttccacatgagtaaagcctttagccactaacctagctttgaacctcactggttcattctcattgattccctctttcaccttgagaatccatttgcactctacaatattcttgttcttacttctccggcttcggtacaactacctaagtcttgttcttctagagtgaatccatttccccagccatggcttgaagccatttagacttgtttgtacctaaaattgcctcttcatagcttccggcctcttcaatttcagtctgttgaactaccgccagtgcaaatgtaatcaagtctgctttcgtgaaccttgctggaggacgaatctctcttcgcgttctatcacgtgcctactgataacctttcagaactatctgtctgaacccttccaatacctttatttggtctttgttatcttgttcttttggctccgcaacagcttccgtctgcgcatagtcttctagttctacactaactgtggtaaataatccactcaaaactaaacctattcttatatccaaatcagttggaaaatcagttaatttcagttgtactcattcctatttggaaagttggtt

SEQ ID NO: 28885 - DNA, 3115 bp, Cannabis sativa
atgcctatttagtatatttatttttcgggatattacagcttccctctctccaggacttttatggagcagtcaaaagcatcgttgagaaaacctctggagcataatcctgtcaggaaaagctccaatagggcaatatccattctccactaaataaccccataaaaatacaagcctagatcaatccgaaaattttcacagtaaactttcatcaacataaccaccgtacgcgttttttggacaaattttctttcagtcattttttcatatagtactttcaaagtcctttttctaatcaagtcaaacaagatggtgtgataggtattagtggaaacagagtatttttctttattgaacaaattgaatgtgaaatatttgttacaactgattgaatattaggggaggtacacatatatatactggcacagtaaaaggtagctaatataaccgacttaaccaaaactaaactaatctaatagccctttcaagatggagtgtataaattttaaacactcatcttggatacaatgtaatgaaactgattgggaaacaaaggtttagtaaaaatatcagctaagttagacttggtaggaacatgatttgttttgatagtgtcgttgttgatcttctcccttatgagatgacagacgattttaacatgtttagttctttcgtggtaaacaggattttctgcaatgtgtatggcagcattggtgtcacagaagagaacagatggcagttgaatgttgatgttgaaatcggcaatgatggaatgaagccatgttagctcacaagatgtgtttgccattgcttggtactgcttctgcagaggagcgagagaccgtttgctatttctttgatttccaggagattagaaattttcctaggaagatgcagtaacctgagatagaccgtcgtgtgtccaagcatgatccccaatctgcatctgcaaatactcgaaattggagaggagtgggagcatctttgtagaagaataagccttgtccaggtgtgcctttgaggtactgaatgacgcgattagctgctgtgagatgtggtgcatgaggggcctgtaggtactgacttagtttggcaacagcaaatgatatatcagggcaatttattgtgaggtagacgagctttccaatgaggctccggtattgagttggattgtctataagaggtcctatttcattgtcaattttgatgtttggttccattggggttgaaaccggttttgtgccaagagttcttgtttcttgcagtaattgtatagtgaatggacgctgagttacagagatgccatgattatttcaagctatttcaaggcctaagaagaagtgaagtggtccaagatttttgagtttgaattggaaatcgagggtgttaatgaattgatttagagctgtagtattgttggttgcaatgattatgtcatcaacatatattaagattgctgagaaagaattgttggtgttccttatgaaaagtgaatgatcattcttggattgaataaaattttgttgtagcaatgtagtgctcagtttggcataccattgccttgatgattgttttaggccatataaactctttttcagtttgcatactgcattaggaggtatgttgccttttggtttgtatccttgaggaaatttcatgtagatgtcatcattaagatcgccatgtagaaagcattattgatgtccatgtggtaaagatgccattggtttattgcggctagagcaaacaaaagtttaagtgtgttaaatttagctacaggggcataagtttcgaagtaatcaattccttgttgatgagtgtagcctttttgctatgagtcgagctttgcatctttcaacagagtcatcaggattatactttatcctgtaaacccatttgttgctgattgtgtgttgtcctggaggtaatgggacaacaatccaagtattgtttgcttcgagagcatcaatttctgtatccatggcatggttccatattttttctttgcatgcctgagtgtaggatgtgggttcaagcaagtggtaagtagctagaactgctgccctgaatttaggggagagtttatgataagagagatagttcaagagaggatattgtgtgctgctgatagtatgacaactaaaatctttaaggtgggcaggggtattgatttttctgcctgatttagttgatttagtagctggtatggttgctttgtcaactgatttagttaagtcaagattagttgttggtgcaactatttttcctggtgcaactgatttattcgaatcagtagtgggtgctagtgttgcctcaggtgatgcattatcagttgcgtgatctgaagcagttagaaaaattggtggatgctgatatgtttcatgttgactgttaggaaaaaaaactgtcaatttctatatttggtgtattattttgcatagggtatattttttcatagaatatgacatctcttgattggaaaatgttatttgtttggatgtcaagaagggtgtaagctttcatatggtcagggtaacctatgaaaatacaagatttagcccgaggtgcaaatttatgatcaatgtgagtaggagaaacataagctaagcaaccaaaatttcttaaatgattatagttggggggtttgttatgcagcaactcatatggtgtgttgtctttaagaacaacagatggtgttctattaatgagataaacagcagttttgaccatatgattccaataggataaatggagattggattcaaaagtaagagctcttgcgacattaagtatgtgttgatgttttctttcaacaatagcattttgttgtggtctagccacacatgaattttgatgtatagagccttgagaggcataaaaacttgtgagttttaattcctttgcattgcctgttcttactgactttatattctttttgtaatgaacattgacaaaggtgaagaagttatgaatgattgtaggggcatctgatttggccctaaggaaatataaccatgtgtaccttgagtggtcatccacaatggttaggaaatacttatatctttcggttgaaggagtggggtaaggtccctaaatgtcaagatggattaagtcaaat

SEQ ID NO: 28886 - DNA, 3065 bp, Cannabis sativa
accatccaaaacacaaacaaatcattttaagtccaaattacttgcaagtaaatcaattaccatggggtgccagttgttggaagttctttcgtatttatcattaattattgtgcacatctggaacctagggttggctattttaaaattatgaattaggaattagattataaatttgcattatgatagtcctttggtgcttaaatttgtgtgttagtcagaatgacaacactttcactgttttttttttttttttatgaatcaattagttgtattgctcataaaaccgatttgtacaaacacatagcatcctcatgagatgacctataaaagactgtgtaatatgcatacaattatttacatctattcaatcctcctatatcttataacttggaaaaccaatcattgtccttcctattgatccctttcggccatagcaccattactcttgtcttgactatctctttagtgttctgcataatctcttgtgctctcaccatcttcatgttccacatatgatcatttcttgctttcctaatgttgtataacaagcatgttattgcagctgagattacttttttcctaaacttggacagtttggctcttcctatccaacgcaccagttgcttcactgatatggcctgagcaccccattgcagccatctttttatttccagcaggcattcagcagacacaaagcattcaaaaaacaaacgctcgacagtttcttgctgcatattacacaatatatatccatcttcctacactatgctataaacttttagtcttgcctttgttctcaatcggttctgaattgctaaccaaaaaatgtagcaatgtttaggtacattgagccttccccatacctccttatcccaattgactttctgttgtatagggcaaagaagcttgtacccttcttcaatggtatatcgggtcctaacaaagacctgaatatccattttgcttctgatttgatccttagcagctaccacctgtttccagtaccagctgccattttgtgggaatttaaattcccaccaatcactctgtttaaaatacacactatgtacccatcgaacccacagattatcttctttgtttgctattacccacacatacttgaagagggcagcttggttccattctagtatccttctaaagccaactcccccttccttttttgataaacacacttgatcccatgctataagtcatgccccttgcatcatactttgacccttccataggaaagcttgacagattgctttcaattatgcaattactttccttggtaacttcataatttgactccaataagtgtgtatagaaagcaataatgagttgattagaacaactctccctgcaaaagagatgtttctagaactctaggtcttaattctggctgccatcttcattgctagtaaaacacattctttcccagatatctttttagcacatattggtatgcccaagtatttaaaaggaaggtgttgtctgctgtacccagttgcatccattattctctgattttcagcctcttgcataccactgcaataaaatgcagattttgttgggtttggttgaagcctagaagtgttagaaaatagttttaagccttgcatcatgagatacacactcttgaaatcaccatgacagaagaggagtacatcatctgcaaagctcaagtgattgagttgtaagctttcacgtctgtcatggaattggaattcctgcttttgcccaatcttgttcatgatccttgagaggtactccattccaagcacaaaaaggagaggggatagtggatcccctgccttaaacctctcttagactcaaaaaacccgtgcattgttccattgaacatcagtgagaaccataataagttttatgaattgtgtgggaaacttaaaggccatcaacatctcttctaaaaactcccaatcaatggtatcatacgtcttttgtaaatccaatttgatcatgcaactaggctttgcatttttcctcccatagtgcctgattaaatcttggcaaatcataatattatgtgctataaatctcccttgtacaaatccaccttgattctgagccactaactcagggggcacatgttttaatcttgaattatatcaacttagttgcaatttggtaaatcacattgcaacaagcaataggtctgaaatcacttacagtgtttgggcatttaacttttggaatgagagtaagcatagtggagttaatctcctttagaatccgaatgcaaaaagttctgaacagcagcacacacatctccttgaatgagctcccaattatcttaaaaaaagtagcttgaatacccattaggtcctggtgccttgattccaggtattgcaaatacaacaacttttatttcctcacacgaataattctgacagagccaaatagcatgctgatctaaaatcacagcccctgattacacaaagtttgataatactgttcttcttccctgcattttggtgcccagcagacccttatagtatgttaaaaaagctttagaattttttgattcctcttctagcctctccccatcttggttctgaattgataacaccctgttttgtctccttctggctttaatactcgcatggaataaggccgtgttttcatctccatttttaattcgtgtaatcttagctttttgttgcagataagattggtaatttttcagcaagactgtatacttcttcctagattcaagttcatcattttgcagcaagtgatttaaaggatcctactgcaacttttcctgcatctctgatagtgcatccttagcctgctgtgtagacatctgaatgtctgaaaatgcctgcttgttcagctcctttagtaccccttttaatcttttaagtttggtcaccacttgaaacactttatgaccctgtgttttttgattccaggattctgtaacttgggctgcatattctgggtgtgtattccacattcaaaagtacctaaatggcttcttgccactaggaactgcagaatgtcaaaacagctatttgttggaagttattttaccaggaact

SEQ ID NO: 28887 - DNA, 2306 bp, Cannabis sativa
catgagatgtgtggaaagtgtatctttctcggtcctcatcaatggtgagaaacttgggaatttccaacctacccggggtcttcgccaaggtgactcggtatccccatatctttttctgctttgctcggaaggtctttcttgccttattcatgaagccgaaagggctggaagtattaatggggttcaattcgggagagagagaatcaaagtatcgcatttattctttgcagatgacagttttgttttccttgatgcgaaggagaatgaatgcgataccatgaagcttatcttgcagcaatattcaaggcttttgggtcaacaagtaaatctagagaaatcagaagtgagcatggggaagaggatctcatccacacaggggcaagctttggcaaatagattgggggttcgacttgtctcacaccatgctaagtacttgggacttccgagctttgtggggagaaggaaacaagaggtctttgaagtaattaaagagaaagtttggagcaagcttaaagggtggaagtcttcgatgttctctcaagtcgggaaagaaattttaatcaaagccgttgtgcaacctattccgagttataccatgagttgcttccgtcttccaaagaagctcataaagaatcttcactccttggctgctaatttctggtggggagatacaaaagaacataagaaactccattggagtacttgggacaagctatgtaaaccaaaggaggagggaggtcttggattctggagcctaactgagttcaaccaagctcttttggctaaacaagggtggaggcttctccataaccctcaatctcttcttagccgggtgttaaagaatagttactatcctactacttcttttatggaggcgggttgtcctaccggggcatcttgtgtttggaaggaatttgttggggtaggaaaattctgaaggaaggggctagatggagggtaggaaaaggtagagagattaaggtgtgggaagataaatggctccctcgaccacatggggctacactttctaaatatcccggacttcaaccccaaaccaagcttcataagtttatcacttgggatgggaattggaacatggcggagatcactaaacactttcataaagacgacatcccttcgatacaaggaatccccatagatttatacatggaagacacactaatttggcctttcaccccaaatggtcaatatattgttaaaagtggttatagggttggtagggagatgaaccttaatcctactagatgctcaaacatggcagacatttagaattggtggaaaatgatgtggagcttacaactacctcctcggatgaagctatttggatggagagtgtgccacaattggctgccaggaaagacgaatttgaagcatagaggtatggatgtcaatacccggtgtgatctgtgtggaaggtttgatgaaactcttacccatgcattatgaagctgtgataaagttaaaaacatttggaaactcctcccttggtacaaacaagtctcaagcctgggagaagggtctatgtttgatatcttgatggctattgagcagaaaattaacaggtatgagtttgaagatactattaaaattctgtgggcaatctgggaaaatcgaaacaggaagtggaatcaactcccaagtatgaacggacagcagctgctgaattggctcttttctgcttatccgaatgcgaccacaattgagcctactgatattcaacatgaagcaggccttctccccaaacagaaacaatggactcccccctgcaagtggctgcatctgtgtaaattgtgatgcagcagtcattgagaatgttgctggtgcggggattggtttcatctagcgaaaggcagatggccaaattctctctgctggtatgagatacatggatagctgttgttcagcaaagacggctgaggcttgggggctttgggaaactctaaaaaatccgccaactactgagacgaatcagattgaaatccaaacagactgtcgaatgctggtggaagacatcaaaaaccaggatcaaagcttcaatcctgaaagcaccatcattcacaagatcaaaaaagtgctcgaaacttttcatagtgtcaatattattcatgtaaaaagaaccaataatgaatgtgcaaatttgttagctaggaaatgtctagctgacaaaaacacctattttttttacaattcttttccgggttggttagccaatttctgtaaggctgatcatccttttgaggtgtagtctggtttttggttctaataaatttcctttcaaaaaaaaa

SEQ ID NO: 28888 - DNA, 1559 bp, Cannabis sativa
agttttaccactagacttaagtttgatggagtgagtgatttcctaggccacaaggatattatccgaaatgagacgcccttggaggaaggcactttgagtgggagaaatttatttattggggacagattttaacctattagctattgtttttgaaatgattttgtaggtgacattacaaaggctaatgggtctgaaatctttgacatggctggttgcttgatcttaggaatgagagtaatgagagtacggttaagcggggtatgtctccccctcattaagaacaaggagaaaagcatccaccacgtcatgcttgacaaatgaccaattcttacggtagaaattggtattaaaaccatctatactcagagctttatcaagtggaagttgaaagaaagccttttccacttcttctctcatgaatgtttcctggagcatctgaatgacttcaacagaaagagatgtagtaatgccttccagggtgtaacgtatgtcttcaaaagtgcggtttgaaaacatgaaaagattttcaaaatagtgctcaatctctttggtaatgtcatcgaaggaagttacaggagtaccttaagcattattaagtttatggatttgattagttttctttgaggaagaggcggtgcggtggaaaattttggtattgcgattcccttacgagagccattgggctctggctctttgcttccagtaagtctcttctttgagtaagagtctattatgatgggactgaagggttttaattttgtggacattgtcctcatcccactaccgtttactcttggcaaggtcgagatctttttccaagcggttgattcgtttttgaattggaatcccgatttgcgattccaatcattgagcctattgccacatgtgaattgggtggcaattagacgagtgatggcacaaggaaaattttgttgggcaaccctagaggattcaaaggtcttgtcccaactcggttcacttaacctaacattttcaaaaaggaaatgtttgttttattatgagagggcagtgagagtgtgttatcagagttaagcagtaaagctcgatgttctaagcaaaaaaatatctttgtgttgaaggctagcatgggggaaattactgaaccaaggtgcattagcaatgcaccaatctaagcgctcctagatgttattgttattcgcattgtgattattccaggtgaaaatggggttgagtggatccaaaggggacatgttaaagtgatctaaaaattcttttaaactgttagagggtcctttattgggattaccacctatcttatcatccatggtaaggatggaattaaaatcacctatgatgatccacgtgtcaataggattgttatcacctattctatgcaagattttctacgtgtggattcgttggttctgtgaagatgcagtcatgaaagagatgcaatcgagagaaagagaagaagagaagaggaattagaaaaatgcaatctgttattattgattgagaagaatagtacagtacatgacttttatataacgatcataaccaactatgacaacaacaag

SEQ ID NO: 28889 - DNA, 1362 bp, Cannabis sativa
cgagttccttaaacataggttcagatgttgaacctatgagtgttctggtgtgaagaaactcacacctgctggtgtgatcgaattggtacttgctcaacagatgttgaaaccattaaaaatgcgacatatcaattaataagtatgaattttgtaaaatggagaaacattatattattttatattttgcatttcaaaattttttgagattttctttcttcttttttaaattgttctacttttcatggtttaaaaaagacaattttatcttttaattttcattacaattcatcttcctcttcattagtattctatcttcttttttattttctctctttcgcttttcttcaaatttgacatgcgaaaatcgttttaagttaagtagcaattctctgtttctactgtaaaaaataattataaacccataaattattctcttgtttagaaatcatattcaacatacataatgaaatttaggaaaaaaaaaaattacatatcaaatcagtgttaacctaactcataatttacaactatttaatgtatgaataaactaattctattcaactttagatatagaaataaagaataattagaacaaaaataaaaaataaaaaattattatgtctcttaatttttttttgaatatttgaacccatttcacccagaataaattaaaaattattccaagtcatgagccatctctaaatctcaaactcaaactcaaattccatatatcaaatctcaaatcacaaaatcaatatataaattaattccttaatcacaaactttgttggtcaacttagaaatgtcccgtcgaagactcgttgtttcagacccaatccaagtggacgccattgagttcaacccaatattcaaatgaagcttggacaatggaatacaacttacataggctttctgtttgattgcgattatggcagacgagattacacccacaacggagaagcttgctttgaagaacaagttgaagtcgcacaagagaagaagaagaagtatggtagctttttttaaaagccaaagaagaagaggttgtatggagagatttaaaactgattagaatttggtcctagaagctctttaaaaattattatattaaattatgtgagattaataactaatagcaatattaatacataaatagagatggaaattaggcggttaatgtacgggaatgcaatccccgcccccatccccgctacctatttataccccatcctcgtcccatccccatttaataaccaacggattcgaagtaggggaatacccatcggttatggggaacccgtcgggtattcattaaggtaaaatgaaaaaaaaaattaaataattgaaaaaaataaattaaac

SEQ ID NO: 28890 - DNA, 1957 bp, Cannabis sativa
  modified_base (1910)..(1916): a, c, t, g, unknown or other
aaaattcattatgtggtgtaattatcccatttattattccaaaacacatgtttgatgtgtgagttagaagcagaaacaactacacatctgtttttatattacaattatagcagaaagaagtatggaagccatttcaaattggctttgatggaggaggaaagcaaataacttgctggaggttctacaagctgtaaaagaaatggaggaaaactaacctcaaacaataggttattgctatagtagtggcagccattaatgtttacaatgtgtggaaatgtcgaaatgagtgtttatggaattattgtataccaacattgaaaaatacattgatttatagagtaaacaagatgttaggtatagaattttaagggttttgccaaaaaaaaattgtctagaatagtggtttgatagtttgtaaagattacatgtttagtaaaatttctagcctttatttggagtgattgtaggatgtataggatggttagtgaagttgatttctcaaaaaaaaaaaaagtataatttgggatactgaaaatctagctataagtattttacatcataagatactaaaagtgtcgtctaacgatatttacaaaagtatgctagtggttgtcccgagaagagcatcctctaggtttagacaaccaaacatgttcaatcttcaccaagctcccaattcactacttactattgttcaactttaacttttccttagcgtatacttagcaatatatgtgagtcaacagactcagtaagaaaagaatacatataaatacaacatacatgacctgacatgtaactgagatttgaacgttcatacatatagtatgattataaccatcatacaaacctaatgccagtactctagctatactgatgttggtagcattaatccatattatctgataccctatcagtatctaagtacaactctatgtaaatccatactactatttctagtatactaggtaaacggtatcataaaacatgtatagttaaatatgtgcatacgtgcatcttaatcttaattctttcttacctcaattctaaattcaagtgtatcgttcaacttgaatagaaatatctgtcagtgagtaatggccctaagtcacattagcagtaaacttagtaagtgtctattctaaaacactctctaatacatgtatacaatctaaagttttttttttaatcaaactacatggtgaaaataccttaaaataaaatacatattttggctcttaagtatgtactatgttgtagagcttttcacaagctttctaatcatatatcgaacgtccaaaatagacatcgcaataaaaagttatatagctaaaatacaataattagcctttcccaaaactgtgcaaccccacttctaattgttatagccctataccgaccagactttcgattgtttgaacaaattttgctcaaaaatttatgaatttaaagctctcaaaacctactcaaaacttttattactaccaaactttccatagcagttttatatcatcaatacaacatattctataacttaaaacacattttaacacaaaggatcaaattctaccattgaaactctatgttctcaaacataaggctcaaaatctcattctaaaacttgatcacaacaactaattcaactaagttcaacttcttaacccaattctatgactcacataatcgattaaaacaaaattatttacattttttgtatctgtttgtagggatgcacatgggctaggttagctgagttagagatattttaataggccaacccaattattatggtttggataagctataaaccattaaaaaaaatttattgtacaactcaagcctacttaattagtacaataatatagggggtgggttgggttgggttcattggattgagatgaatattttannnnnnnatatttatgttacaaacaggataaaattatttaacctagtg

SEQ ID NO: 28891 - DNA, 1736 bp, Cannabis sativa
aaaaatgaaaaatgtgttatttgtttagaaaatttattcgaaatcgatgatgagtcggcgataaaccaagcggttgttgagttgaagaaatgcaaacacgtgtttcacttgtcttgtatcactgagtggactcgagtcaaaagaacatgtcctatgtgtcgtttttgtgtgcattatttgtacgttgttaactattctggtgtctctacaaacgatcgtgattctgtagaaaatatggtttaaattaaattaacatatttatatattatttgagtttgtccattgtatatatacaaattttattgcaactatatgtatttttaataattacatattacatattattatttgattatcttcatgttagaccaattgacaataaaagacgtaaaaattgtttaatatttaacaaaaaaaaataatttttatattatatcatactaacttcagattaatttttactatttacaaattatgcaataaattttgaataactaacaatttttttttttcaagataaattacattttaataataattcacaaatttacaagatacaattacaatgtgacaaaagggggaccaacacaagattagaaaagatcaggaccattgatttattataatcatcttgaaccaaaataattggtcaaactgcatttgttaatttatttttttgggtatgatgaatgacagtaaagaaatagcataaatttattattgtatttgggttttccaatgaaataaataaataaataaataaatagagattggagtgtttgtttttggacacatttaagtgaccataatcatcttatgttcccctaacggtttaaacccaagagggtgcaatcatcactctccacattattattattaacattatttatttatttattttcttcattcactacccacatttggaggtggggtcataaattatagtttgccaaaggcttgtttatttatttatgtctatagtacactctctaaaaaaaaaaaaattgttttagtaaattttttatctgattcgataaagtttttagtttttttttttaataataatctacgttataatcatttatgatcacttgtatatttttaaaaaattgtgagtagtttataatgttaaaaatatgtaattatttaaattttattttttgttattgtaaactacttaagatttttaggtaatcctgtataactacaatgtatgcgattatgaaaaaaaaatataataaaacttttttctagataccgaaacagacacgaggtctataagcagttggatggtgaagagtggtgaaagatgaaatatcggaggctattggtgtgaaggaggcgctcattcccaccccttcggtagcttagacaattcggggaccacgtgataactatagaggtcttatacctcattcttccttaattgggttatcgacatgcacctcgtgttagaatttttcatcactcataaaatatgcaataacaagattcaattccatagataaatatattacatataattataagtatataatcaaagatttaaagaatacctttgttgattcaaagagaaaaactcaaatagcgcggaaacgcgtataccccttttaatccttagatagtgatgattttaatctatcttgtagatatgatctttgtgttgattttaggtaatgatcttccaagaaaataaaatttaaagttttctaattttctctcttgatggggaagat

SEQ ID NO: 28892 - DNA, 1339 bp, Cannabis sativa
aaaagtgactttttgatcattcactctcatagtgagttccccatttttcacatcaatcaaggttcttccggtagcaaggaatagccactcaaaaataataggaacttctctatcaaccttatagtcagggataatgaaatcaatcagaaaaatgaacttatccactttcaccaccacatcttcaattttcccctccggatgagccatggaacgatcctctatttgcaaagtgacggtggttggccttgcttctctatttcccaacttcctaaaaatagacataggcatgagattaatactagctcccaaatcacaaagagctcttccaacatctcgacccccaatagaaattagaattgtaaagctgcccggatctttcaatttaggtggaattttacttttcaacgtggcactacaaacctctgtcaaagcaacagtttcaaactcgccaagcctccttttctttgtcaaaatgtctttcaaaaactttacataggttggcatttgctccaaagcttccactaatggtatattgatgtggagctgctttagaacatcaagaaatctctggaattgaccatcgtcttgttgcttcttgaatcgttaaggagaaggtggaggtggcttttgtaaatgcttttctgcagttgaatgctgatcatatgctgtaactactgggggaatttcagcagctgaaattgctagtttttttttgtttccccctctttttggattgaagagggctccaactgccttttgttacagccatatttgacaccagaattttcccacttctcaaggttaccactttgcaatgctattttccatctcttctaggattttcggtgccactaagcaaagttccttgtggtttattcttcaaattattagccaattgccccaaatgaatttgaagattctgaagagagactgtctggttttgaattacagtgtcattcttggccatatagtccctcaataaactctccaagaaacttgtttgagagatttgagattggtgtggctgttgaggtcctcgttgttgagaaaatcctagtggaaatgtttgttttccttgtgcttgtgctccacttgaactttccccttgacctccccatgaaaaatttggatgatgcttccatgctggattgtaggagtttgagtatggattgttgttgcggttgaaattttgattacccatatagcaaaccaaagctggatttgaagggaaattctcaaaggtatgcccatcaccacaatacacacaagaaatttctgccctttgaatggcagcagctggttgtacacctcctcccatattcatgctcttcaaaatgtt

SEQ ID NO: 28893 - DNA, 3618 bp, Cannabis sativa
taatactttttagtgactcttcatgtttttagtgacatgcaatatgagagactaacaccgaaagtttaaagtctatttatgcatgtcactaaaaatcattcttaactatttagtgacccgcacaaaagtgagtgtcactatatagtgtcactaaaaggctaaattatagtagtaccatcagggatatttctccacttgggttggccgacatgcatgaatttggatcaaaggtaagaaaagtataatgtatcacatgacatgacatgtttcgtaattattgatcgtctgattaggcaatgagaatttgaatgcgacaagctcacctgattaggtgatgggatatatgaatgtcagactatggcatgagtttgcctaattgtgcaatgtggcataagaatgccaaattttggtatgcatttgcctgattgtgtaatgcgacataagaatgatagactaagacatgggcttgcctaattaggaaatgtgatatacaagtggacttgattaggtgatgtgatatgtggatgccaagttatggcatagactgaaaccattgttaggtttcttcctggcagcgtaccttattaggtacgggtggcagtgacatatgagtgacagtctatgggatagaccaaagccattcttaggtttcttcttgacggcgtaccttattaggtacaggtggcagtgacatgttgatgtcaggttatggcatagactaaaaccgttgttaggtgtcttcctggcggtgtaccttattaggtacaaatggtagtgacatgtgagtactaggctatggtacgggctcgcctggttacgcgatatgatatattagtaccatgttgaggcccagactcgtctggttagacgaagtgatacattgatgctagattatggcacgggctcatctgattagttgatgcagcgacattatatataatgccaaattatgatatggaattgcttgattaggcaatgcaatatatgattacttttatttccatgcatatgattgattatgttatccacttttgaatgttattactaaatccttccatattagtgagataaataattggttattccatgtgtttactaagtttttcagaaactaaatatttataacttaagagcgctaaagatattaaataatagataagaagatttttacgtggtttagacgttaatgatccttagtccacgagtcaacagtattagcctctttgggcgtgtgttttgacattacaagtgtttacaaatatgctctatgtattcctcttatttctctcttaggaggaagctctctaggaattttagtagagtaactgtaaatgagaaattgttctccccttgctcaaagataatatgagtatttatagacacatatggggtaaagggcattccctttacctacccagggtttccttacctacacgctaccaaggctgataatactagaagacaatctgaccatcagttgaggagaaccttctatatcgtgtggcgtataactgtagtaagggattttgtacaacccaagacatgtgtcacgcaaaggtccctcctttgcaatacactctctattcagactattgggcaaaaggtatgtcttgcggtgcgtatgcacactaccatgccctggcatgaggggacaatatctgatttgatgtcaggacatagtgtaaccatctatagcgcaatttttttgtgatattgacgtggttagtacccttgaaactgctattccactctaggttcattacttaaggaagtttcatccaggagtcttctgttttaaccatcttttgaattggaaagggttttttttcttgcaaatgacttgccttatcaggcgtttaacgaacacttccaggattgccgagatgttctctctgggataccgtatgggctaatttgattaatcctttccgctaatacactttgtcctttaatcataacacgtgtctcatgcacgaaaacttggataacatttactccccaagcttttgaaactcctcgagttctcggagcttgccatcttttctcggtactagctaatgacacgtgctgatgttttaggtcaaggatacatcttcctcaagggcggtatcctattaagggtgaatgagacatctttcttttgtgctgcccaagtaaccctttgaaggtctcacgtggcccttgtggcacgtggcgaggcgcatatggaaaaagaggtggtggcaactaacgactgaatgaaggggcccatcgtcatgtcttagtgggcccgagactaattatatcatacctcttatctccctaactgttggatccactacagagtctgaatcattgatcttgtaggggccagatttctttttgaaatataaactgccctcaatagcattctttttacttctttcacatgaaggttcatatttctctctgtaatttctctcttcaccagccaacttcttgcatgcaagaggagttagaaatttcaatccaaaaactactatgcatccatgcaaggctttttcctatcatcaaacctctccgactcgatcaaccaaaatcctcgttaggtgaagcgtttgatttttaggctagctgtgaccaatgcatcgactagctatggagcttttaggccaactactttaatgtgtaactcttccctccctattagacaagtaagtacgctaacccgctatccgaacctcttacatctcacgtctagggtagaaatttttgttcaagttagggctaggactgcctttgtgccgaccattgggatagagtgtgggagagaacctttgccctgataatcattttttgtgagattaaatcgactaggatgttaatctggtgactattttccctccatctatcagccatttaaagaaatttactttttctttccttttttgtggtagtaactatggacttgaaccaggaccttcccgcaagcatgattgctcctactgagggtgtacttatctctcctactgaaagagtttttgcgtgacaagatcaaattgtagtccctgcagtggcacctcatcctaaggaggccttggataccactcccaaaaatgaaaccactgctgagaaggaccttcctgtgaaaactagaaaagggaaggggttcaagactcctccacctgctcaggctcataatgactccatttgagaaatggatcaaaaagacaattgcttccaatcttatgggatgttgcaagcttatacgacgttgccggccttcacaatgttcctggattaatgtggcacagactttctattataggagaatttgcttccatcagtacaaagagatttagtgcatggagctggtctcacatttttagtggccctcacctccctctgaggactttttttgcgaacctagttgaaaaaattgggattactccttttcagctgatcccctcgtcatacaggctcttaacagggtggtatgtattttgtaagatgaacaacctagcagccccttctttggaggaaattccttacttttacagtgcaaaagctaatccaatgaggatggacatgaaaaagctggggttttacaagttagataagcgtccaaattcttattgtcccatttgccacacgaaccgt

SEQ ID NO: 28894 - DNA, 1832 bp, Cannabis sativa
agaaacggtttagtgtctaataaacagttacttattatacgtataagaaaaaatagttgcacatataacaaaatacataaatattatttttgacattataaattaattcaattttttaaaaatttataaattatcctaaataattataacataaatgatcataaaataaaaacaaaaaaaataaaaattctcttggatcgatgccgaaaaagtctactaaaatattctttcaaaatgtgtattgtaaacttacccaaaaatatatataaactttatgccacacattgtaaaagagtgaataattaatatgtagtactataaataataacctggtggctctaattacgtaacaataatttgatatatcactctactttctgaccaaaaaaattaagcgtacacctgaaaatttaaaacaaaatttacattcattgtgacatatatcattttcaactaactatatatgtattatatatagtacttaaaaaaaaaaattagtgtaatattaatgtattacacgtacgataattaatgtgagctacacaacattatatttgcgagtgtccaaagcattattgttatttcacctataatatatgaaattctcatgtaaactttaatatatttatattagtttatagtgtctaacacgtacatatatatataatgctcttgagaactttccgaaatttattgataaaataaatgatgtcacatatcatttgtatgcaaaatttatgtcgtgaaaacaaaaatagtcacaataatttgcaattaaaacaatgaaaaactaatggtctaatggtaatttggagagaggccattgatggtacctttggtgcttgacaaacagctttgtaggggtgacaattaaatttgcgggttcagatatcggtggacgatgggtatttgcccctcaggcggaagtcgaatttcaaaggtggggccggatatagatttaaaaatttatactcgagtcaagttcggggtggggacgggaaatagatacccgttcgaaactcatctcaatataatatatgtatatatttaaattttaaaatcttaactattataattaaaataattttatagtttaggttttttattaattgtattaataagatattttaatttttatgaaaatacttacggtgatgcttattaataatcgtacttaactgcttttaaaaaaaaaacaattaactacttattttcaattgccaattttgtatttattaactccatttattatacactatttaacttatgtttgtatttataatgagtttttataaattttttaattctatttgagacattattttcttttttcaaaaatgtatatgcaatgagtaccgataggaatcttactgtaggataatcctcatcccatctccgctttaatttaaatgggtattggagtgggtatggggttgggggaacaattcttgcccctgccccatcccatcctgttaacgttcctacatctttgactatttaatggataactgttaattttaaagaattccacgggtaataggaaggccgatgcaaaagaattttcatgatgactaaataagagagacactaaaagtaatttgcgtctaaatatgatcacaaaattaagtgtcaaatgcatattatattgtccattagacccctacctcttattacaaatcataaaaaacgatttcctaaaccaggtaatcacgaactaccaaaatattcgaccattttatctttgatttttgaaaaaaccaaagttacatccaaatttcaattaggagtgtaaatgagtcgggtcagagctgatccggctatgatccgacctg

SEQ ID NO: 28895 - DNA, 2183 bp, Cannabis sativa
aaaaatggaattaacaagttttatcatgaggttgatattcaaagggttcttgaagggagtccataggtatctgatcgtaaaactttgattactactcgattgaaggaaggggacaatccgcatactgtgactttaaacagattagttagatttgtaggttcaaattcatgatcttcaaccatgacttagtcttcttaagtgttcaaatgataagaagaacgttgtattcttgcagatgactattgcaggaggtggtcttgcgccatgtattgttgtcgtcaattggtcccaagatgcacttgtgatgcatgcaatgtaccctttgtcagagtgtcatggcatgcatgcgaagcacttctattgctcatcctcccccttatgtctagaccttccagatggcatgaccatactcttacataacccaaccacgagcgtgcttcgtctcgttgattccttgtcaaatagctcccattttaacacttgggaaaattcttgtagcttcgggtacatgccaagtgtcatgagcatgttgagtgacatgaagacgttgagtacttttgtgcatgttgagtggcataagcatgttagtactcttgtgcatgttgagtggcttaagcatgttgagtactcttgtgcatgtcgagtggcatgaggatacctagtactcttatgcataacgagtggcatgagcatgtcgagtactcttgtgcatgccatgtggcatgagcatgctgagtactcttgtgcatgacgagtggcatgagcatgctgagtactcttgtgcatgtctagtggcatgagcatgatgagtactcctatgcatgccaagtgggaaaagcatgttgagctgagtggcatgagcatgctcagtactcttgtgcatgttgattggcttctcaatgtggcatgccaagtgatccactcgtgaggtgcatgacgagtggtccactcgtgaggtgcatgctgagtggcccactcgactttggaagctaactttgctagtctctcgagttaacactcgcccccatgttgagttttattccctaaataaaattatatttcaatgtaatcttatttattatcaataaagttcagaaatcatattttgacattgtcattatgttttgttcacatgtttgcttacatgattataagtttaatatataagttctatttaatcttaatcatatatttattcacaattatagtaatgtcatcacagtggaaaataattgtgatcatatgcttcaaacttatttagtcccgagatatatcagtgttgaatttacattgatgtgataattgccaatgtgatttacttacactaaggcaagtgaaatatcttttccatgacattagtaaagtaaatgtgtatcggatgtatagggtacatcgaactggaccgatattaacaataaaatgttataaacctattgttgtacctattctaagtcgatatcacttagttgatcatagatcaaatgatctcaatcttgagatggttaagctttaagctaattgtattactttagttatttgacttgtttgttaccagtttacccatcggtctagctcatacttacatcacgagaactcggtagttcaattaaatgggagtgttaatcatagatatggacatctatagcttctatattttatctaaaagtgaaataataatttccttttagctttgctaaatacgataaatgatagagcgtttattttggtaattatattaattttctaaaatattatttacaataagctaagtatttaaaggataaaatatattgagagataaaatagtaattttagtttttgttcaatgtagacatctatataggaacatggattattgtgattgaaacaatgaataatttatcatgtatatatattagagatatagagcattttatataaccaagagtggagtcacaagaaattaataagttgagaaatttacgtggtaaatttcaaatcaacttattaggagcttgattttatatgcccatagttccctcaatacttgggatactatcaccttaatgtctcttaattaattaatttttttaatcaattaaaattcaaaaattatttgtgtcatatttgagaacttttcgataagtttggctaaattgagaaaacaagagagatatagggttatgtgttaattatgataaatt

SEQ ID NO: 28896 - DNA, 1739 bp, Cannabis sativa
atcacatgtatagagacatactaccataacagtaccattcacacatttgatttttattggcccaaaaaaattccccatgtgatgaggtaaaaacaaatgggcttactatagataaacccttatatatattatattaattttataatattgtatttcttatattttagtttaagatattataagaaaattattaaatttaatcacttaattaaatatcaaatactagtttagtattcttgtgtccccataacataacataaggcctttagcaatacactacacgtactttagtttttttgtttatatattttcaataataagattatatttaatattaaatattttaatttttttttcttcacatgtagtacatgtagaatatgtttgtgtcgagtttgccaactcatatttttttttgtgctttttaaatatgagtcgtgttatactgtactcaaattcttatcataatttactcgagccaatctgttttttttatagaactcaaatttgtattttactttttgcacattttatttttataattaatgagatatttactaaactatatgtattttctataactttaattatttttatataatactttaataatattttcaaaaaatcattagaattaccaaatttaaatatttattataataaataatcaatttattattattttattattattactattataattataaaaatataagattttaatgtgttgtgcttttgagttggactaatttgtgcttacgtgtacgttgtgtttttttgggctttttgtgatgtgtcatgtttaaatttatatttatttttttatcgtatcgtgttaatttataatattatgtacaaactcatagtttttcgtgtctaatcgtatttttatactaatttcgtctcatatcaagaagtctaatccacatttattagacttctctattaatcacttgaaatagtttgattgtaacttaataacttaattgggaaaataacatgtacacataaatcaatagtcattttgatagatcatcatgactatcaaatcttaatttgtttcccaagaaaatcaaccattagaataataataaacacctcataaaaaaatgaaagaaatactaataaacacaaaccacttttcatttaggtcattctatcattattgtaataggcacatgcaaaaatttgaagaattattataatcaaagtgagttatgagtttgtttgtttgttgtttttttttttttttttaattatgaaaaaaggtcagttttatgagttaggttttagttaagttaacaaggatgatatataggttgttatttatatataccattgtttaatagggtaaggcagtgtttgatagggtaatataccattgtttaaaataatttaccattgtttgtcaatggaactatatataccattgtttgtcacttaccagtctctttatatatacgagttgtttaaaataatttaattataaagactattatgaaagagaatatagttccattcaaaaaaaataaaataaaagagtatatgattgtaagaaaatgcataaattatatttagttgtgtagggtaatatgtaaatatatttctattaattaaattatactatttagttgagtgcataaatcttatatattattttaaaaaattaaaataaaataattatttaattaaagaaatatatttattaattagtaaatattaaatttcattgtatt

SEQ ID NO: 28897 - DNA, 3203 bp, Cannabis sativa
aatatagaccaacatctattgcaaattagtgtgccttggttaggttgatgcattcttatctgattataccatgaataggcattcataaagcttaggatttaatggtcagtgttgtatttaaaagccgatcgattcttagaagtggaaaacagtctttagggcatgccttgttgaggtcaataaaatttatacacactcaccattttttggcttgggtactagtacaagattagctacctaggctgggtaaaaggctacaattatgagtctatttagttggagcctttctacctcctctctcactgcttgtgcacgttcattgtccaacaatctccttttctgcttgacgggatgatagcttggataaatgttaagggcatgagacatggcagttggatcgatcccagccatgtcttcatgtcaccaggcaaaaatattgaggttttctcttagaaattttattaaacctaattttatttcaagcaacaaacctttatcaattttgagcttcctagtcaccatggtgggatcaacttcaactttttctagttcttctatcagcccaatatttgtgtttggttccccaaggagagggtccatatcttcatccccgccttgagtatattcctattaggcaatgcttttatccttctctaaactcttgtcgaaattatcttcctttttggccttagataaaggaaggctatagcactcccacacagttctttagttttctttcagacatatatgtgaaatactgaggtgatggcctttaagtcatttaaggatggtcggcctaacattacattgaaaggagaagaaacgtcgatcactaagaattgagccataactgttgtgcttgttggaacttgtcctgctgtaaatggtaagcagatctgtctgagtggagcaatactttggccgaagaattcatatactagctaagtgcaaggaaccagatctttaagttgaagcctcatattttcatatgttgttttaaatgaaatacttgagggagctccattatcaaccattgtctgagctgccattttatttataatttaaacatcaatgacgagagggtcgttgtgtggataaataacgtggttagaatctgcttcgttgaaatatatgattggttctccagcacatgactacttagactttctttcctttacgggtagaactgcttgtcttttcatactgtaagccccaagcatacttctctctagctttgcccaagtctccaacaaggcgggggcttccaatgataacctgaagatgtccgtccactggtggaagcatcaattggttttgagtgttatctagttgggtgaccctttgctcctaatcggtcttgatatacttttaaaaatgaggattgtttttcctaatgaggaattctatttctcgcttcaagttattgtatttattagtgccgtgaccgtagtccgcatgaatacgacagaacttggtggtatctcatgccttttttcgtgggaggaggtttttcacatggcaccacaaactgagtagttacgaagattgtctctttatcttttgttaggatagtccatgtagtgaactttaaggcattcttctaaggttgctgtttggagtttctattgaacctgctaagtggcctgggataggagtgtttgctaactcgagtctactgagtgtgtttagctagtcgttcttctagcccgtggtgtggcccaagaggaatgtaagcatttggcactggctcttggccagtgacctggtaggctctcctgatcagcacgacatcttgctcgaattaatttcaatcgttgctttttgaggtctcatgatctccatctcttgatctcgccattcttcaaactggagtctttgtttggcaaaggcaaaatttatggctgctctagtatcttgttgatcatgatgaagagtgctattgtggccttgaatttaccccaatgcagctcataagttctatagctcggtatcatcactggttggcctttgagaattggtagtagatgagatctcagtacaagggtggtttgttcgatcacaatactagtagttccagtttcttgcacaccaggagtgaacccagccagagaggttttcactccttcgcctacagtttgtgggcctattgatggctgaggattgatcaaggcaggttttgtcctgactgaatctcttaggtttgcaggcgtctgcacatttggattcgcagccattggattagttgtatcagtctgatttcccctccatgtttgcagaaccgtcacgtgtcctaaaaaaaacttaagataaagacttgtgtttctttgctctgaatgaaagtactaaaatattaacctcgcttctaatcgataaaagtgagttaaattaaagcgattgagaataaattaaataacaaaatataaataacataaagcaaggaaaacacaagatgtatagaggttcgatcccttatagttggtaatagcctactcccatttgattgtattaacttgtggaaaagagtgaacaagaatgatatgatctctctcaaaatctcttacaatgaactctaagtaatttactcttaaattgagtattctctcttgaatgttctctctctgaataaacttcgtatccctgaatagtgagatgagtccactatttatagggattaattacatgaaattagtttccctaaatcaataacaaataaaatagaaaagtagtttaatttctataattacaataagaaaagtaggaaacttaggctgattgccttccttctctaaagatttgaatttattgcatgaatgtagggtttatgttgtgacgtgcaattgcaagctcggaaatatacaagatatatccgtgaaatgcccactcgcattgtctggtcggtgcatgcgaacaacctgtgtgatggaagctgttcagatgtagattcttacactgcttaaatatcacaacttttgtctatgagcttaaaaatcaattcttcctttgcagttcactaagagtagatcatccgttcacgttatgaaatgtactccacgtgttgcctaaatggatgccacatcattgtgcaaaaatttggataataattattcttgtgcccatttgatgaataaactggtgatgttggtggggtgtgaaaattggtctaatgttatctacttgcaggaaaaaaattgaaaaattttact

SEQ ID NO: 28898 - DNA, 1179 bp, Cannabis sativa
gtacccgtagcctttctcagatgccactagtagaccaaggggcttttcaccactctttcttaaatttgaaccctcatagatatctaatgatggattacatcgattgggtagaccatctagttaagcactacaacaatcaagaactccctccaaacactgttaaagtgggccctttcctcactatgttcttctcgggcttagggaacatgacagcttcatcaacgggaagaagtaaacttgtttgcgagaggggaaccatatagttacacattttatggttacacatcatgatgtctttctgcttttgaaactgtgtgatttaggctaaaattagtttcaacaaaaataaaataaagtaatgagtatatataaaaattaacaaatacgaacatagaataaaacaaattagaattattaaattggcccaaaatgtaaagttgatataatagtgcaaatgagtattattgtaaattgataatgtcaaataaggatttaacgtgtcataatcattttttcaaagtgtttattgtttgattctctaaataattaacatcttcctatgtccaattaattttaagaataccaatttaagcacaattccttcaagtcatacaaggtaaataacatattcctatgctatttacaaaccaaatttttctaaagtgatattcatgcatcattcaagtaattccaataaccttattttttctaaaatttaagttatcttgtaacttactaatggtaatcaaacaaaagtaagtaattactcaagtactcctgaatgaacaaaagcaatttactaaaatataactataaataccaaattacaatttctaccaaattacaatttctagtcaatatataattctagcaaaagagaaatttactcataattgattgtgcacaaattatattgtttaaaagagaaaagagataaaaataaaaaattcatttggaatttgtcacagtacttcaagtttgtcactcttaatctttgtcaatctaaaaattaaaatgcaaaattaaaaatctaaataatactcaaataaaactcttctgcctgctttgtgttggcgtcccctggagcaccaaaaacccaccacctgttgttcaaggaaaatgaagttgatatctattttatataaagtgtgcctatataactgaaattcttggtttatg

SEQ ID NO: 28899 - DNA, 2004 bp, Cannabis sativa
aaggatccatgtcctatttctagccatagccaatatttcatcactcatagcattgttccaatgctcctgagagagagatcttcctttatatttgctggttctctagtgactaaaaacgacttaggcttataaacacctgatctggatcttgtatgcattctatgcatgctgttctttccaggggcattgagacaaccaacaactaaaggaagagcagttggtgaagagaagacagcagcagaacccttgcctggttcttaagtaccactagtagatgcagcatcaggatcagtgttcacatttagttcagtggatgcaacaacagtaggagaattttctgtcatttgagacacctgagcagcttgtgtatctgtaattgtggttgctgcaacatgtgatgattcacctgcatcataaacagaaggctggctgggaaaccagtcattagtagcaacagtaggaggatcatggtttggattagagttgtctaggaaaacatgttggtcaacctgaaaatctggtgtatgtgtagtggcatcagatgtaataggagggataagatcaaccattgtgtaaggttgtttaaaatgagaacaggttggtatgataacagagacaggtgagataaaaggcaggttagaggagggttgagagtggcttgtttggtgttcatagggaaaagagaattcatcaaatattacatcccttgaaatatagagtctcccattgctgtctagacaattataccctttgtggtttagactataacctaaaaaagtgcaaggggcagacctaaattcaagcttatgctcgttatagggtctgatattggggaagcacttacaaccaaaggtttaaaaggttgaatagtcgggttttgtgttaaacaacacttctaggggtgacttgtcctcaagtaatggtgttggcaacctattatgaatatacactgcagttctaaaagctgcatcccgaaattttagtgggagagaagcttgagcaaggagggttagaccattttcaataataatatgcctatgcttcctctcagctaggccattttgttgatgagttgttggacaagggtgtttgtggtgtacgccattttcagttaggtatttggtaaaagatctgaattccccaccccaatttgtttgtaaggttttaagagactttccaagttgaagttcagcttcaaatttaaagtgcaaaaaagttctaaagacatctgatttttgttttaaatgatagatctatgtaaacttagagtagacatcaacaaagtgaatgtagtatttatagccattgaatgaattcacatgagatggaccccaaagatcagacacaactaactgtaagggttctgaaatgacagtagctgaagctctaagaaaagaaaatttatgaatcttgccaagacaacaagctgaacatacagaaaaatgagagattttattgcttacaggcatgttacaagattgtaggacaatttgtacaattttctcataaggatgccctaatctattatgccacaaagtaaaatcattttgaacactagaattgcacttattacaactcgaaacactgactgtatagttgctcaaagtaacagtgtatgtgctctttatttcaggatgacaacttgtgttgctggtttttggggagaggtttttttgatctttgatactttggccaggttcaagacttgttgagacaggtcctacatgtgaaacatcaaaagtatataggccattcttttgcatccccatcaacaaagtagtatgagtcatctcctccttgacaaaacacatatcaacatgaaattcaaaatacacattgttatcttttgcaaattttgacacactaataaggttctttgtgatttcaggtacatgaaggagattatttagcacaaattggtgagatgagtgctttggaaaaataaaagattgaccaatatgtttcatagacaaacctgaaccattgccaacatgcatttgatct

SEQ ID NO: 28900 - DNA, 1715 bp, Cannabis sativa
ttctgcagagcttcatgagtattttctattagcaactaaatagaagttttaagctcaggatgaacatttttgagaaagagggatattgatttggatctcaaaactcaggagttaaagcactatctttttcagtatttagtactgaaaaataatatactcttcttttctgcagagcttcatgagtatttcctatggctagcaactaaatagaagtttaagctcaggatgaacatttttgagaaagaggaatattgatttggatctcaaatctaaggagtttaagcactatctttttcagtactaaatactgttttccacttgtaaattatgataacatcttattatattaataaaaaacaattttttgtttcttgcttcacgtataaaagcacatacacacagcagacaattatagaaacaagtagattgcaaaatttagataatcccactaatttctcacaattttgtttggcatcatgatgcctgtaacatttttttccctttcagtcaaaaatagcatattgaagggaagtattttaaactaaaacaatcctcatctacaccaacagctgtacactaaggatttaaaattgttttactgaaggaagcatatgctggaaataagataaaaaaaaagccagacttactcttctgttctctgatgcatgaagacaaccaacggatcttggccagtttctttcattaaccggtaggcaactagccggtcatcatctctaattaaagataatgaatcagttggctcctcaagataacgtataatgtgattgttgtatatctgtggagtactttaaagcttcagaaatcaaaattacaaacacatgatcctagaaattatagacacagattgatcaaatacacacagatgtgttatccacaagtcatataaaacaaatatatttagaataattgtgtcatgtggatacctcagctactagtaagatctcaccatcctccaatgagcaagcagtgcttagagcgtcaataagatcttgaaattttccatgtttgggtacagtaatggtatatggtgatggctgacaacttcctttggtatttacaactgttaaagtcattgtccgcattgttgttgaaggtaatggaagtgataagtacatgaatggatcaaaagtaacagagacttttcggcatataggacaaactaatgttgatttatattgaccctgcaaaaacaattaagttaaaaaaaaaaaggctatggatataaattggggtcaattaaaaagagcaggctgtcaaaaatttaactaatgcaaaatcaaatctcgagtcactgggtttgtgttgtgcttacgaagtgaagtgaacaagccccagctggccaattcaacaatgagtaactactatctgtttcttataataataaaaataaacaaataaatgaataaaattaagcaaaacctatcacatcaacgttaaaattttcattttgaactgccaaaatatcacaaaaagtttgtatgctcagttagtgtctgtataaaataactgacatgagacatttgaccaaattgtgttccaacattcttaacgctaaataaagatcaaatcaagttcacaaaaacttacaatatggcgattgatgtcaaacattaacaaaatacaataatgaacacatgtgacgcatattctgacaaaaaaggaaatataatttgattggaagaattgacatttta

SEQ ID NO: 28901 - DNA, 2235 bp, Cannabis sativa
  modified_base (29)..(46): a, c, t, g, unknown or other
  modified_base (796)..(818): a, c, t, g, unknown or other
  modified_base (2128)..(2130): a, c, t, g, unknown or other
atatgagtttctatgtagaatttcgtaannnnnnnnnnnnnnnnnnaaaattattttaaaatgtaaaaatgaaaaaaacccctaaattaaatgcaaaattctagaatttataattaatggcagatatttttcaaaaataaataatttagacaataaatacttgatttagtaaataaatataatagttgtataactttaaatgttaaagtcaacacaattattaaaattacactcctaaataaaattaagtaattaattactaaatcatattttttcaatttcaatttaaactaaataacatataaatttcaaatattatttttaaataaaaataaaaaaattaattaaatacaatttaatgaccaaagtaacaagaataagaaaattaattaatattctaaataaataaaaatttatttaaaaaatttgaaattttcttttctttttttttttcttttttctttttgaaaaaattgcttaggaaaatgatgttttgttttgttccgtctccaaccttcaaattgggtcaatttgacctattattctgtaactcgagtctgattaacccaacccaaaactagattgaaatttacaattttgacgattaaaatacacaaaattaacttcaaatgaatttaaatgaaaaaaaaaataatagatccatataagttttaggccataaaaataggctatttagtaattttttcccccgaattttcacatgtattaaatcatatcccctgaatttttttggccattaaaaattctccctaaactattgagattgttaaatttnnnnnnnnnnnnnnnnnnnnnnnaaaaaaattctaacatggatgaatattcaggggatatgatttattacatatcaaagtttgagggacatgatttggtagatatcaaagtctagggagcagagtttagtacataaacataaatctacaaattaataattttatattatttaaaaaaaataataaaaaaaacacactatatatatactatcacacattatgattattattattggttttgaattatatattttctagatttatcaattacttttttttttatatagatttttattttgtgagagaattagatacaattctattttctcattattaattgatagattttatttgatatatttcttttataaaaaaaaatgtgcaaattcacttattaataaaagtgagtagttaacttattatttgattatatatatataacaaacatattggggtcaaacctagcatcatgttatacaggtgagatataacaataacaatatccttgaatgtaatattgactacactacaagtgagatacagtgataagaacagttttgaaatcatatagtagttttcaataaatttattaatttttataacaattcgaggggtcaagcctaaaatcatgttatacaagtcgtgtctggcttccattataataacgtaatttggtaaatacaagctagatcggtccgtctgtacacatttaatttttcacacaaaattatatgaaaaattagattaaaatttaatacaatttattacttagttgtcattacatacaatttatgatttattatatatatataatttaaatttatttaaacatccgccgcaaagtgcgaattgtttactaatttaaataataaatagagtaaaaagatgatttctctaccaacttttaaatgaaaagtagttgtatgttttcgagttaatttctttaatgtcaattggaaatttgattttttatgcttacatgcacttaaatttttcccttaaactcataataattaatatttgtaggatatgacaacttttatgatatccctaaaatacttcccatttgcatcacccccatttacacaattggaccccctcatcgaacccacatcagacacaatcggacccatcagatcccatatcggactcaatggaccctctattggaccctatattggacccatcagaccccccatcgaacctacgtctcctacctcgcaaactcactgtttcactcgacctatcggaccccattggacctatatcgggacccatcggaccttgctcaaaattatagatatgatattctaagggaaatttacaaaaatacnnnaatttgggttaattttacaaaaatactgtcacacggaatttttttaaaaaatactgtgttttaataaaacaccagtaaaacacaaatcagaacaactcaaaacaa

SEQ ID NO: 28902 - DNA, 2745 bp, Cannabis sativa
  modified_base (1759)..(1763): a, c, t, g, unknown or other
tttttttcacagcacagctacaactgttttttctcacagcacagctacaactatttttttccacagcacagttgtgccaaactggcccttaatttcctatttctttactagtttctttttttttaagtctctaaattcgtatgtaaatactagctattctattgaataatactcaatttaattctaaagctatcgttccattgaataatagctagtatttacatacacaatttgtatgtaaatactagctattctaaagctatcatgtggttttaggacattctcttagctgtgtgtttttcatcgagataatcttaggtgatgtttggtttgatggaatgtaatagtaatggtaatggtaatgtaatagaataagaatcgtaatgggaattgattaacatgtttggtttgttattgaaatgaatattagaatgaatgataaattgacaaaattattcttataatttttatatttatataaaaaaatgtattagagtcattttagctttactttatttagtcttttgtaatgtaatcctcattacacacctttctaatgtaataggaattcccttatataatgtaattatgattataatgtaatcctattacatcatttttaaaagcaaaacaaacattgtaatagataagttgattccactacaattcccattacaacaaaccaaacattgtaatggataagttgatttttagatcacaccaaaaatcaggttaaaaaaaatatacaacaaaataaccgtgctaagaggtgttaatagtcagtactaactatatcagctagtactgataataataagctaaagctgattatcaacgaggaaaaagaaaaacatgaaataaaagttagtcatatatacaatcaacgacaatctgaccacttaactaagtcctaagaaaggtaagtaacttgtgaatctaagatctcttacaccatatgagtaaatacactctttcccacagcataaaagcataccatatcgataaaaacacattcatatatcacaagctgaacccccttcctcttctcctcaaaccccaaagcaaggaaaataattacatgttggcatcaagagtagagtagggtctacttcttctcccatctgcgctcaacaagcagaaatccccaattcagtattgaatatactgcagtgcaataatccgacagttgtaaaaagatatcataaccggagtttacatcttgatgctataggactaataaattaagtatacaggtagacagtaggatttcactaagcaatgatattcatacaaggaacaagtcttaaaatgatttggatctaaggggatcaggatagagaatgagaaaactagtgcattaaagtaatgaaactcagaaaaggcttgaaagaaatatgtatgctaaccacaaaaaggaacataaaacctaaaccatcagacgcaccatgtccagtaacgaagaaaaagacgaccaaacatgggattaggagtcggagaaaaaagaaaccacaccggattaggggttaacctgagcataaaagtaaatctacatattctggaaagaaagaaagaaagaaagaaaaaaaactccttcaagttcaactagatttgacttgtttgactaattcagagacatactgctcatcctttttgtattgatatttcttttgcttaatctattttcaaaataatattcagaatgccatacaaatctataacacaacaataaaagcaataaagactatatatatatatatannnnnatatatatatacatagatatatatcttctcatagggtttctaatactacaacttatgaattgctaagaagaaatgaatcgaatgtctttgtgcatcaaggaagcaaatgattcttaacatcttcctctaacctcaatttagagttgaccacagcaagctagaaggttgaaagttgaatcacagagacagcccagcaaagagcaactccaactccatttcttctgatgaagatctctggcacataaggaaacaatcatatgagtacaatgataccaaccaacaagtattcacttgtttttaaagctacccttttctttcgtatgcaatggcaagtatcaacactttaaattacagatcacaaagacatctataatcaagcagcattacagatgaaaataaaaaagagtacaataagggaacacttagttctgtgtacctggacagacaaaagctgcagaattttattgagaacccgcagtcgatgagaagcataagtgcttgttgccggaagtttattaactctcttcagctcttcctgcacagcagccctctttgcctcagacacaattggtgggcgtccacattcaggttgagcaatagctctatcttccattttaacctcaagcgaattgctgccttgaaaactactcagagcatccatatttcaagtgaacctactcacatatattaaaaaacaatttatcacaaaatcagtcttttttctttgaattagggaccttagataacttcaaataaattaagagataatactgcacaagctacaccaaaaaaaaaaaaactactgaaacaaataagcaataggcaacaaccaaaataacatggcatgattttatttttttttaaaaaaaaacgagaataatattaatttgtacattagtatgtattcaaaggttttgagctagtgaagatacgcctatgaccatcagaatcttttatctatcattctaacactttacatctc

SEQ ID NO: 28903 - DNA, 3124 bp, Cannabis sativa
cttgggatgagtttatagagcaagagagataaggatgaaatagagagagttaaatatttaaaatgaaaggagtaaaattaaattttataaaataaaaatctattctattaataggagttaatttagatttaggtaaatctttaattcaataaatatataaaaagcaaaatttcccattaaaaattattagcaattttccttttaaagaaaacgaatctattttttattaaaaaaattgttgtatggagatggcgagtgggtccaatataattcgtttgaatattcaacactcaataactacaaactttggtccgtgaaaatcactcgagtaagggataaagtcaaaccaaactcaccaataaaaatccgccacgtatacagattacgcggacgcccacgtggcatttcattcgtttagaaaaccaagaagtccggagacatgacgtcacgattactaaaaaaaatcgaatattaaaatttgtccatttctttaaataactaattgctccaaattaaaagagacagttttaatttaattttttaaatttcatgaaatgataatttagacggatataacgacaatgcatttttaattattattattattattaataataacggataagtaacgactaattaattactctccattcccaaaaacaagaagaaaaaaaaccttgaaaaaagtcttcctttttagttttaccattttagtattgctttcgttctcatctctaagttagtccttttttttttattattatttatctatatatatatataaaatcctctgtttttcctctgcattttcatatctattattaagaaaaaaagaaaagaagtgatttttcgaaagcggagatgtcgtcgagttatgttgggtcacttgatcagggtaccactagtacgaggttcataatctacgacaaacaagctcgccctgttggatctcaccaggtcgagttcaaacagtattatcctgaagccgggtaattgtatatttatatatatattgtttatcttgttatcaaaattgttttttttttataattattgatttttattttgggtattgggtagatgggtcgagcacgatccaatggagattttgaagagtgcgaaagattgtattgcgaaagctgtagaaaaggccaaggaagatggtcacgacgttgaaaatggtctcaaggctattgggttgaccaatcagagagagactactctcgtttggagcaaatctactggtgatcctctccaccatgccattgtttggatggacgtccgtacaagttccatttgcaggtattcatttatataatatatatatgtgtgtgtgtgtgtgtgtttcttggttttgacgaaatgtttgtaatgtgtttgttgtaatagctgtaaatctaaaatgggtctttttttttctcttttggatgagattttatgaattgggttgtttggtgtaattctgaaattgggtttttttgggatttgatttgtgtttagaaaattggagaaggagttgtctggtggaaggactcatttcgttgaaacatgtggtttgcccataagcacatatttcagtgctgtgaagttgctttggttacttgaaaatgttgagactgttaagaaagctgtggagaatggtgatgctctctttggaaccattgattcttggcttatctggaatttgacaggtggagtcaatggaggtgtacacgtaactgatgtctccaatgcttctaggactatgctcatgaacctcaaaactcttgaatgggacaaacctacattggaaactttgggaatccaacctgggattttgccaaagattgttagtaactctgaggttattgggaacatcacagatggatggggtatcactggtgtcccaatctcaggatgtttgggtgatcaacatgctgctatgttgggtcaagcttgtagaaaaggagaagctaagagtacttatggaactggtgcttttatacttctcaatactggtgaagagattattcactcaaagaatggtcttttgagcaccttggcatacaagttaggccctaactctacggctaattatgctctcgagggctcgattgctattgctggtgctgctgttcagtggcttagagatagccttggtgttattagtagtgctagtgagattgaggctttggcaaagtctgttgagaccactggaggtgtctactttgtaccggcttttaatggattgtttgctccttggtggagagacgatgctcgcggtgtttgtattgggattactaggttcaccaccaaggctcacattgctagagctgtgcttgagagtatgtgttttcaagtgagagatgtgttggagtcaatgcacaaggatgctggtgaaaagggtgagactaagaatgagaaaggagagtttttgcttagagttgatggtggtgctgctgttaatgaccttctgatgcagattcaggtttggcttattcacctttttcactctttttttacaatttttattgaatatttctggactcattctaatttcccagaataaaggaactaaacagtaacaaatcagtacatttttaatatatgtaaaacttggttaaaggtgttgtctttattaaaatttagagagtaaattgggccccccttcttaattactctatttgtaactaaagtgactagttttgaattatgtaaaaagacacaaaccgagtaaaaaagacacccttttgtttggttaatttgttattaaaagaaatgcctgttataatgctttttggttttttatcaactaacttttggattttgtttgttataacaaaaatcaataggctgatttgttggggagcccagtagtgagaccagctgacatagagaccacagctcttggggcagcttatgcagctggattagctgttggggtttggagtgaagaggaaatctttggttctggagaaaaggccaagactgacaaaaatttcagtcccaaattagatggagaagttaggaagaagaaggttgagtcttggtgtaaagctgttacaaggacctttgacttggctgatctctctctttaaaaatttattttctgtttattgatcatttctgtttttttttttttttt

SEQ ID NO: 28904 - DNA, 2324 bp, Cannabis sativa
gtagtgtaggcaccaacctaatcttgctagcttctttgttaataaaaagttggtttaattatacatatgacccgataagaagataagagtctctttctaaaaaaatgagattaagacctaaaatttctaaagtaaactttctaaaattattagaccatattgaatatttcagggcatatccaaattcgatttaattatatattatgttaaccctaaaaattgagacttgtgatttttgaggcttgtccaaacacatgtcaaagagaatgaaggagttctccgttgaagaccgagcactcgcaagaaaatcacctgcatggcctcttggtcacacaatggaaatgaaagagagtgtggtgacttgcggaaagatggagagagtgtgggtgggacatggggagagatggggagggtgtgggtgggacatgaggaaagatgaggagagtgaggatgagatggggagagtgtgtgtgagttaaggagatgggaaagaagataatggagagctagagagatggaaaataatagaatggagagttgaggtgatggggaagaagagaagagaagacactcgacatgcatgcaacgagggtcgcctagtatgcatgccatacgcttgatcattgtaacaattcataatgtcccttaatgaaatgatcaacaattggtaaatttttagacgaataatccaaaggacaaggcaagcacgtgagtgagtacatattaaggtacgaccacaccacctgcaacacctgagctcagggagaggacgagtaatagagaagccttgtgtgcaagctctgttgtcttgacaagaagtacactgcaatcactactcctgcacccaggatcacctgacaacaattaatacacactgcaagaccacctcctgcagctgcatcctatagcctacatcgtcctttcctgataccttgggaccaccagggaatcaacttgtattttgaagccattaaagatccctataaaaatctctttcttctattgaagaaggagtttgaaactctgtaacaaaaagctctcaagctatcaatacaaaaaacatatgtttcaccattttactctgtgatttttaagttttatcttcacctcaattttcattacagcctgatggcatttatatatcgagtttccagccactcacattgttgaggagctcttactgtcaacatattgtatgttagattttactaaacaagttgatccaattaatttcaatctaatgcacctgcgatccagaaattttaaccattttaaattcaacaaatatcaatatgcatatacatatgtcacacacataatcctatcacaatcatcgttatattacttttccatcacgctttataataatctaggcaggtatcccaatagcaattaatataaacaattaccataccatgagtcgacatgtcttcacaacaatgtacatattcgaccactcttcaagatctttaaaaccatagttgttctgataccaagttataacgccctaatctatagggatgtcacgtgtgtggatttataaactaatttagtaatattaggtaaattaattattaaaatctatgataatattaaaaactttacgaaaataaaatcctagtaattaacaacataacgacactaaatttttttttcgggggattcctgttacaaaagttttacaaaaggactatgtacagtagtaactaaaaatacacaacatatacaaaataagaggctctgtgggaaccaaggtataggcggatgtcaagcctattctaattctgagtgtcctcgttgtaagagacatgatcttggggaatgtaatcggaagacacgtttccaatgtggaatgttggggcaccttaagaatgattgccttagtttaagaaagattaattggaacaagaggtgaaacccactccagcttggctgtttgccatcgcttaggtagatgatgctgctagtctttctatggcaacgaccggagggcaaggaaccatttatatttgttgggtccgttcagggttctcgaattccaatcattttagtattaaaggctaaggatttgctacacaatggatgtgtaggatttttagctgttgtgattaactccagtagacccaaaaaatttgggcctaagcatgttagggtgttaaaagagttcttggatgtgtttcccgaagagttaacaggattaccaccgtaccaagaaattgatttcatcatcgatttggcacatagagcagagcctgtttcaaagacaccttaccgaatggctcccgcagaattccaggagctaaaaatacaactttaagggatgc

SEQ ID NO: 28905 - DNA, 2026 bp, Cannabis sativa
atatctgccatagatttatttcctttgcgtgttgtttggatcttagttcatatgttatccatgtttgctcaagaataagcaccatagagttcttaagggcattacaaaatgctgcagcagattgacaccccatgacttctactacgattcgttctgtcatgtatccatacggccaccccataagaagttggtcgtagactaaccagttctcatattctagattaacattgaaatctgatcctaaggttccatcaattgaaatgtttattggcaggaactgtggtcgagcttgttgcagaccgtttaaatagccttccaacatatgaccttggataatggtggtgaccattttcttccacaaggggaagttatttctatcaagctttagagaaaaatggttggctcaacatattgttgaaagggctagtaatcagagatgtgtgtggagttgaagaagtttgaaccaccgcaatcgttaatgcaaattgagtatgtctaggagttgtttgttgatcataatttttaggattgcttgttgagtgatctggtgatgtttggtcctaaggagtcgacatggcttcaacctaaaaccactatgataccaagtcaaaaatatataaatagatagtgtattaaatgaataaaattgactcaaatattagaggttgatgaattgcttctatatttatactcgaaaattaagatttacattagaggatacaatctgctagaagcttacacgtagcaaagatattttctaaaagggaataattaatgaaatctattctaacggtataaagaatagttggatgaagtaatcattgggatttccataattcaaccaactttggaaagacaagaaagcccctacatattatcttgtgacaaagaatacagcagattctcatgaaaaatgtaatgttaaaaatttatatatttttatgtatatatataataggctacaatattagtcactcggttgatattcaattataggttcaatgactagaattaatcttaagtcgccctttagtatatataggttaaaataattcttcatgcacaggtgcgtgtagctttttttattttgctgtgataactaattatatatatttatatatatatatatgtgaaggtgtttactctgcgataaatgtttagataatttttatttatttacaatttaaaaattagaattcaaatactttgttttactttttgttgacctcacttttaagcaatgacgttgggtcatttaatgtgatgagataaagtaataagaacaacataatttatagaagattttcccatgattatatatagtattaggctactcccctttcacttgaattacttcgaaaatatatcaatgtcacaaggagctggctgagtgagtttcttaataatcctaaggaaaatcttacatttatttacacaagataattgttctctggaaactcagaatttagatccctcaatagtgaaatacttcaccatatttaggagaagaaattagaattaaagggaaagctaagctagtagggatttaaatgggagatatttattggatatatccctaaaaattgtgcttcagccacgtttaccctgtgcagagtacttggcttcactataagactagaacctgctcggacggtaataatatttaacctgtctggtgttccatgtcagtcttcagatattcttagacatgatcaccctaaaaggtacattgaaagaaataccattcatccaagttttagaatggtctccacgtgtcaccttactggacgccacatcaccaaatgtataatttgggataatatttgtcgcccaagtctgtgtgcaaaccatttgctcgtacgtggacttattcagcctacgggatgcttgaatggtggcacgtgcccaaaatcgattgtttgtcttgtcctcatgcagccggatcgcaaggtacaaagattaggttatcctttcatattttgataatttattaactgtgcttcaaaaaattggtcttgatttatac

SEQ ID NO: 28906 - DNA, 3045 bp, Cannabis sativa
tgaacaaattcaccattagaaatttagaaaataataaaaatacaccacgataaatattttactatcgtattgatgtaatttttttgaattatgattgaattgggttgtttgggaactcttgtttaattttttgagatctgcattttatagatctaaaaattaaactcaggacattagttttatgcaaattaaactgaatttccggttgaattttaatttcttaacagatttttacactttttttcatgaattcgaaatagctcctgttttaactgattatggtaatcttctcaagtgaagtcgtcagaaggtggttttctttctagttaaattttcgttttttacgttgggttgctgcgtggttgtgcaatggttgcgcaggaagcatggatcctgagttgaaggtgtgtgtttaagtggtatttgtgtaatttttttatttggacggtatatttatttatttagtcaactcaaaatatttttgtagtattattattttttttttaaattgaaaaaaacctctgtttttttatttggtaaagtgaattcattttgttataataagaaaaagggaaatagtaataatggtcagcatcacatattaatacattaaattatataaagaaagaaactagtcttatccaaagagagaaatagtcgatagctgctctctagtctctgttctcagtctccatactctcttcaatggcggccaacaatgccgcttcctcctcttcttctctctgcaacaaaatttcaaacctctcaatcactcattctctcccaccaatccccactcgcatatccacccattatcccaaaaacctcaccataccccttaccctcaacacccaattccccaacttcgcttccatctcactcctctcttcccctccacatttccgcccattctcatctgtatacgatggcttggagctcgaagacgacaccccaaactcagatgaagaatacccagaactagaatttgctcaagtagtagtacacaatgaattaaaaaggcccaaagtaccaggctctggtggcagtgctggaagactttatgtgggaagtttgccttattttataaattctacacaattggctgaggtttttgctgaggcaggcaaagttatttctgttgaggtttgagactttcctcttcattattattcaattttcaaaaaattgttatcatggtttttgtatggagttttggatttttatttgatgtttgtttaggtgatacatgataaagttacggataagagcaggggatttgggtttgttacaatggagacctttgaggaagctaaggaggccattcgaaagttcgatggttctgtaagtatttatatatataactccaacaattataggtgatcttcatagtgaaagattctcctattgttttgtcattcatttggttaaattctttccattttgtgtgcttagaaccatatcagcaatatatgtcttgaaaatgttgtttactatggtttcatctgttgacacagcaagttgcaggcagaactattaaggtaaatttcccagaagtaccaagaggaggagaaaaggaactaatggggccaaagatacgggagctcaacaggaactttgtggatagtcctcacaaaatttatgcaggaaatctcggttggggtctaacttctcaggctcttaaaagtgcttttgctaaccagccaggcgtgctgagcgccaaagtcatttacgagagggacaccggaagatctcgggggttcggctttgtcaccttcgagacagctgaggctgcagcatctgctttagataccatgaatggagtggtgagaaatactaagtgatcatattattcaactctgttctatagttctattttaattctggtgagactgttaaattgttttttcatgtatggaaaacaggaggtagaaggacgaccgttaagattaaacatagccactgatagaggagctgctcaggcctctcctccattaccagaagttgtaatagaagctgtagataatgatgagctgcttgctggcattaacacatagagaattattctgaagttatttccttttgtccctttttgatgagtctccaaatcccagctcgtaactaatatttactaattggtatttgctagcaaattttcaggtaataaataaaagcttattgtacttgttctgttcttcttgtcagatttgtaattaattgagaaaaattgagagtttattatttctagaactggacttgattagcaagacaatacaagaaggaagagtataactcttatgaacccccgagcaattcagaaagggatttcattgtaatggagaatcttatattagtataagggaaaaaaaaaacggactcatggcataccccataagaatgatgagtatctttggcatgaaattttgaatttatcagatctaataattattaactggctatggattgtgcccagatgaaagaagagcatctgctgcagaatcaagatcctgggggaagaaaaccctgcagaacacatgatctcacactttaaactgaattaaaagaaaactgctttgataatgattctggcaaataatgaaattttagataatggtataattgggttgaagggcttaggaaggatcacagggattataatacaatcaacaattataaacttatggagaatatgcatttggtggctttgtgatatgaattcaaggtgctccagaaaaatataacaaaaatacctgcaagtattgtggtatattgtcctgctcagctgctctatgtcactaatacctttacaaccggcaacaacctcaagaacttgcctggaaacaatagttattgcgagtataggaagaagtcaataaatagagtgtaatgatagtgattcaaacagacatcttaggaaatccataatccaattttactaaaatttaaaagattcattgccaccaaataaccatgtaacatatcagcacagaagaggtacacacaactgtctcttaccgcactaagcagggttcattacggcctttaaca

SEQ ID NO: 28907 - DNA, 2311 bp, Cannabis sativa
taaatagtgaaattaattaatagaactatgatgactgaaattatgtatgatatatatatatatttttgaaaaaaatttaaagtgtctagcattaacaaattatattatttaatatatatatatatatattaattaccatccatcaccaacctaattaaagttgtatataccaataaaaagaatcaaggaagacaaacaaagctagctaagacaccatctgaaaattccaatattattatttttttttgctaggaaaaaaaattccaatactatatatatatatatatatatatggttaattaagatttttgtctcgaactttgacatgtatcaaatcatgtcttctaaactttaaaaaccgttaaaattttctcgtgaattattgagattgttggattaagaactttttagtaagaaaaatctaatatagatgaaagttcagggacatgatttggcacatgtgaaaatttgaggggtatgatttggtagatattaaaatttgggaagtatggtttagtacatggacaatcaccgaattagtaaaattgaataaaattggataaaagtctttaaattcaacaatctcaataattcgagagaaattcttaacggacagaaaagttcacagatcataatgaaatttcgtacatattaaagttgggcaaaattttaattaacctaaaaatatttatatattaaataagatgcgcatgcaagagatatcattatagaatagtgtctctttcgaacaatattcataaacatatgcatgttggagttggaacaatacagaatggtattttctgaccaagagaataatttatacaatttaatccatgtatgtggcttttctcggcatccaaacagaaaatcaacttggtttgcgtcacaattttccatttgtacacttattaatactcttgatgatataaactataaacatttggccatttgatccaccaatgagaatccatagactcttgatttttgatataatgtaacttggagttattatgccaattaattgaaatatattttcaactatagcttgttttctatttctagccacatataatttgtgtgtgttttcttttcaattttaaattactttgaatataatttatatcttggatttgactcaactttaataattatgaaaggacgtgatgataatgataaagtttaaaatgggatatgattttgtcctgtgatatattttcacggaatgtatttcgtggtacattagatggatctcagggtatattaaatgagtgtcagggtacgtttatactttctaaccctaattcccctagatcaatctcagtcatcatatcaaataactctctcatctgacggctgccgtacatcacggattacaatccgtgaaagtacaatatcttaaaatttaaaatagtatatatattgtgtggaaaaatactaaatattgattaacttattataagaaatttttttaattttaatcacaataaaatttataaataaaagtgaaaaaattattattaattataaattattatttttatatgttgtaactaaaaagttcgtaattaaatatattagttataaaaaaattacaatttgttgtaactaaatgtatttttaattacttgttataattaaaactaaattagtaataatttatatttaaatattatgttacaaataattttttattatgattatatgtcatatttagtgataaattttttttataatgactataaaatgattaacttttttttggtagtgtatatataaaatatataacctctacagaagtcttatttagacttctacatattaaattattaaaaaattctcatttctcacccttaatttattatgtgggagttgatcctatagtggtgattattgtgttttttactaaattatctattatatgttagaatgatttggtttgattcattaatagaattaaattttattttttttatatatatatatatatataaaacatgttttgattgttttttttttcctcaatatggcatgtatatatatatatatatttgtaggaatagtgtgcaaaaataaatacttaaaagttttttttttaagaaaacttagttttaaaatttattaactacataatttattaagaattatatgttataatttattgggatttttacccttggtgtgctttttttaccatttttcttatatttttgtctttattcagttatttaaacatttttaaaaaaattatttttcaatattatattttaaaaagtttgataattacaaaaatacctatgcatgcttatgt

SEQ ID NO: 28908 - DNA, 2764 bp, Cannabis sativa
aatatacggcttgctaaaaatctccaactaaaattttacatttatagaaatttaatcttctgttattaggttccgttcttttattttgtttaaatattgacgtatctttttaattaataactttgcactctcagcttttacaactatcaaatcgtaccttctcaaaataaaaatgcgaaagatttaatatttttttttgtaaatcttaaaaaattaatttaaatcttaaaaataattattttgaaaaattaagaaaattaaaagtaaaataaaattttaaaactaattgagcgatttaaaaaaaaaatatttatattttattaagattccatttagatataaaaatatattaaaattcaatttttgtaaaaaataaattttacggaaacaaatttgagacatttttttttctccaaaaattttaatttgtttaagtaaacataatttttttttaatttactttttattttttcaaaataatttaataattttattgaatttttaattatttttttttattttttaaaagatgagtttataaatataaataaattttttttttcaaaaaattctaaatcttagtttgtcgaaattatttaatgaattttcaataattttagtttgtttttttaaaatacttatttgtaaataaaataaagtttgaaaatattttttacgaataatttaagtttttttaaactaaagttgatatttgttaggtttttttactaaagttaaattatttttttattaaaatgaggtaaaatttgtattggtcaaaatttagagagtaaaaatactaatttttaactgtaaaaaaacgaaacttaacataaggaatataattttaaaggaaattttttacaaagtgtatatcttaaggaaaaaaattaggtaatatattagaagtttagatgacaaaaatactaattattttaatttttattagttctgatctaactttcaacactagtatacttttctctgtacagcaactaaatgtaaatataactatagggaacagtggtactaattaattatattattagagaagaaagaaaatccataagcaaacaaaattatcttgaaattcaggacaaataattattaattgcactgcagttgccctgtttggactttgttataatttttcttttctatttttgaatttttgctacattagtaagcatttggtaacgatgcttactaatatggccaattagacttttatgggtcgtgtgtaatgctttggctgtctataatagaatcttttttattcttttataatgaaatcattcaagttcaaacatggcgttctgctaggcaacgatggataatgtacgccattgacagttcaaccgctcaattcaaggaaatatatatattatgaacactatgataggaactttgaaaaaaaaaataagtataattaaatatcaatttaaaaaatttaatttttttaagtataatttttattcagttagaccaacttgacctcaataatattagcaatatcaaaatggagattatactcttaaaaaatacgatcaacatataaacaagatgttctagtaataagataagcaacctgattagcagaccgtttgacaaaacgtaaaaaaatattcttaaaagatgataaaagttatttacaatcctcaatgacaccaccaagagtggatgacaaaacctccaaatttctaacagcttgtatcaacaccagacaatcagattcgataatactaacactcgaaagatcgcgcttcaaccaggataacacttccttgagagccatggcttcaacaatctctaagaacttgcccaatctgcagtcccgtcatcccagacacgactcaacccttgtgatcctaagtaaccccaccaaaacaatgccgacctccctcctcgtcaaacaatgcagcattaatattcatcttgagtttctcataacctgattttgaccgaagctcagccccatccgaaagataccaagtatcaaacacaggaaataaaaacttctttcttgagcttttccccactgatcaagagtgatacgagccaaattaacaacaaactccacccgacctttcctatcattccacaagagttgatttcatgggaactaaatttcctaaaccaacatcactgcctgaacaattttttcctcacccagtcatgagaacaaatgaagaaactagtcccaaaacgaccctacatcaactggaatcatagctaaacctgctacccccaacaattctgtgcaaaatcacaagcaactaaacagtgaaaaattaattcactggccccgtgacaaatcgaacacaataaagagacatccacatgtttagtctccaactgaactatcgtaggaagacacccactaaccaccctccatacacaatttttcgcctttgaagaagctttaattgccaaaacttcttttaaaacaccacaaccttcgcgtccacactaccctcactgtttacctataataatttaaacacactcttaattgtatactcgctagaagattcaaacccccaataccagtaattctcggtaaccgaatcagaaagaggaatacgaccgccacttcctcatcaaataaatctttgacaatatcaacattccaagctttctcacccaccacaaaaagactaataacctttttcatcagccaaatgagaatccaaactaccttgactcgaaattgacccattcggaagccacgcagcatcaaataaaagagtctcctctccattac

SEQ ID NO: 28909 - DNA, 5042 bp, Cannabis sativa
aagaagatttgctttgtaagcaaatattccaaacaaaaaataaaaaagtatgaagctggcttattctgaattctttttattctagaaaaatataacaattttccaatgttttttttgcttcttttttcttaaaaagaaaaaaaaaacttaagattgatccaaaggagctgtctccatttgccactgcaacttggttttttttatttaataaaaaataaaaaattgagcgttgaattaatctataattagtttattttaacccctcttgctattttcttaacttttcaattcattatataaatctttagatgaaagcttacataatttttagattcctattctaataataataataataatactatatcttggattaggctcaaactttcttctttggctgactagtaatgaaaactggacgagaattcatctcaaaggtacaatctttattcatttttcactatattttcttgttcaaattttcattttgagtttgaaactaaaaatgtgataaaaaaaatgttatcttttgtattggtgcagagttcttcttggcctaaagaagtggcaaggaaatggcttaacattcggagcaaaacagatgaatttaactcagattatgttttacaagcttcaactaaactccaacgccggagaaagagttgctccgacgacaattgttgcgtcgtcgtgcctgaagatttttcgggtttgctcttttttctctcttctttagatttgttatgttttctggttagtttttctgatcatatttctttgcagttttttcaaaggtacaagactcagatgatcatctcaatctgaggttagtactctttatttgacttttcatttaatgacttttgaccaaacaaaacattatgagatgagactttgttttttcagcttagacttaagatttttcttcttgttttgttttttgtgttatgaaattagaacatttgttgggacatggaatgttggaggaatttcccctcatgatgggttgaacttaaggaattggcttaagtctccaactcaagctgatatctatgttattgggtaatgatctactctctatagtgataatctcatttttagttacaattaagtttttcgttttctattttaatcagatatgtaatccagcgtgaactgtttgaattagtttaaaaggttcaagttagaactgaattacacgaacttttcgtatataaactcatgcttattttacaaatattatcgggtaattaaatttctcttttgttgtaataaggtatgtagtccagcgcaaactatttgaattagtttaaaggcttcaggttagaactaaacagtcctgaaatttagtgggtcataagaaaaaaatattgtatttttcaaaatcagtaaaaaaaaatgtatattttaaaagtgaaaaactttttttggactcctaagttaagtgggctctaggtacgggcctagcccgcctatgtctagggtcgggtttggaactgaattacacgaaattttcgtatataaactcatgtttagtttgttttcaatgaggtatgtagtccagcgcgaactatttgaattagtttaaagggttcgggttaaaactctattacacaaaattttggtacataaattcatgtttgttttacaattattattgttattaggttccaagaaatagtgcctttgaatgctggtaatgtattaggagcagaggacaagggcccagcagagcaatggattggtttgattagagaagctttaaatgacaatgaatttgatcaacaaattaagaatagtaagaagcaaggaaggatgagtttctcagattttctttcattagaaaatgaagaagaagaagaagaagaagatgctattaaagatgaggttggacccaagtttaggttggctgttagtaaacaaatggtgggaatcttcctatgtgtttgggttagatcagatctttgctcactcatttccaacttgaaagtctcttgtgttggtactggcatcatgggctaccttggcaataaggtatatatacatataatatatatttatataaggtattcattgtgagttttccaattatttagaattttctaaaaatgtaataatgtgtttgagttattaataattgttatgattattttgtagggttcagtatcaattagtatgagcttaagtgggacaagcttttgttttgtgtgtactcatttgacttctggtgaaaaagaaggagatgaggtcaaaagaaactcagatgtcatggaaattcttaagaagacaaagttttcatctcattcattatcatcatcatcatcttcttctttagaaaaatcatcacctaataccatattagagcatgagtaagtcttcattaaaacttgtttatcttatgattaattctaattaattaattaattattaatcctttttctttttttggttttttcagtaagattatttggctaggtgatttgaattatagacttgtgggtggtagtagtggaaattgtgaaactcatgagctaattcaaaaacatgattggcaaacacttttggagaaagatcaggtaaattttaattttgattaattttatttaaattttgagtttgtaagtggcataaatctgataatttttttgagtggcacaagtaactaatattagtaaaaatgtaattttctttcagtttcattagtacagtgtcttaaataaacaggacacatataaggtccagattcaaaatcattaagtttggacgggaacatatagtatgagttacgctcaaatcttcttttgataaatttaaaacgaaatttgtatttacgaaactgaacaataattacaattttataaacattaaagacttatgccgttaaataaataattagatttaaggtgcatgaatttttatctcaaaactaattgatgataagtgaagtagcctatattcttatatacggctcaatatttttatatttaatctatataagataatataatatcgtttacaaactcaaaattttgagtagttatgtcgtaattattaattttttttttttttttttatgatattatagctaaggaaagaacaaagagaagggagagtgttcaaagattgggaagaaggggtaatagattttgcaccaacatacaaatatgttactaattcagatcattattatgttaatcaaatctcatcaaataaatccaaacacaaacaaagaacacctgcctggtaagtcttcaactttaagtcttaatcattattttttatatattatttgtccaatgaaattatgaacaagttgtggtagtactactaatacttatcattatctctttcttctataatatatatcttattattattattataaaatatgtttagtgctgcagttttgctctgttcatgacagtttacttaccagcctctcttctttttatatgtttctctttttttaatattaattaatcataataataatatcaccaagcctagttgaagcttccacttatcattgagtatttatatatataatatatatatgattaatttatataattaagatgtaattgagaacagtccatgtgaaaactatcattattaaactaaattaattaataaacaaaagtaacatgaataaaccgacaattttggtataataattttgagattataaacaaaaccatgtgcattaacttaaagtaatttttagcgtaaatacttaggtaataatatttaagttatatttttaaaatttctatacatacctattaaaatattaagtcatcattcatgtgttattttttaattaatgtatttaatttaatatttaaataaaaaatttataacctagaccaattaagaattatcacttgacgatttacttgacacttacttaccgaagttacaaaattataatttaagtctttatctacaattggaagttaaatatgagtatttatgctgcaagttatttttttattttgttacaatcaaaattttgataaatttaaaaatttaattttaatttttacaggtgtgataggatattgtggaaaggagaaggaatgaaagaaatttggtatggaagagaagagtcaagattttcagaccatagacctgtttatgctattttcattgtacaaattgactcaaaaagacacaacaacaacaacattaacaacaacatcaacattaacaacaacaacaacaacaacaacaacaacaacattaacaacaacaacaacaacaacaacaacaacaataggctaagaccaaggccagtactagctaaggtacaggctgaggagcttcttttgccaacactaaacaacagcaccaggttttgacagttaaacagtgaaaaaaaaaagtaaaaaagtaaaagtaaaatgttggagaaggatgtggctgcatctctgggtgttttttcaaattgttcataaatatataactttgtttttatggggtttagagtagagggaacatagattaacttttgtaattaaagtagctcagctttttctatagagcaattttttatttgctctttttttgatttttttttttttttttgggtatgagttagattgattgaagagaaaggtagtaaaaaaagagcctagtcaaatgtgaaggtttggttggttattatttggagaaaagcttagttttttgagtcctcttcttcttccaactttcattgtgatgagactctaatattattattatgtttaatagaaaaattgcataccaatcatcatagaggattgtaatatgctagcttaaagaagattaaagctttctttttagttattttcttatagttaaaagtaaaaaatagctaaaacctcgtacattttcatcggaaaagaatcaatagaaaaataaagaattagaattaatcgatatatttctcgtattatggtaatttagactatgatttggattaacaaagatttatttaaagaatcatttaacagattctttctcatgagttttttccatattttttaaaacttttttttttt

SEQ ID NO: 28910 - DNA, 2239 bp, Cannabis sativa
aattactaattagccaacttagaataatgagccaaaaaagaactattgtaattaatgagctgagaatatataaccatcatcaatctacttcactcaatgcctagtatttttttagatatatcgtaattggttattaacaatattttttaaaaattattacagaaatctgatacttaattggattaacgatattaacacataggtgctaacattagtcccgtttagcatttctcttttgaaatttatacatttttatcacacacctaactctatcctacttcctcaattatttttataattccaacaatatcaataaaaaaattatgatttaaagatatataatagctaatgttatttgtctaagtacctgttcctataaaatctgcttcttttctatcactttttagaaagaaaagtattcttgtaattagttaatattttctagtgtcctagaatatgacataatatgctttaatattaaggaactcaattgtagcaagaaactatatggctattaattatttataaattacgataatcattggattaaaaacttacccaatatatgattatttcttcgaagtagaagacactattctataataagtttttcaattacggtttggttaggtcattaatagtaatgaacatgtacacaacaagtaattaatgccatcttgttgttcaaaaaaaaaaaaacaagtaatgtcattttaatgatcaaattcacagtgaacaaaatgatataaattatattttaccttggcgttgaagtgaaatctatcgaccccattccaattatcaaggtcataagctgtgaaatgcttgcaacaagctgcaacctttaaccggtcaccgtcgtttccctgtaatcccttaacataactggcagcgtattttccaacgacaaccggatcttcaccgggagtctcctgtccacggccccaccttgggtccctcagtatatttacatttgggctccagtaggtgagcccagctacacccccattatacatggccctggcctcatctgacacaacctgcgcccacaacacactcagtgtactttagtattccaaccttggtcccactaacatgcacaacttgccttcctttttaacccaacttgttctgaatttcagccaatcacctagtttcgcgctttagatttattattacttactcttctatagtctatatagatagaccgtattaaagttactagctttcttcttatgatcttatcttattatgcttatcattgctttattacaattttaccataagaaattacaaagatatgatgttactgtaatgtacctttcatgcgtaaacgatatgatgttaccatagtatatgtatattgatcaaagaatcttttctaaaagagattattattatcaatcttttttatcttcataaattattgttacgttaaaacacagaacgtgtgtgagtgggtgtgtttattggttcgaccaagaattattatttatttattatagccttaaccaaaccacatcacaacaatttaaactgacgcacgcaccccatccccatattctcccatgacacttttttataaaaaaattatatataaaattactgatattactataccaaacaatagctaggataacttagataaactagctacatgctaaaataagaaaatttagaaagtttccatcttaaataaataataacgaaaacaactcaaaaaatgaattttgagatgttattagttaaaattaagaaaaatatgtatgttattttgaaggggaaaaaatggtgtttccgcttatatgagctaaactagttcactctccaagtatatataatttaatttttctatttttaaataaaaaaaaaaaagagaaaaaaatctgacccgtccgatggcttcccatagagaagaattgaaagaagcagcggtggtgatgacttgagggaagctagtggcgccaggaaagggcccaccgaacttagtaccggggcccacattggagacgccgtgaagagcctccgaccaccactcgtacccttttatacctaaacgaggcactgccgctgcattgttcaccagcagcctaaccttctcttgcaatgtcagccgtccgatcaggtccttcactctctcttttgttggcaacgacactttgcaaaacgctaagtttgctgtcgttttatcttttgggtcacaagcgaatggctcacgcccagctgcactactactact

SEQ ID NO: 28911 - DNA, 2592 bp, Cannabis sativa
ttttttttaaaaaaaaaaagatcgtaagattccatattgtgttggatagctgttgacatctatcatttttttttcattaattaattaatttaataaattatagaatatatacctgtcaaatatattaaatatttgctctatatatatattcgtttgatgttaagaaaataagaattaataattaagattagtacattatggaatgtcttttaaaatagtgtattttatattgtttttgtgatatttaattaaggtatttattctgccaaacataatagttaaagatattcttttattattaatgttccttattatatatataataattatatataggtagccaattttgtgtccaaaaatataaaacacagaatgtattctgttgtacaacaggtgggtcccagggtatgtgataatgagtcccaaagtacgtaataatgtgtgtgaatttatttataggacccagggtagttaccattttttaactctaattatccttagatcaaccccacccctcagatcaaataactaccggctgtcgtacatcagagaatatatcccttaaagtacactcaaaatcgtgtccctatatatattatgttatgtatacccttcaatattatttgagatatttaggcgaaattcttttaatatttatgattattatacacataatttcaattaaaaaaaataataaaaaaaatacgttattctacgattttgttaccgttgtacttttcttggccactaaatgtcaacctagagatacgtgacgatatattattagactatgtattaaataagctcaaaatatatcgccacatatttttgagctgacacttaacgagcttaattgacgcttaacaatcaaaaaaagagtacgattgcaataaaatcataaaataaagtaatttttccgtcacttttctgattaaagttatatgtgtaacaatttcaaatataaaaaaaatttcgctacaaatatttcatattattataatgtttgtactttctgaaacttaattcaatattactatatatatttgtataatttgtgaagttgaaactttaatcctcaatctatttaatttaatttaattattcaaccacaattcttaaattatatataaagaaatgaaaatcaattaaaataggtcattatttgggtaatatttagttaagtgtaatgaaatagtatgaaaggaggataatatttgtgatatttggctcattatttttggaatggtaattagggacgactataagaatatatcgaacccacatcattatttaatatgttatacatttaaaatatttgttgtttacaatatacttaattttaattaaataaaaacttaataaaacctttcattttttattttaggtcccaaaaaatataaattttaggtaccagtttaacttgcttatacctaaagtcggtcttgataataaaaatgagtagtgtatcaaaaaaaaaatatattttgttttcttggtaatataagagcataatggtaattttgttttatataaatagtgtaacattggtatagaacaataatccttattcatgtaaatagtataatggggattacattaattgtaaccctaaaaaaaaaagattacattttttttcttaaacggaaatcttcattagtaacaaacgttatacaggattcgacacataaagcaaaacagcttgttgagcacaaggaggtacaaccccaatccatatggcactagccttgtgaaccaaagcataattggctaattcatgagcaacacagttggcctcgcgaaatacaaacgagataccaacaaaattttcatgaagcattaaatttttaatttgagttagcaaaccatcgatgtcgcgacaaccatcctccttcttttggactaattggacagcctgtagacaatcaaattcaatgctaaaccgttgataactttgttggatacccgactgaaggcccctgtggatcaaataaagtaataaaattgtaaaattgtaagaaaattacattaattgtaacaatattataaagtttttaaaaccaaatcaaataataaaattgtaatggtgattgcataacgaatacaccaaactaaaattttgtttatatctaacaaatattgtgaatctttttaataattgatgagatttaatatattcttatttattataagttaaatatttaaaaataattaaatttatattaatatttaatatagatatgatcaattaaattaatcacatatataaatatttatatataaatatgaatttaaaaatacatataaatatataataatattcacttagaaggggcatgaaaatggtacttttctcaatccctggttttttcttcttaatttaattatttgtcatattttatcgtattttgcttgacaaatttagttaaataaatatatttttgatataatacttcacgttgaaataacacacatttttttgtactatagtatttggaatgaatctcgtgcgactgattttactatctagataggtatagattgaaagcacgttaaaaatataactttgacaagaattatgagattctatctcaa

SEQ ID NO: 28912 - DNA, 1416 bp, Cannabis sativa
agacggcatgtcatagaagtattaaacactttggtgtcccataataatgctcagagatctacctaaacaaccatctctagagctctactacataaatttctatgtatatatataatatataaattttgaatgtagtcctcaatctcttatagtgtggtcttgttctatccacaagtaatttatggagtaatataaaaacattactaatgttaatattatttctagattactttagtaacactataaattaatgtgtaatagaactaataatttagaaataatattacattggtgatgctacatattattagtcttctcttttgctttattatcatgatgaatgatcaaggtctttaattttgtaggttattcttaattttgttgatttgttagttaggaaattctataattgccattttacagcttggtttcactctatttgcttatgaaaaataattattggaattatttaaggccataatttatttttcaattttttttttttgttgttctctaagttgaaaattttgagtgagaatacaagtttttatatcaagctgttttataatagggcattataattcttataattctaaagattactactatatttttttccaagtatttatgtcatatgatttcaactttcttcacttcccattttaaatgaaaaatgacatctatcccgatcaaattagattcttcgaaccctgttgtatttgctcgattccctcacatacttactaattagtttaaaagtgtcacataactcggaatgaactactgataagcttttgtcccaaaagctattccaatatctactactataatatttggtaatacccttctatgcattccaatatctacttactctatcaaattattttaaaaaaaattattattattaaatactttaacgtgtctaatattataccgatgtgacacgtttaaagtaatatttaatatagtaattgacattttaaggttcatttataccatttatcttaaacaaatcaaattagaggcatagcatttcaagtgggactaaattattcttattaatatttctttgaagaataatgccaatatttgtttaatatttttttaacacaattgactgagtgagtgaagaagtcaatagtcaacaacgagacttattggatgggaaggaaaaaatagctgagttgtcaaaaagttaggtctattaagtggaagagtggggcccatttttgaaatcttgaccacttccatatgtgaatgaactcttcttcttgaagaaaatttcaaaagagagtaataattgcacgagaaatattataacgttgggtaattagtataggaaatttatctaaaggattgttctattagttttatttgttttggtatttagaattttttttagtcaaatttattttt

SEQ ID NO: 28913 - DNA, 1887 bp, Cannabis sativa
atctttttaatgactgtacactaattatatataaaatttaactatttaattgtatacattaatagttttttttaactatttaactatttaaagttttatacataatttaaaacaagtatgaaaaaaaattaattgaaaatatgtttttaatagaagggagtttaagctttcgaaatattgaagtgtggagtaaaagtctggttgaaaagcatgtgcgagtagtaaccataaataaagataatctttgaataaaataataatagattcattttatttagattgagaaaaatagaaaaaattaaaattgtttatcatgttaatttgtatacaaaacatatagattggttatttaagatttttgtctctcgaattttgatatattaaattatacttttttaaacttttaagatcgttaataatatttgttcggttttattttgtttttttcttttttttttaacttttaaaaggtgaatcattattcaattaatgaagttcttttaagtttttccaagcaaaaaaatatatatatatatatatatatatatttaaggttgaagtgaaagataaatgatgtggtacacaacaagactttggatatatagtaacttattaatttactaaatcagttaagacacaataactcaactcaatctaaataagaatatgatgctgaatttagataagaatattacacctattaaaaagagatattttttataccaaaacaaaataaatatttcctctaatttatattattactattactattaatattactttgactattctaattttagtttatgttaattaggaaatctaatctagtttagatatcaaaataaaatctaaaattaatcagattcgcatgtgggtaataaatcccacaacacgtttgtaaggtaaattgtccacccataatttcttttttcaaaaaaggaaaatatagaaaaatagttaatatcaattttaaaaaaaaatgatgaaaataataatagttaaattctactttgacccctttgtttttttgataaataacatatttaattttatattttctaaatatatattttaattaaatttttgcaaaatttttataggtattatgataaaattaattaagtttgttgttgtattaaaaatttcaaattaattatactaaaaaaatatattaaaagttgagcttgggttatatttatacaactgtaaaaaacatggaattattttgtaattttaaaaaatagacaatctaaaataatattaactcaataataattaataattaatagaagtgtaaaacccaactttcttcttctttcttcatcttcttcctcatgttatacatattgttcaaattgtctggccacccaaatctcggaaatcaaccaaccaaccaaatcatagaaaatggtcttttcttttctaaaattcaaataaattagaaaaaaaactggttaacatttttggtgtaactatcttaggaaggaggagttttaaggggcataaaaaaccatcaaacacaggctctgccattgtacccggatccgacattgtcggacccacgtaataatactctctcttttttcttaaagctctaatctttaaacacccttctctctctttctcattccttcttcttcttcttctggtttttgcagaagaagaagagagataagctaagaaacccccattttccattaccagatctatcttctcttaacaaccaggtaacccctttttctcttttaattattttagaaagaataaaaaaaaaatagaataatgggacttttttggtttatacttataggaatccacaatttttattatttttaatgtatgattctttttatctttttcttctgtgctttatatatatatatatat

SEQ ID NO: 28914 - DNA, 3541 bp, Cannabis sativa
tctctctctctctctttgatatgtactaactctttcttcttctccctttctgtgtatgaatctccttttggattggatctccgagccctaatcctagggctctaaagcttagctctgtgagtctcctcctctccaatttttttgttctgttcttcctttttcaattgagtttgcatgtatatatagccttaggatagatgagagagctggaagttagttgtaacagttttaacaaactttgcaactaaatttatgttctatcagaataggttgttagaggccgaaggccacttgtaggttttaattcttgtaactggatcttgctgatctagacagtgcatgtggaaatttattttaacaatttccacctgaatcctcatatgtattgtttgatgtttgtcttagttgattatgagggtcttagctcaaacccactagagtttctaccaacctgtttctatccctaataagcttaagcaaagcttaaatttatttagggaaaccatctttgtacccatatctgtcggattcacttcagtaggcactttatctatttcaatatgtccttgagtaaccttgtccctaataaagtgatattttatttctatgtgtttggtcctgtcttggaaaacatgatttttgcataggtagatactgctctggctgtctgagtagattatatcacctaatcaagtgagcccgtgccacaacttggcaccaatgtatcacatcatctaatcagacgagctcgtatatcacaaccacattgccattgcataatcagacaatcagcaatcaagaaatctgtcatgccatgtggtacatcatacttttcttaccttaagtctctgttcaggtatgttggctgacctgtatggagaatgatcaacaatcctgagccctatgtcacaacaacggtacattgataagtgtatattctaaatcactgcctaatactcgcataaaataatctagggttttctaccaaactttgtggtaaaaacaccctaaaataaaatacaattctatctctaaaacatagaccatattgaaaagctcgttgcaagctttgaattggtagatagattgtctaaaacagacacctgagtaaaaggttatggccaaaatacaaaatttgacttttcctaaaaattgaccaaacggaattccagttggtaccatccagaattctggttctaaatagtctaaaacacgattttcctcaactttaaaccctctaaaatagctctaaacctaactaaatcattccaaacttcataagacacatatatatatatcatatatacaatagtccaatgtaataaaaattaaaaacaagcccttaaatagaaaattccattaaagctcgggctttcagctttaaaagctcaaactcgatttctaagtccaaactacctcaaattcaacaagtaaacatcgaaactagtcccttagctaaccaaaaataggttcatgaaattacaatccccataactactctaaatcacaaagtcaacatataaaacaaatatttttcaacttaaaacaaaactaaccactacaacaattttgatcatttgtggtgggctatctttgccgctaagaatggcagtattagctgcggactccaaatttcgccgctaatagtctatttttattttattttttaaaaaaattattagcggtggagttctatcgctaatagtcaattttttatttttttttaaaaaaaattattagtggcagacctggcgaaggtcccccgctattgtccgccgctaatagtctatttttttttttttaataaaaaataaggttcgctgctaatagtatatttttttttttgaaaaaaaatattagcggcggaggtccgtcgctaataagtgagcgaaaaaattcccgcccattcagttcaaacattttaaatacttattagctacgggacattagcggcggaccccaccactaataagtctataaataccctcaccgactcatttttcctatttttactctcgactcttcaaccctctttctcaaccattctccacctcctccactgagtaacaccaccaccactaccactaccgagttctccaccaccgagtaccaccacgcaccaacaagaatactacgcaccatcaagtatcaccactaccgagttcatgtaagtaattttttttttttaaaatttcaaatttatggttttttatattttaaaaattttaaggatatatattgtttttaggttttaaatctatttatatataatgtgtatttatatatatatatcttagttttgtgtatatatatatatattaatttgtgtatatttaagtatatttaaattaatttttgtgcagtatacatatattttattcttgatagttttttttttttttttgttttaactttagatctgttttcttttggctaccatctaagaactttaatcatgcaacgcttgaggcagaggatattgctaatatagccttgtttttggcgagtgaggaagggcggtacgtgagtggctaattgttatggtaaagcaaaataaaacagaggaactcaattttaatttgttattctatttctcacgtctcattttttttttaaaaaaattgaagcatgtttatgttatagtgtatttatcaaagaataattttttatcaataaaggcattataatttttttttttgtttgtgaaaattcatgtaacttagagtaaatattgtgatatattaaataataaaacataatattattaatgaaaatcaaaatttttaatgaatgctttctcttcccaaacatggctctgccacctaaggcaatgccgtcgacgacccaacccaagccacatgcgtcactacagatgctagccaacaactgtgatccaccacattgaatcttttcttttctttatttatttctttttttataaataaataatatatttatttatattagttttatttatatattattatttttatatatttattaatttattctttttttcattatttttaaaatgcattagcggttagtggcgggactggcggggtcccaccgctaatatcctgtgtcaatttcgatacaggacattagtagcaggatcccaccgctaataatattattagcggcagagccatattctgtcgctaataatattattagcagcggagccatattctgtcgctaataatattattagcgacgacgccatattatgtcgctaataatattattagcgactatttaatagcagtggacaattagaggggattactgccgctaatagcctatagtggtagaattagaatttattagcggcagagtggtccgccgctaaacaagataaatattataatgaaactctactttaagctttctctcttcaatagtttacgatccagctactactggggcttgaatcactaggtttcagattgaaaatcaaaaaaaataaatagaaggggatgagaattttgttgcaccgaagagcatgggttcgtttcatactattttcttaagttttttg

SEQ ID NO: 28915 - DNA, 2975 bp, Cannabis sativa
tataatagttagggtgttacataaagacttgtgtttttgctctcaatgaaagaataaaaatgttgacctcgcttctagccaacaacagtgagtaaaaaataaagatcaattaagataaatataagaaagcaaagacagtaaaataaagtgcacactagatttaaaagggattcgaccccgtaagtatagtagtagcctagtccccttgtatttgtattgacttgagagaaggaacgaagtgttcttcctctcaaaagctcttacaattgatctcagagtaacttttactcttagatcactattctctcttgagtgtatttctgaagcaattctttcgatcctcttcatagttagattaggccactatttataggaacttaatacacgaggaatagtttcccttttttcctataatgagtaaaataggaaactatattaattccataattacaatgcaataaataggaaactaaaatgtgttggctttattctctgtctaaatcctgtaattatagggattgtcttcgcgttagggaaacaacgagattgatctctggaattgccatctttcatgcttcgcttggcataaacatgtctggatcttgaacgaacaacttttcaaccatcgagtactatctgagtgttacagatgttaagtagtcatttatgggctgctagggatactttcttttgcccaattatcgaaaaggtgggacacatgtcatctatccttactgccacgttaagttgtaaaaaataggataacaaaaccttcttgcgaagaacgcaataactcataagaaaaaaatgagagaaaactaagtagctttattagtttgtgtatctattacaaaatgaatgattctatgtttacaattgagccttgaacttatttatacacttaggttgttagtagtaaattactgaatataactgtcaaacaaaggagagttaggacatttggaattcatagtacatacacatggacaagtactagaaggcacctaaactaacatgagtatagacagaatatatgttgtgtttctctctccatctgtgttgtgtctagttttattttggcctttacgagtactttttctaattttaccaacttcttatccaacttctagccactatttttaaaggatgatgtaatgtgtttgtttatgtggtttaattttctttacaactttgagttttttttgtgttgtttgatgcgactcaattgagcataaaacataaaataaaataacaataattttaactatttcataatcctcataattaacttcgttcagttgaacatgaatgtcgatctctagccaaatcattaatgtttccttgtatgtatcctatatgagatattatacataatgactaaatatatattttaatttcatgtataacactaaagaagacacaagtattatcggatcgtcaccatagtaaaatctacaaaaaaaaggataattaacagaattttaatgcattggcttgcctcaaagaatgatgtgatagtctttgaagataaaccataatgatgttatgtttagaacatgatgaaaagtcattcttatatcaatttgatttgtattcagtgtcacattattattatttcttcttttattttgtcacatgtttagtttggtgttgttgtgtctcaaattatgcaatcctatctttttgtaggtagataatattttgttttgttgaagagtttgtctatatgtttctactctttggtttctgtagtttattttactagcattgatttgtcacatatgattttgtttatgctttttagtattttagaacttttctattgttgtctttttgatagaatattctgttaaattcatatcgagttttttgcagctaccttgtggttatgataaattcaccttgggctattttgaaacttaaaagggaaggctttaatatgaatcatgatatcttatagcaacactcatatataattaactgacaaataattggtttgcaacatataagatcatggcagtatgagtagaattctagatgaaactgaaaattattcgattgtgagattaaagatttgaaagaattttttgctgaaaaataaacaagtacagaaagaaagaaataaaagcagaaggagaagtatagaaagtagagtttgtgtgataaatgatattgtactctttacgggatattttttgaaagaaaagaattttggatcttaatgtactaatacaccatttttcctcaaatacaatagtctcacttttcattttaattattcactggtttaattttattttgagattgctatggagagaagtgttgaagtttgaaaatagaagttcattgatagaaattcaagtctaattctctgttgattggactaaggcacctaagaagaaaaacggtgaaccagtaaactcttaagtggcagaagcttttctataactctgttctttcacaatttattcgtatttggtttaacatactcatttgtttgaatacactttattggttctttttccttttcctttttctaggatttggttgaagaatgtattaggaaagatcttgttataaatgtgcttggtcatgaaaaaaaataaggcttatcggaagagttactcagttacaccactaaaaattttcatactaattactcgattataaaatattttggcactacataaattttacccttatatatgtcttacattttttataatttttggttatcatgagactaaattaatgtagaattaatcatacttttcctgagatatttttgggttgtgattgtgtttctatgtaatctggttgaagcagtggatcattatgatagtatctgagtttttactttgattttaaatcggctatgtcactacttatagatgattgaattaattactaatttagttagtatcgttctttacgatgagatacgatgatagaatagagtggaagagtatggcagt

SEQ ID NO: 28916 - DNA, 1826 bp, Cannabis sativa
ttaaggcttaaaataatctactcagcctacctctaagtcgtgcaggcatactttggcttaacaaagtaaatccaaacccttacttgtcaaggccataagaagatagctaggacgatcatatgtctttcatagatggctttaaggctacagaatagtagtgttcaaaaacagagggcctataagcgaaagtaagaaaacacatgtgaaagccttgagaggccaaatatgagatcgatttgcatgcatgaggccatggccctgctagagccacatagacaaaaaagaactagacaaagctcctataggggccacgtaccaggctatagctaaggcagagttccttataggaaccaagtcatgttgagccttaagttgaacattcaactataatagactcaccattaagcttcatatagagtttctaaggaaaccacgtatgaggctacggttgtatatgcctacagagctaaactcttaccaaagtcacgagaggacacaaaactggctacccactttgaactaagcccatgccagccaaggttctcaagccttcaaagggtcgaccaagttctcatggctcagccaagaactggtcagggtcaccaaacccaggaatgagcaggcaagctttatagggtaaaaccctaaagttggcaaactcatatgattaagccttagggtcggccaggtctcaagtaagacctcctaggctagccaaggtatgttttgaatcccaatgtgtgtttttctttcaaaactcaaatatgtgcctcgtattctttatgacttaaagagtccagaatcataacgaaggccaaaatcaaatcttttctatcaaaaagtcacacattacacattccaaaattatcatgaggatcaatatacagaagagattacaaactaaaatgaatcaaaaagtttccaaaaagcttgaaacttgttaatggtaggtacaaagaagagatacccaagaagagaagatgagatgtatatagagagagaagatcaaagatccaaaagcatgctaggcaaaaagccaacacttggctagataaggctgctcaacagagactactacaaacaggatgatggctaaaaagtccctatctgacaagacgttcgaatagggacttgtgggcaaatgttatcccaaattttgtccacctaaagtggcatgtccacgtaagccaaagatagagcataggtgaagtacagccccgccaatagtagaatagagcctccatgcaagatatagaaaagctgtcaagaagcaaaagaagggagtgaagtgagccctcaaggagttgtaccaacatccttcgctggctatgaggagcatatgggccaggtaaggtcagcctgtaggttgtctagggttagcgtataggtcggccaggatctgtacacaaactgacaagccaggaaatgacttccggaccttaggagcctccgttggaccaagggaacctggccttttcaaggaaacaatgtacaaatttgtccccaacttgcaaaaggctcgcctccacactgaaagattggcctccacttggtggagctatagtgacatgctaagtactataggccttgtcttgccagatcctgtaggccttgtcctgccagatccgataggccttgtcttgcctagtcctggcaggaccatggcctgctaggattgacctagcatgaccatggccggcaagacttccttgtagctctatgggtggctaggattaatttgacaagactctgtgtacagcccaaaatgtggacacaaggcatgggctacgaattgggccctgaaaggccaacaaaatggctgaaca

SEQ ID NO: 28917 - DNA, 1621 bp, Cannabis sativa
attttattacgaactaatctaaaccattgattagatgatcagtgatatttcaaaatcaaaattcaagaacctatcgtgctccagacataatttcttctttaacctttctaataaaatcttcacatttcttgttaaactcatctgaaaatccatattcttcttcttcttcttcttcttcaatcttattcaactcttcttcttctccttcttcaatcgtgtttaattcctcatcttcttttacaatagtgcttacctccgtcgttgtaagctgttgattctgaatttcctctgtttctacgaccgctggtttccttgaatcaaagaaaactttgggttgtactggtgtgagtttttttacattaatcacgctcgacgaaacgacgtcgtccgaagatttagtagtagtagtaatagtagtactattcccgatgagaccagagttcttgacgattatgaccaagattccattaaatataaggaaaacgtaggttttatccaaaggaggggagcttgtgaaggaagaggatgaggactgtttggtaaatgtggaaaagttaatatgtgtgaaggaatttacaaggaaaggaatgaagagagaggagtaagagaacatgaaagatatggctgacaatgaaaataacaatttcatggctttcttggaactattgtttgagtagttttccttcccactatccattgtttgaacttgatttttgactaataagaaagaactatggtattttctcaggaaggaatatcgatggagatgtgagaaggagatgagtttggaaagcttataaaggttgaagcttacactgaatttacgatgttgaccctgcggttacagaatcagggattagttttaggggtagtttaggaagagaagactcaagtcaactggttcgtttcatagacatttcttgtgtctgtctacgaaccggtcttcaaacgacttttattatgtgaaaatgaagaaaaatgtaccttttcttttttttttttaaaaaaaaaaaaaaaacaagaaaataactatatattcatgatttgagctgtatctttctctaaccccacgaacactgcaacaaaagttgatattttttaatgctataaattaataaatcaaatattttttactgtataaacgttaatagtaggatttaatgagttcattcaatttgttttcttgcaggtcaccttttctaaaattgaaatatgatgcgccctttcctatacggtaaattattatggtgtgtaattgtgtattctttattattgggtgtttgacagaggtagtagctggctcaaccaataatttccttttggtatggtaaaatgaagaataattgaggatggctgatcttaatgatttggcttttaggataggcatggtgcatatatgtaattactgaaatgaaatcattatattttaggctatctttctctataattaagctattaaaactcattattttagcaaatattaaactgatcactattatttggttcttgctctttgcttttaaatatgttaattttttccagcaatattagaaatcagaagttgtcacacattcattcaatgctaaacatttagtatatcttaattaatttttatataatt

SEQ ID NO: 28918 - DNA, 1753 bp, Cannabis sativa
ctattatcaaaacaattttggtttcctataaaacataaataaataaatattagttataaaacaaatggagaaaaattcataaataaagatatcacttttgtctttattgtaggataattatttattttggacacttgcaaaaattataatccaattatctttataatatgacgacgtaaattataacatacctcgtgttaattttgagaaaattttgaaaaacttaattacattgcaagaatataggttcaaaatataatagttagttgcacacgtgcttatttttttttatatgtgtggaactgatctattttgaactttattttcgacattgaattatattattcaaaatttctcaaacattggtgggatgttataaccaaaatattcaaaatatgcaataatttcttcaagtactgctgaaaatagaaaacgctcctacaataaagacaaaagtgatcgatatcattagaagctcactataactatatatataacgtgaaattaaacaccttatttgtgaagaagattctctttttaggattgtcaaacttagaatgcacccaagaattacaggtaacattaactggaccatttggaaaaccctgaagaacaatattcttgatgtacatctctttgtgatgctcattctcaactagaaccgcgccaacggttccaaaatccacagaaacatctagatctgtttcgtattgaatcccttccttattccacaggctacttttatgtgcatatttgttaattgtcttcttttccaatccagtttcttaaccagacacaacaaataaagatgtattattcaggatatatattcatatatgtatatacaaagccgaccctgagacttgtggggtcttaggaaaaaaaaattattactaaatcttgatttaaaatatatgtgatatttttaaatctctaagctgagtgggccttagatgcagacatagttcgtcttagcccaagatcggctctctatatacatataacttttgtgctgagtagcttgaagattgaataattaatatgtttattaaagctgtatttagactttaatatatataattgacaattttatatatctagggcataggaccacgatccattgatcaaaaactttaagtttgctagatctattaatgagtgtgtgaaaggaccacttgtgaattgaacttatcaattaacatgaggtactacaaattaattttatataatatataattaattaatatatgccattgaatttttctttttaattagttaatcacgtacgtaccacacattttatttttctttttgagcatgatgtacttatcatgatcatatctacatatcacaccttactacactaattagatctatttggttatatactaacatattattattaaactaacttacatacatgaatttaaataatttattaattttttaaatattattttataatatatactacaaaacaacactttagtcacaaccttttagtcgcaacataaatattttgtgactttaattagtcacaataaaaaattactactaaaacatagtatttaaatatacaagtacttgtcactaatttagctttaatttgtcacaaaaaatattatgactaaaaacatatttagttacaataaattgtgatttttttgtggctaatgcttttagccataaactttaattttagtcaaaacataaagataataatttataattagtcataatatttttaatttta

SEQ ID NO: 28919 - DNA, 1368 bp, Cannabis sativa
tggatgtacctggaaaattgaacataatactagattctgtagtgtcaagaatcgtgtaattaaacgaactaatgaagataagatggctactagtggcgctgcctgagagaatgacgaccaagcttatcagtgatctcagctgcattcattgcatttggaagatcctgtttgttagcaaaaaaaaagaagaacagcatcgcgcagctcatcctgtagaatcagcaaagctttgcttgtaagttattcttcttttaaatgagcacttattttgtagagaaaacaatatgtaaatggaaattagcaaattgaagaacatgcagagagcagaaattgataatagcatacaataagtggacataaaatgatcatttctaaactgctgccaacaatataatgattttcagataactaaaacagaaagatagtcctttatacataagtagtcattcaacttggagttggtgggttctttattttcaaataaaaaaaacatacctaaccaatctaagactaacctgattggataaagaatagtaaattaatctaaataggaacaatgtatttcagttcttgaacaaatatagaaaatcaaaacaataatattaaatcaacaaaaattcttgaacaaaaaaaaaaaagaaaatccaaatattaatactcaataaaattcacctccatgactgcattaagaaagaagcttaaaattcctaaacccaacaccacccccaacttactacatgtgttttgtcactgcaatcaacaatctctgatggttttgtctcctactcacgcagtctgagtgtcactcttccattaattacactagtaaatttcactttttcttatttttttacttatgcaattaggctctctccaccatatttttataaacaataaactttgcaagcagtatttttgaattcatcagctagtatttttttttcctgaccaaaaaaaaaatagctagaggaaaacaaaaaagttgaaaagtaaaagaatttccttagcatcatccaataataaaaaaattgcaacaaaaataaacaaatctgactcaaaacaaagaattgccccattttcttttctaccaaaagaaggaagaagcccctacaatcaagatagtataaacaaaaaaagactcatcgagagcccataacttccccaatcgcaaaatcccctaatcaaacaacgattatcacacacaatcaacaattttccctctttccacatttttatatcaacataaaacctaaattcagcaattatactctaattacccaaattccttcaataaaaatatgaattcaatccaattcgattaacaaaaatgtaaaaaaaaatactttcttagtaaaatttgtggtttac

SEQ ID NO: 28920 - DNA, 1070 bp, Cannabis sativa
atatggtggggattggcctgcgcgtggctgcaggggtcggtggtctctttcgtcgtatcgatcaaacggttggtggtgggcttggttttcgtgaccactagggactactattgggaccactggccgggaagaatctttgtggtgaccgtgcctttgttgtttttgttgaggacgatgatacccttgtggttgtggggaagttgggtcacggtggtggtggtggtgatggcggcggcggcggcctggtggtgtggtggggtcatggtggtcatcatgatgagctggtggtggcccttgtccttggagttgtggttgtgtatgtctagcgaaatggggattggtttcgttatgtggcctcatggtatattatggtattatatgaatatagtaataataagaataatgatgatgatgaacaagtgtagtagtagtagtagtggtggaatgatgaagaagaaattaaaggattatgataaaaggaactgtggatgagaagattagaagggatcacttgaggagaacttcaaggatgatttatttaaaaggcaaagaatatcagaggatcggacatggctaagcaaaggaggcaagtaataatatatatttatatactagtcctaccttttcaatccaattatatatgtactcgtaacaaccagctacttagctagctatagactaaagacaatgatttcgaatcagatacttggtgagagagagcttaattatccttaataatgaattagagcctagtttcatttacaagattcaattatgtacatcaacattaaaatttgaatatgtagagtttaatataaaataattagattttatcagtgtttttttcctctcctcttttaaataaattaaagaatgttatgtagtttaacagtctcttaatgaattcattaactggaagagatttaatttgattggctctttcattagctctaatgaattttggttctcattctttctttaatccgaaaataagtatattcaaacttataattgctttcttcctataatattgatttgtaaagggtataaactagatttaattgtataca

SEQ ID NO: 28921 - DNA, 2655 bp, Cannabis sativa
  modified_base (1153)..(1153): a, c, t, g, unknown or other
tccttctaatatataacgctttatttcaaaaaaaaaaaggtaatagataagaagcttgaaaaataccatcgggagagaaatataagctaagcgccaactagtggacagctttgtttgcatatcgttcaacggaatgtaaagaaatattataaattatttaaaagactcttatagtcatgaaccaaaaactaaattctgggcatatgcaaattactctcaaaaacttggacataaaatcagatgtctgtttccagtagaacctgatctcattggtgtttatctatccaactcaatgcatcgcctttgatatcaatgattccagctccttcttccccacggtgaaagcttttaggacttagccaccattatcactgttaatttagaaacttttccttgtaacgtgaacatcaatttttgacatgtggcaagaaacataacatttcggagttgagtagtctccagtcatagtagtcgacctaggtagggtccttagccatgcgcccaaattgactctgggaactccgaaatgggtgttcaaatttcgataagttgtttccaactcactatattttagtatttagtaccataaaaatatgaagcaatcaagaccaggtcttaggagctaaaaatatacgaatcagcacctcaaaaatcaacttgggcacttaggatttcacccagcgcccaagttgacaactcctactagggtttcagtttttgagattgtcgtagtgcaaatgggtcaaactttgcactagaacgtgatctggatatataagaaaaaaaaaacatatttgatgcatcagagttagatttggagaactttcatttttgagcacccagtgcccagaagcatcaaatcgaaaatccgacatatgcatctttttcgtctttgtaaaatatggggattgaattatatattatattccatagaatagtatatatttatatacaaagttatgagactaaataagaaactactaaatacaatttacactgatttttacagctaatattctaatgctccccctcaagctagagcatagatgttaatcatgcccagcttgttcaaagataatcaacatgtaccatattcaaagcctttgtaaaaatatctcctaattgttctctggtcttcacatatcctgtgganatcaggccttgttgaattttctcacgaacaaaatgacaacaatctcaatattcttagttcgctcgtagaacacgagatttgaggcaatatgaagagcaacttaattatcacaccacaattttgctagaatagaagtcttaaaccaaaattcagtcaaaagctgataaattcatattatctcacacacagactatgccttagttctatattctgattcagcactagatctagatacaatattttgtttcttactcttctaagagatcaagtggattgtcgagcctacccaatctgcatcatagaagcgctcaaatattttgctctaatgttgcccaataataaattgttggagaagacataaactgactaacgacactaactaggagtgcaatatctagacgagtcacagttagataatttacctttccaaccgatttgtgaaattttttaggattttcaaatggttcctcatcacatgtaagatgcacaactcgattaattagagcattacaaggttttgctcctaattttcttgtttcagttaagaaatcaagtacatattttatttgagacagaaaaataccttgtttactttgagtaacttcaacactcaagaaatacttaagcacccctaaatttttcgtgtgaaactgggtatgaatgaaagacttaagggatgagatgtcttcattatcgcttctagtaataatgatgtcatcaacatatgccacttataaaataatacgagtaattgatcttttatatatagaacacaaaatgatttgacttactttttaacaaaccaaatttctcaacagtctgactaaatttaccaaaccaagcacaaggactttgtttcaatcccataaacatttacaaagaaaataaactcgccctaactccctttacgcaacaaacccatgaaggttctccatacacacttcttcctcaagatcaccatgaagaaaagtatttttagtatcaacctgatgcaaaggccaatgatgagtagctgccatggaaatgaacagtctagcatatgtgagtttagcaacaagagaaaaagtatcacaatagtccactctataggtttaagcataacccttagcaacaagacagatttttaagtgagcaattattccatcttgattgaatttaactataaacacccatttacaccttatggcccattatcctgaaggtaaactaaccaagtcccaagtaccatttacaattaaagtgttcatctcttctatcattgtaccaagccaaccaatatgagacactgcttcatgaaaagttttaggaatagtgaaagaatcaagagaagcaatcaaagagcaagaataaaaggagagatgattataagaaataaaagaataaatagtgatagtgtatacagtagaacctctattcaaaaatacacttgggaccaagtaaattatattctaattgggaggttataacttgatagagttacactagaaaaaaaaaaattaaaa

SEQ ID NO: 28922 - DNA, 1995 bp, Cannabis sativa
tctctctctctctctctctcggcatcaccctaggacaaaagaaccaaatttttcttcatccttttcttagcgattcagaggagttttggctaggaaattcataggatttagaagattatagctttaaataaacttgttcttctttttatctttgaattttcaagtttgaggataggtttgcatgcaagtttgaatttttattgctgtaagttttaagttgtgttgtggtttgattctgaggttgcttatgagttgtttaagctttttttaagctgattttgttgttgttgaggaagaccaaagtttgagatttcaagctcaagcttatgtctttaatggtgaatttgtatccaggggttttaactattgtttttggttggattatgcttattatgtcttgattaggtgttctggaagttttggcgcgttttaggatatatttgacttagaattcaaaatttggtcttttccaaaacgatgaactggtttttctggcagaaccccaaaaaatggcgaaccattttgggttttcgcttaattggattttttagattttagaccttagttttttgtgttttatcgatatttagggtatttctacgctatctatcgatagggaaacttaaagttttgactaaaatccctgaaaagttatttagcgtatcacttatcaattttacgtatgttgtgacttaagggcctataaattgttgagcagcagtttccaatcagattgaccagaacacctaaattcaaaatcaaggtaagactagtataataatttcatatgtgcttacatgtttagcatgcatgtttatgaatgtctaatagataacatatcattaaaggtggtattagtacatagagttgcactgaataccgagatggatatatgtttggcagagtataaattgatgctatcacattggtatgattagagtaccaaatataggttgatattatggtcaatcgtactattgtacgaacgtttcaaactcattatgcgtgggacgcgggataagattgtaattgggtgtatgggaacctaattataatcttgtttatatttatgttatggttatgcttttcttactgagttaatcgacttacagatattgcttatatttgtaggtaaaggcaagaaaaaggttgaacaatagtgagctcaagctaatgaatattgtacatattagggtggttagacttagagtgttcgatctttgggacatcaagcttattttgatagtcattgagtgataacttttgtaattataatatttggtaaaacatatgtaactttataactagatctcctaatatgtaaattataatatatatatatatatatatatttatgattaaagtttaattatgaaattttttattatttacgtttttcaatagatccctcatgtgatcatcactttttattgactttactagcatatcatcaacataaactttcatattttgcccaatctatttttcacacatcccattaactagtcgttaatatgttgccccatcattttttaaaccgaaaggcatgactttataacaataaaattccatattggttacaaaacttgtgtgttcttgatcaaggatatgcattttgatatggttatatccagaatatgcgtccataaatgtcattagatcgtgtcctgtagttccatccactaactggtcaatccttggtagtgggaaacaatcttttggacatgccttattcaagtctgaaaaatcaatgcaagttctccaggttgtgtttggtttcaatgacttgcaagggttgtgagtctaacttccgttagctagatgaagctataggaagttttctcgtggcgagatggttgtctcgtattattgtactccgagctggtttgacttttatacttagtctgcgtattcctgagccgaggtatgtgttattcttctcgcgtgcctcgttattcttttttagctacttatggtttctcgttaatactctaa

SEQ ID NO: 28923 - DNA, 2123 bp, Cannabis sativa
aaaatttagtctaacaactcttgttagtttttaaaaattattttttatttttaaaaactgaaaataatttttatattatgaagctaaaaagcttttaatttctttaacgttcgcattccatttgttagatttgtactagccagtagtaagatcgatacaagtcacttggtcatataacatatttgtcttcttattccatttctgaattgtatatattattactaataataaataaagacaccaatgcatgcatatgtttgtatttttgtcctcttattcttaataaaataaattaaattgagtactaatgcttgtattaatagcattgctcataaaattaatacttttttttctcttaatatgcatgattccattttaacatattttcttcttcgtttacaattatatataaactgaaaaaatttagcttttatatttggaaaaatttatgtttaggtggagatttagaaagaaacagaactcctctccttggatcctttttcataatatcataatattaaggccatatttacacaaatgaaaagaaatgtcatcacatagtaactccttttactttgacttaaaagtgactttaaattagtattggcctttttgctgaaagacaactgtatatatattatagcagaattcattatatatgactatatgtattggtttaggctggaaagaaagatagatggatctatcgttaaaaaggaattaatagaaaggaacgtacagaattgaccattaatatgacatatttatttataatttgtatgaagaaaaagaaaaagtaaaaaagaaattaggaaacacatgtgactaagatcgaaacaaatctgaaacagctttattttatttggcttctactctttaaatggattcatgtattgtcaactactgaaaaaacagccaaataaccaaacaacattattattattattaccatgtgtctttacgtacgttatgcctcctatcctatacacctctaccaattttttcttttcttttttccttttcattaaatatatgtgaaaatacagagctctaattactttattctcttaccagaaaagaattatgaccagcggtaaatgcattgtcttacaacaatttacacgtactctttttgttaggaaatcaaactagaaataattgctgcaaataatttaataaaaataaaaaagcaatttaatataaatatgatagttgatcaaatattagtgaactatgtatacttgtgtttgggagctctcaaatgtggaatgttaaggtaattaaagatcataccaaaatggcaaaagttgagacccctaatggcacgaccaaaaataatgatgaacaccttattattacagcatcattgaaaccattacatgtatgaatgatgtctttgaggacaaacctcaaagaggaatcaaaaggaacataattactaagcttaagcaccactctttggcaatcgaactcaatgttgatgttatcaaatcctagttgacgatattaattaattgagccagttgacgaaaataactctattttgattttagacttaaaacttccttgcatcttctagagctaatatgctctttgagtttttagggtctcaattttgcacaaatatactaataataattttaaaaagaaaaatgacatcattagatattagatttgatgataggccctaaattttagtgccaatccataaactaacaatataaactaaaaacttcaccttaaacataccctaaaacaatacttatattctatgattatgttaaagagtctcacattgttaatttataaaaatataacaccatgtataagatctataaactacacttatcatgtcaattgattttgagatggaacctcgtgcattttacaatacttttactggccttctgaattctcaccttctagtatcaatttagttttagtattgttttaatgtgtattttagaagtggtttataaatcttgataatcactaccaaatatttaaagatgaaataaacacgagaaaatcactatgaatgttgttagctcatgcaagtaagatgattattatattttaggtgatacttcacataattcaatttcgcttggagcaaaaacttt

SEQ ID NO: 28924 - DNA, 2460 bp, Cannabis sativa
tacatttaactatacaccaacttcaatttctcaaaaaaaaaaaaaaaaaaaactatacaccaacttctttatttttttcttcacataagaaaaataaaacacgtgtttatataatatataaaataataataaaaaaaattgagttatacaaaaccaataaaaacaattcaacccttacctcacccactcccacaacacacataacaatatctattttgagttttagacattgttgttgttgttgttgttgttgttgccccctttccaagttcaacgttgtttacaatgaaagctactttcaagggcaagtacgactctgacaaaaacgccggcgcctccgcatctttcgcctttcgagctggcgatgctaggctcagagcttccatgaccgaagccacactcgttggtggtccgagcttgaacggcttacttctttctatcgataagcctggttcttttattatcgattacaacgtccccaaaaaggtacctaccctctcttaatctcaactccttgtaattcgtttttccaagtaatggatttttgtctttttttcttctttttaattgacaatttccggatgggatttccatgccgtgtgcacagtgtttttttttttggctagttatataattctgttttggttccgaaaatgtggtgagaaatttttggaataggttaagccaagttagaatttgctttcgaggttttggctatattaggggttatttgttctttggttcagaatttgattgtgtcattctctgtggtgcaggattttcgatttcagttcatgaacacaattaaggttgcagagaaaccattgaatttgacttacattcatagcagaggtgacaataggactatattggatggaagtcttatctttgattcagctaataaggtttcggccaattacatgtttggtacgggaaattgcaagatgaagtacacttacattcatggtggggtgacatcatttgagccatcttatgatttgatcaagaatacttgggacttttctgtgtctcagaaggtttatggggatgatgtgtttcgggcttcgtaccagacaacgagcaagatgttggggttggagtggtcaaggacttcaaagataaatggatctttcaaggtttgtcttcgtattatgtttctatttcagtttttgttgcctgaatattggaacttgcttttcgtttggttaaaaaatatagttttatttggaaagagagaaaaagataaaatactcagaatttgtggcatagatatacagaataaatggatcttcaaggtttgtactttgcatatatatagtttctgcttctttttttgatgactgaatatttggaatgaaacaaaattttatttgggaaatctatagttattaattcaactgttagtaactcaactcctggtggtgctgggattggcacttgaccgtttggttatttttaaatttttcttgtacacctcggtcttgcatttagtaacctatttccttggcagagagtagaatattgctttatataccattcaggtactattttgtgaagaatttgctttttccactctcaaaaagtgtacactgaaaaaggatagtaaccctttacttggataggtatttagtgatatttacattcagtggagggcatgtactgcccataaggataaaaagatcaaaaagttgatatagctttgaaagtgaaacaccagtaggaaatgtgcatttcttttggttactcaatgaaggtttgcttgctggagtttgtttgaggaattataagtaattctgtatagaagatgagacgatgattaaccagatatggaataggcgttaaagtcagtggtactaagagcatctccaatgggaatgttttaaagaatgcttgatgacatggatttgtttttgacatcttttaataaatgtttattattggagtgaaaaagaatgccaaggaaaaatgcctaagaatgacatattttatatcttctctttattatgtcataaagtaaaataatttaggtatttcatatgtatgaaataataatataatattaataatttttagaggtacttactattgaaatattttagaacaaaaagtgtcaaaattgtgtggaagagaaataaaataaaatattatatatttaggtgatttggaagtttttgatctttagaatgctacccattggagatgttctgagagactaacagattttgttagtaattttgggccagtggtctagtcactagtggtattgagagattaatagattttgttagtaattttgggctagtggtctactcactcagtggtattgagagactttaacagattttgggctagtggtctagtcccaggaggtactgagggagtgttggggatgaggttggagatcaacaaataagataagtgacacaaaagaggttcgaagaagtttctcagtgcttgagg

SEQ ID NO: 28925 - DNA, 1973 bp, Cannabis sativa
ccatttcatacgcgaaaagataaaagcctctgcaattagactcattcctgtaaacactactctccaacttgcagatgctttcactaaacctcttccatccacaattctttcttctcatatccgcaagatgtctgtctatgacatatacaatccatcttgaggggagaatattagaattataacagaatcagcctactgacatcagctactgacagattgttagttataatttttttaccgttagttcaattagttaattctgttacattagctatcttttagctgtttcgtctaaaatcggttacttccctgtatatatattggtgttcttcattaattgtaaacaagtagattgtaacttcttcatttagtaaataaagcttttcattttctctctatttcgtgttacctatcatccaaccagatatgtgccattggtagagttagagaatagacagcttcgacaacgattggttgaatctaaccgtcgaaatgctgagttggaacgtgaagtcactgctgtcagggctacacaaggaacaattcctcaaaactaagtatatttggtttataatttatatatcctagcttccatgttttcaatcagttggatttataaattaatatgaatattcatattgtatatacaatgtgcacataaaacacatgtagaacattttaattcaatacaataaaattacggaatatatgcttatgcaaagcaaatttatatactattccatatgcgatatgcctatcaaaagaaaaccaaccgaataaataaacattcagctaaatattaaagttcacataaaaattggtctgactacaaattttgaagcgtactcttgtgaaaatgacaagagattttcacattactctgactttgttcaagaaactttcagtctcccgcgcaaatcacgtcagtgtgtcgatatagtaactaggcaaaggaccaaaacaatagaaaaattcagtgtgagataattcttctaatatataagtttctctttttctatgcaattggaataaagtaaaagataatgtaagtaaataatgttcaattatattacctttagttagttggtctgctctgttgtctgtgttcttggctcccaaggctcagataagaattttttatatgttgtagctctttgatcacatcttctactttcaatcttccatttggtgaatctgttgaacatgcaagtccaatctccaagactaaagtcaagcacttgaacagatttgggctctcaaaactaatattaacttctccttctgtgtaaatttcattagttcctctgttgttgtagttttgtcttgtcactgtggtttctacagcttctccacttagaagagcagagtccactacttgatcaactctttctggcaatgccatcttaacaaagttatggagattcagatcatccttgaatgattcatcagttgggctccttcctgtaaacatctccaacactaaaattccataactgtacatgtccccttgctttgatggctcaccgcccatggcatactctgcaactcataaaagcaatagattagaagtttttgtttttttaaacatgaaagataatgtatagagattatatatttgtgtatttccaacattggcaaatgtcaaaaaggataataaatcaatgaggtaattcatatgtcatacactaaatagataacaatacaacaaactttgtgtacattttaagttagtttgactctctaatactaatatcaactcactcatctatcttttcgcaaaaataaaactatgtaaagttcagttgttacctggagggacataaccaatggtgcctttcattccaattgtgctggtttgagtttcagacacttgattggtgttaaggatcagcttagctaatccaaaatcactaacatgagccaccatctcgttgtcaaggagaacattgcttggcttcaaatcacaatgaatg

SEQ ID NO: 28926 - DNA, 8970 bp, Cannabis sativa
tatttatgtgtggagacaattgtgttggtatttggtattttgataaagagatgttttaacgatgaagttcgtactgcaggaaaatgggatttgcccagaatatgaattggcatcggaaggtgtaaaccaagcacaaatggctggacaattgttccaaaaggtatacttgttggtactatgctcgagatttaattattataatgtccattttttttaatataataacatgtgttatatgctctatttatttaaaatattataacatataattcagttttgttagtttatgtcaacttcattggggttgaaattattaacaacattgtttagaagttacatttagatctacataaacttgttctgtctttggttaaagggtctctactctactgtcaatcaatgcaagtgtttgtgttttgatgttcttcttaagttaattagctagtggttagggaatgagaaaactgattatagaatttttttttttttttctttaatggtttttttggggagcaatgagtgtcacgggcgaaatttgccaaactaacaatatgaatttttttagtaaaataaataaccatattgaagttacaatgtgtgaccataatgatcgtataatataaatttatagtcacaaagttgttgttttatggtctgatagtataatttttgatggtttgttcaaccaaatatgattattttgctactaaaaattttcataataattatttttagtatcaggattcatatttttgatacttctgctgatggggttttataatctgttaggtagaatgaagtttaattcttttagtggacttttgctacatttgcaggaactgaaggaaaataacatcccactcgaaaacgttcgcatttgttactctccattttcaagaacaactcatactgctaagctagtagcatctgttcttggcattccattcgaaggcgaccaatgcaaggtaagccatttcaccccttttggaaaaagttagaattttactgataagaagcattactactagggtagaagttcaagaatatttattagtcatcttgataaaatcatcatagtcaataaactttattttgttggacaggttatagaagatcttagggagcgttactttggcccttcatttgaactaaagtcacatgacaaggtaatataaaagaaatctttaactctagttagttttcatttgaagttttcttaacagagatatgaagtcaaatcaagttttcaccattttcttttcatgtggtcttcttaatatcatttaacatttaatcttattataaacagtatgcagagatatgggctctcgatgagaatgacccattgaacaggccagaaggtggagaaagcgttgatgatgttgtggctagactcacaagggctcttgcaacaattgaggcacagtttcaggggtaaatcactcttcatgtttttgcatcttttaactgcataaacatgaagtcatcataccctttctgttggttttttcatcatgattattgtttgtagttgcaaagtcttagctttttccatcatattaacagatgatgaattttgcaggtgtacagtattggttgtgggccatggtgaccctcttcaaatccttcaaacaatacttaatgctgctaagcaacacacagaacccaactgtcatagcttggaatcaagaattcaagcagttagaacccctcctatcttgtcccagcacaggaaatttgcactgcaaactgcagagctcagggcagttatataatagaaaagacccctcaaaatctgaagtttgcaaattgttgttttctcttagtagattctctactgaaaatttcccagctttggtattgttgatcataggctactgtctaataatgcttaatgcagtgtctaattatgccaacatgacatgtcaattgctaactatataagataaccaagagtattataacgcttttaagcatgaaagatcatggggaagaacttgttcgacgtcttaattccaaaaatagttcattggcttatgtatgtcctttggaacgattaaatacaagtatttgaacattctcactcaagcacacaataagaattatatatttctataaacaagcccctaattcacagggaagttctgtacagaaaattttagaaacctacaaaaaaaatgtactgcatcatcatcattacagcagatgaattcagatcaagaaccacagcaccaaggtgaagccaactccggcattggtaaaaacatgctaagctgcttcttgcccatgagtagcaaatcactggaccatggccaaatgttaaaggcatgcccctggcatttgaatcctcattttctgattcaatgagttttccttccaattagtcttttgtgagccatcttcggcctctaatctgatacccaccgtagctttgatcactactgctctctcctccgctttctgcactggtgtatcctgattttttgcgatgcttctttcccctaacaaccccactatcgctaatgctcccattcaacaggggatcatctattccacgaatcaccctccgtgctggaggtgatgcaatgaaactgtcatcctttgttcttcttttttccttgtcatgtctcttaatgttttcagagatcttatgtaatttctggttgaactttgtgatacccttctcaactggctccactgcctgagttaccgtgaacttcacatcattcacaatctgtaacggagacaaacaggtaattcaacgttaaagtaaatggcaagacccaatcagacagttattttagctctcagaatcaagtacccggctatagtgaaccagaatgcccagcatgacaaaagaaacttgaagtttcacttttaatatacagttagcaatacagtaagaaacttacatattccccaccaccaataaaaacatcccgaacactttctctgatcgacataccactcttgccatgaatatcaggggaaggaagtcgaagctttgttgggcgttcactgtctctaacctcatcaggatctaaaggaccgtcaacagaagcgtagtctccaagaactgcaacacttccgggaaacctttctcccattacctcatatggttttgcaggaaacacataaaggtgaaccatagaagcaatgcacatctgcactagaggaacacatatatgttgagtaaaaccattttgtagaaaaggggatgcatcaaaaaaataaagggaaggagcggaatacattagatatagaaacaggaagcaattccctatttattgtaataaaggatatttctgacacaaagacaacacttacctctatacaaataatgaagtcttggacgcttgactttaattgtaagccttgagctatcggacttttgaacaaaccaagggcatagagaacagcgattgccacaccttgccaccaggtcaaaaacacaattgatttaaaagtcaaaaacttgtacagaggttttatgtgagataattcatcctttgtaacagtatagaattgaactaggcaatacaacgcccatgactgactaaaattcagaacaaccgcaatataaggatacctgcaaagtaaatagagagcaaaagccattagtttctgataacaagttagatgccatgacttctttttctgctagtttaactgtgcaactaacaagattgtacagacttctcccatgaaagaaaaatagaaattgcttatctttagttttttttttcccaatcacaatagtataaataggacaattccaaattgctgccaatgacaaataaaatacccgagatttttttaagcaaaacaaaatctactaaaaacatcagaaaaattagctcaccgaagtagaatttaacaaatccctgagattttctttatgttaaaatatcttacccacagcccaatttaaattctccttcacaatatacaccgaaggcttcaagaattacagctaaaacagcacttagagtcttgattaacatctgcaaaatgaaagaaaatataaaaatctacaattctgcatgaaggggggagttggaaaacacactaagaaaagtgataataattttcagagtgatagcaaacatacatactgaacaattccaaatttgataatctggtaaaaccattggccaagtttccatggttttagaaaatagttcattggaaaaggatgctttactgttcccttttccaaattgtgttctaatagaggagtcttagaacttgcacgcccttgtcgttccataaattctatagtcctctcctccccaccttaaaaacaaaagagggaaaaaaaatcaaaaagaaaggtttcatcataaatcttttctggctaaaagtggcagcaatccaagttaaacatccaaaataccattgacaaagaaacaacaataaaggataataaattttgaatgatgtccatgtaaagtcaccagtgcagcatcattacattgaaactagagactagagtataaaaggaaagttgctgtctttgtgcttctgaaaattaaaatcacttttatcttaaaccctgcaaacatatcaatagtaaatagaagatatgaaaatttctaatcactgtttgaacacataattgctttataactaccagttctggtatttcaaaaaattcaatgattcacctagtattgctttaaaaaaaaaaacaaaggattcagctagtattgccataataatctttaaatcatcccactgtggctcttgcttgagctgaaaaatccacccctcaaaaacccaaaacctaaaaagtattacttgcattctgcagaaaagaaatcacatttcaaaatataagtttttctatatcattaaaagatcatgatacgacatacctaagcacgcgacgagatatcttccaaagcaatacatggcaaatgattcgtaacaatctcgaagtattccacagtcaacaccaattgatggatgcaccaatgatacaaactgtcaattaagtgacattagaagaaagttaaaaacaacgacaacataaaatcaactatcaagaagctaggtggcatgtatagtctagtaatttcaaacaaaagcaaattaagaaactttgtgatatttaatacagaaaatgaacctaaatgaactgattatactgaaacatagtcatatgtagacacttcagaaaacatgtaacaaagtttacaaactaacaaccctttttacaaaccattttggtaaattataaaacattccattacctatctacaaagcagcataaaagtgagatagtaaatgagggaaagttatatacatacctatactagttaatccagaagggaaaaatacctataatatatatataaatgtatctatccatgacatatataaaagagtgaagaaaatgttttggttttgttacctattttgactatgtatgtactgttcattggttgatatttggttcttttgtctttgtgattttaattttatttaactttaatcttttcttgctttactttatttctttatatttctctctgttaagttgattcacgtcaatcttatggtttattatgtgcctatgagttatcaaaagtattatggcgcaaagttatcaaaagatgacatggggcagcttataatttccgggatacaaggaagggagaaaggctaacaaacaaaggccgttggaaaagcattgcatcattgtatgatatcttcttgaatctggttaatttcaaggttgggaatggtgttcgtatcgagttttggaggatgcatggtcaggggagtttgcactagagcaactataccctaacttagctcgagtttctgtgggtaagaacaaaagcacaaggcaattggtgaaggaccagggatgtctagttcaaatgcatggtggaatcttcaattcaagatgaatttaatggacagggaagtaaacagctttgtgtcactattgaatattttagagcaaaaaccaatttatgtattacttgaagattctagagtttggaaacaaaacacaagtggaattttctcttgtaggtctacttttagttgtttggtttccaactttgtatctaaggaagactaatgaccccaagaagtgtggaaaagttgcttaccatccaaaataaaagtttctggttggctaatattgattgataaggttccatgagacattacaaaatggaagaccctatcagttagtatctccgacttggtgtgtatgttgctgaaagaatggagaatcttctccccatttgttcttggagtgttcttttagtaacatcctgtaggcaaggatagatggctgagtgagtttgggattgaatggtgtatgacccaaacatgcagccaattgattatgtgtaaattggaaggagattgaagaaccacaaagttgtggacaacatcaatcttggcggtattttgaggtgtttggttggaatgaaatgagaggatctttgaaggaattgaaaatggggctgaatggggaatgattaaattctagattgctataatgctacatggttattaagtcaaaagggttcgaggggacaccttttcaagatttgatcagagaatggagtcttatcttacatttgaaatcatagacagtagaaattttgattcatgtttgtgtttatttattttttttagtcttatttatgctttctggttgaatgatataacatagtttgtaaccacggtttttctccaccatatgtgaggctcccaaataaagtttgggaggaggtcagtctatgataggttaactttgtctctatctttaaaaaaaaaaggcctagatcactctcattagatattctatttaatagagattctttaaaatatttaaaaaaccaactaagacgcactacatcagatgctttaaattaaactctttcattttgaaacttctttaaaatttactgttcatactttacatttatagaatactattcattacgctaaatatattttattaattgttttagctttaaacatttatttttttatgtgatgtgtatacattaatattatatatttgaaatgaataatatatatataaatttgaaaaaaacagaattttggtgatatattttgaaagatagattcaatgggggtgtgtgagttcgtagcaaaaacaatgtctttaaaatgaggaaaagctaagtaatacagtcaaatgtttatccagggtacaaaaaagaaatagtaaccttgtcaaataaattcagctacttgagaattataaaaaatttctatatgaggatttaaaatattatactaatgcagtgcaatggaggtctgtacggaacttacagattctactgaatagcagggaaccatgagtatgacagcaattaagaatttttgttcctgagtgttgaggaaaatatcaaacaagataatcagtgcttacgcaagaaaagaacagaaaaagggaaactaagcagctgtttatcgaggatgtgtgtatatctacctcaggattcttgtacgcagaaaggtgctcaaataaaaggtaaagtgaaagagtaagagtgacaagaacaaagccacctgcaactaaacttgcccatgtaggaggtgagtaccccaactcaataaaaagatttaatccagctgtgatcctcatcagctaactaaacttcacaccgtccaatatttacatgaaatgctagcataactaataactcctcgatgaaaagcactggctagaaagtcaagatggagcaaaaacaatatgaacctgcttacatgatgagaagttatcaataatcatcccatctaatatatcacctttggaaatagcataatcctatcacacagcagtgagcacacatatacacttcagtgaaaatgcaacaaacaaagcttaagaatttggttaaaaaataagcaatccatactattcaaaatcttagcccacaaagagtgtccaagggcggagctatggagggtgcatggattttgtctaaattgttttaacatacagacaaggatgggtgtctatatatttatatgatatatatattcctaaacaagaaacgcaagataattcataatgttagaggcaaacatatacctcttttcaacagccaaagaattgtgatttaataaaatatttgagaacaaatagattatcttatcattaatgacctctatcaagaattgactacattctcctataggtaacgatttcattttcacttacaaggatctaaagttcagtaatatcattttctgatcaacatataagaaatgaagaacaaagagtaagatacctgaaagcgatgaaccggcgagttgggttgggcagaagagccaactagagcagcgtcagagagagaatttagggtttgcgtgtgaatttgagaaagaaacaagaggcgatgatggagctggagagcaggagaagacgataaatggagaaaaaagagactaataattcatatcatcatatttggggttttttcagaactattattgttttggtcctctatcaattttctttttgcaatttggtctttgtgatattgttttgtttttagccttccacatatttgtgtcattttttccacaagtatccatttgctattatttcgtaaatatcataacaaaatcttaccacgagttgacttttgagttttgagttttgagtagagaaatttgattttcatagttacatatacttaatattttatccctaaactaatacatatcactattaaaaatatatgactactttatctaaatccaaaaatatctctctcataactcaactctatctctctcgcatttcagcacatgcatcaaaccccatcagacccgtcgaacccacaaattttttccaaacacgcacatgcatcagaccccccatcgggtccccatcggacccgtcgaacccaaacaaaatttttttcccagcacgcaagtatcggacccccccatcggggtgcc

SEQ ID NO: 28927 - DNA, 2319 bp, Cannabis sativa
atttttatttcttcccataatacatggcaaacccaagtaaaaactattatccaaagcctcaaccatccctaacatcttacacattctttgcctagtatcgacactagtattattactgaaaaagatggaagacttagcataattcacctgctgaccagaagctcgttgatacacttgtaggagttgtaacaatattgcagcttcatcctcattagttttacagtacacatagctatcgtcagcaaatagcatatgagaaacacgaggagctcctctagcaacttggcagccagtcaaccaacgattacgttcatattattgcaatagagaagaaagtccctcagcacacaccaaaaataggtagggggatagtggatctccttgcctaacacctctcccaggataaataggtcccataatcttccctccctacgtaacattataagtaaccgttgacacacaacacataataagggagactattttgcggcaaaaacccattctaatcatcatagcttccaagaaagcccaaccaacacaatcataagccttgctcatgtcgagtttgagtgccataaaaccatccttacccacccttttccttttcaagtaatgcataatctcaaaagataccattatattatcagagttcaatcggccaggaagaaaagcactttgagtggatgatataacatcaggcaaaacaagtttcaatctattagcaagcacctttgagataattttataaatcacattacacaaggaaatcggccggagatcaatcattagctcgagaacctttttctttgggatcaagacaatatttgtattattaagatcacgagggagagtcccattattgaaaaaagatcttaccaagttaacaatatcatctcccacaatatgccaaaatttctaaacccggagtcataccatcggggcctggggacttatgaggatgcatttggaatagagcttttttaatctcctcagcagtaacactttccatcaacaaaacattctgctcctcagtaattctcggttgtaggcagtgaagcacatcaccaaattcaacatcttcataaccaaaaacttgctgaaaataatcagtcaccacagttggtaaatcgtcttcccaactaacccctatccatcattatttttcagcttctgtataagattatttcgacgtctcgaggttgctttggcatgtaaaaatttggagttttgatccccttctcttagaagctctctctttcccttttagttgtagaaagaaccaaaaaacccaatagattctttcccttttctatgtgatttttaccaaggaatcaacgggaaattgctggtgcaatcctaaggtaaggcttagtgcttttttcttaagttttcaaatcctttttactaggttcaagcatgcaaatattggattgaggttctgtccaaaccatttgagtttgtgattagttttctggcttaattttaagtggattgtagtttatttgagttaattttgttggtttgttgagttgttgagcaagtttgagttcaaaaactcaaacttggctcaacaaaggtgaattttacattttggggttattttttattttatttattggattatgtttattggatatcttttaggtattctagaaagttttaaaagatttgtagttgtttggagactttatgttaatctacagtagaaaatggcagaccattcctatgtaaatggtctaccgttattactggcagaaacctagaaaaatggtctaccatttttccaaaacggtcagccattttcattgataatttttccaaagtctcgttattttgtattttctcgatatttaggttattgctatgctatttatcgatatgaaaacttttagttttgagttctggtccctgaaaagattttagcaagttgtttatctaatttatgtgattgtgacatatgacctctgttcaacgcatgaatttttgtttaggttgaccaacacacttgagtaaggaaataaggtaagactaacataagatatgtatatgtgtataaatgtaaactgcatgatacattatgtgatttgtatactaccaacactagtacaatgatgttatagagtgcattggtacaatattctatgttcaaagggtgagacgtagagttaccaacactaatataggatgagtatgtagtgcttgtggtacaacactcagtggtatccaaagtgcagtttagccctaccaacactagtacgggacgagtacttagtgttggaaatattttaccaggatctatatttactacgatgtatgttt

SEQ ID NO: 28928 - DNA, 1844 bp, Cannabis sativa
ttaagaagctcgaatatacagacatcacccacttccaaatcgttttctgtcatgaattcattccaaccatcatagattacagctgcagattttccagttgcatagctcgtcctcctcttgaattgagcaggccattgtccaccatttggaattgcaagagccatatcaccatctttcgtaatgtattggtcagctatttctaatggcacacgctgccaagaaaagataagaaagaggattatttgatgcaatgtcaaatgattatatgtttcttcttaattagaatacctggcccgtcattgagctcatagaaattcttaccatataccacttatttgatggttgtataacagccttgaagaaaggattttcattttcaatagcatctttttcaatacttttaactctctcaacgaaagtcgaaggaagttgcttcctaaattcttgcttttcagaagaactatctttttcaatacttttaactctctcattgaaagtcgaaggaagttgcttcccaaattcttgtttttcagaagaactattgggaaaaccaggtgttccaacttcattatcagctgaaaatgagcacaagaaaagtgtacgaaatgaattttaatattgcaggtaaatagaatagaagacaaaagaaaagtgatcataacttacttgtgcctacagaatctttcgagctttcttcagcgcgaaaaattacaacttcaaatgaaatatcgtctgtggccttaagcaaaacaaatacacacacatcacctactttcaaattattgtccacgacaaatgatcgccaaccaccttggaacctgggtgccgcactcttatgttctctatatgcgtacttaacatgccaagttttgtttttattttgaactttgagggttacatcacaaaatctgttattatttagatatatctgtgcaaataagtgtggaaagttctgcaacaaagcaatatgcaataaggaaactaacgagatatgagagcacattctaaaaagagacaaaacagaaaagtaaacaacttgttctaaggaagcatatctgttaagtctaatatttgactaacttttacaactcttcctcattaagatttatcaaatattgttttgatgtggcactctagcattttttacaaaggaagcttaccaaatttttaccaagaatatagtacggttgcatgaccatcttgaaaaatgggtgttcagatgtaaaagcattagtcctctgaagagcaatcgctctttcaatggtattcaatgttttcatagttttaggaatcccatatttcatcttttttggggtggtagtggcgaattcatctccgctacttttagaaggcgaatcaagttttcctgcattaaatgaatcaaacatatcataattaaatctcaataaattataataggagttagttcacaagctttccagtctggtttagaattctttgagctcctccattggatcatttaattcgcaactacttttgcactataatgagtctacaactttcaaacaagatagtttgcttgagttttacctggagaattttttttcactctcttagaaggtggagaacatgaagattttactcctgtttcggggcaagaagagatatcatccaagatttcaaacctgtcatcatcatcatcaataacttccctcttgggaactctgagttcgctgttgtctatgttagacttaccaaaattaacaggggcagggggataatctatctctacattatttgtaccaaatatgacaacataaatctcagaattcccatcatatctgaaagttagcatataacctctttctatggaataatgcttc

SEQ ID NO: 28929 - DNA, 3460 bp, Cannabis sativa
  modified_base (2244)..(2247): a, c, t, g, unknown or other
aaagagattgcttttttcgcagttaacaactcaaccaaaacaactccaaaactataaacatcacttttttcagttaactggttggtgtgcaggtactctggatctaagtatcctagagtaccctgaaccatagtagccaattccaattggtcttgaggaaccaacttggaggctccaaaatcagacactttcgcagtgaaattgtctagaagtatgtttgaaggcttcacatctctatgaataatcggtgttgaggccgccgagtgaagataagctaaagcttcagctgtttcggctactattcccagacgagtttcccaactcaacttagtgtatttttctctattatgtatgtgttcagagagagtcccattaggaacaaattcatagacaagtaaaggaacttgtgtctctaaacaacaacccaacaatttgacaacatttttgtggttgatttgggataaaacaacaacttcattgataaattgttctgtttggttttggtcaacaatctttgacttttttatagctactattttattatctggtaaaaaccctttatagacagtaccaaaaccacctctaccaatgattgtgctatcatcataattatttgtagctttgattaactcttcttctgtgaagattttagctgaagatgatgatgatgagttattttctagtgtagagagtttctgctttagaattaaaccaccattttgtttgaaaaacttctctttgagttgcattagctttctttgttttaaaactaagtagagccaagaagtgcttataaacaaggcaataaatccaattgctacacctatatagatcataaaagtaataaaatcatttagtaattgttctaataattatatgtatattaatttatttaaaataataattatgattaatgacttaccaatggaaattttaatgagtgtgaattggctttgtcttttttccttgcaaatatagcttcctggtatattcacacagtactgagttttggtacaattaattggtcctgaactcaggcattcatttatttctgcaaaatcatttcaaacaaaattaatataacataatattgttgaaaagaagaaatatttcaaaaagttttaagtaattcaaaataatttcacctaaatacccctttagtttttttttcctctcttttttttttttgaaataaaaggagtttcatttaacaaaaaaaacaacagtcaatacaatcaaacaaagattagcccaaacaactagagatcactatgcaaacttaactcattcacacttctaaaacgatgcatagaaataaagtagtagaatctttctaaactatggcatttatttttggttgacattttcttaaagatacatatatttgtatattgtaaaattattatttaactttttggcgaaaaaacaaaaaaaaaaataaatactaatgagttaaaattatgtaatttgtgagatttatattacacttaaaagaacttgtgtgtagttgtctcatattgctagtatatgagtaatttgtgagatttattttaccactcaaatcagatgttgtacaatagataaattttgcaatgtttaaataaccgaactaaaaacacactacattaaatgctgtttaaattcaatttttattttaaagtttttttaaaatttactatactattcattggtgtaatcatattttaatcgttgttttatgtttgaataattctttttataagaggatatatgaatatattaatattatatattaaaataaataaaatatattaaaatttgaaaaaaaaaaataacatttttgtaatgtataaaattgaagtatgatatatgatataatgtaaaaattttatataaattacggaaagtgaaattcgttaatgtactttaaaaataaagtagaggagttaatgagagtgctctaataactatcaaactatatttttttaagatttttagatcttttaatttcgttattcacaatttagccaagtgaatttttaattttacgacaatttgaaaacaacattaaaaccctctacttcttttagagaattttctaatgagcattgctattaggcaccagtggtgcttagcacatttgcgacatgtcgcgttgcgattggctagcgatactccttaaaaactattatattaaattatatgggacccgatacttagttgtactaatagcgatattgacagaaggtgctaggcaccactggnnnnctttagcatttctcttttctaattgttcccgaacaactagaaagagattatttaatcaattcaattcagatgttactttttttttagtatatttactttttttttttcaagaaaaagtgtattacttaaatttcctctaattattttcgtaatatattcatattaacgcttcttcccccacccaaaaaaaaaaaatgcttattaaatctataaaaaaaaaaaaacaaaggttcaaaaatggtgtgtacctttgcaaccagtaggaagataaggattaccctggtaaccctctttacacatacacctgtactcactcccatcatcaccttcaccaaactcaaccacactattctctccctcacaaccacaaaacgaaccgttttgacacttaactctccaatcagccacaaccggcaaaaccctcttcgaaaaatcctccaaaaactccccagaaaattcaaacccattcctctccacaacaaaagcataagtacaaggattaaaccccacaacccttctgtgttcatcaaagctacgaggatttatactcagatttctcagtctccgcttaggcaaatccatctcacaacacccgattcccgtacaacccccgtctcgatacgccacgtcacgccgatcgttgcagatcgacatacatcccatcgagtaattcgtggttcgattctcgaatccattgagaaaagcgtaggaatcgcaacccaggactacgaacttgttcttggcgctcgaaacggttagggtcgccgcgttgagagtgggtcggttttttcgtacccgatgacccgacccgttgtaacagtctcgggctacgaaccagttaacggttatttcgtggaggtgtacggagatgttggttacggttaggtttttgccgaagatgagagtagaggaattgcagttgaggaggaagtttttgttgagggaacagttttgtgtcagaccaaatgggtaggggatgtccacgtgtccgcatctggttgggcaaccgggtaaagttattttttgatgatgatcatctgcagccgttgatttggtgatgatgaatattgttaataaagctagtgattgtaataaggaggagtgcctagtaatagtagaatcctccattgttgttatgttgttctgtgttttgtttatacaaatatttatattgatatgacttgaatatattattatgactagaatatattta

SEQ ID NO: 28930 - DNA, 4508 bp, Cannabis sativa
  modified_base (4076)..(4077): a, c, t, g, unknown or other
ttctcatacaatggtcctatttggatataaactgttctgatggcaactttggaactaaagtaaccggtacttgaggtgaaggcataaaaggagatccatgttgcctcaacctcttaacctcctcctctaatcgttgaatcctaacttccatcttcacaaacctttgctccaaatctagcagaccctgtggtggattttcataatcacatccataagtcctttctcggcatgtaactcatccttgggaactagggggatcccattctttccaactgccaccagtttcaaccacatcatctcaactttttatgtttttccaggcatccatctaaaggacaagcctgcaaattcataagtcggcttggtcatgcaacgatcaaaattgtaatctacttaccacttacatgggaactcaatatgctcctattcaactatcaatgtactaacatgcttttctaatcatacataacaattaaaactactaaacacatagaagattatcgaactgtgagtcaagcttatctttgatgataattgtacatatcttgacgatctttggagaacaacctggcgactttgatactaaattgtaatatcctactagctaggcacgctatagtattttcttaattgttgtgcacttcctttcctaatcaaagagtttattaaaaaacgcaaataattaaaaaaattcacaattaaattttagtcctaaatatataataatttatataatttggaatcccattataaaaattacataagtttacaaaatacttgtattacaaaagtcatcgtatagcgactatcaaaagtgagcctaaactgtcgcgaagaccttgaacactccgggtgaaattgtcttgatatgtacaatctttacccttagctttagacttgtcccgatttagctctagctcttacctgcacatacacgtaataactgtgagtcgatagactcagtaagaaaagtataatcataaacataaacatatatacagaccgtaaccaggtgcctattaaacctaatcacgatttgataactgggtcgggaacgttctcgacaaaagtatgactaatcacgaatctagcctatactcagtactgtagtagtattgatgtggtagcaattagttcatactatttggaagcctatcatatatctgttgatatctcagtgcaactctatgtacacttcacaaatatcctgatatgctaatctcatggctactgatttgcctaacatatatttgttggcatcttgatgcaactctatgtatacctcagtgataccctgatatgttatttagatggcaactatcatgcacacttaacatgcatatatatatataactattatactaatcttactttgattctaaatgcaagtatgccgataattctatgtgaaagcagctgctcgacgatttacaggtccctaagtcacagcacacgtaaaattgataagtgatacgctaaattactttttggggacttaaaacttaaaatgaaaagttttgctattgatagatagcgtaaaaataccttaaattttgataaaatataaaaaactaagccccaaaatctaaaaaatccagtgaagcaaaactccaaacgatctaccatttttttggattctgctagaaaaattggttcaccgtttttggggaaatggtgaaccattttcccctacaaaaaactcccaacatcaaaaacctattcaaaacttcctcaaatccaaccaaactttccaaaacacttaaataaggcataaaggacaaagcaaccaaaagtagcatcatcaaagctcaaaaattgagttttgccattgatgagctaagtttgagctcaacttagctaacctacacaaaaactcacaaaaagaaatcaaactagcaccaataagcacaaaatcaactctgaaaataaacctcaagcaactcaaacataaacaaaaccataaataaaattttacttcacaacctagctcaaaacatagaaaacaaaggcatagaggaactagggctcttacctttgaattcacccaagaaaattccttcaaatcttgctgtaatcatcaagaacaaaagttaaatggttgagtcctccttagttttctagagagaccgagaaagagaaaaagataagggtaaggtttttttttttctttatttactttttaaataaaaagatataatctaaatatcttgtcttattctccaaaaatattcaacataactaattaaggaattactagaattcagtaaaaacaatagttgaaaccttagggcgaaatgacaattttgcctttacttagctataaagaaacttaaatagcctaggggaaaatggtctaaaactataattccgaataatctcaacattcacaatgtctaactatctcgtcctgctcattccaaaatataacaccgtatctaaacgactctaatgaccaaattattatattctactattatcgggcataaaacatgcaatcataaaaattcacatataacatataaaatatattgaacattcaaatatatctccgtaattgagaaattattttcatatggcctatttctgacaataagccctattttctactaagaggtacataaccataaattaataattatattcttaattatttgttaattcctatgatttaaccacgcggtcattacaaagcatgtgtcaaccattgatcaaatatttaatggcttgacttaaggccatctctagcagcaggttcaatcaattcagagacaaacttaaataaaaaaatttaaatctaataatctcaatagttttaggagaatgatttgatacatattaaatttgagaataaaaataataattagcatatttttaataagatctaggctatgtattaatttaaattgtacaattcaagaataccattgatcgagggttagttcaaactatatgattaggctagggagatttgagtcgttaatgaaatgccttattatggtaaccttataatggagtataactttgttgaaaataatcacaataataataggaaaatttgactttcgatgcacaaattggattaaaattatttttctaaatttaatttaacccatgtcggtagaatagactaatatttcataaaattcaattctattcctcccatttcaaatacctgaccttctctcttcctgccttctctctctctctcactgaactcaccctaaggacttaacctatgacccaccacccacaacctcgatcccttctctccacgaccaccacgagcacatacccaacaaccaacgggcccaatgaccatcgcagacccaacgacccacatacccaatgacttctccatcaaccaacacttctccatcatcaatgttgtcaaaggaataaattgtatgactaatatatattatctgtgagttgatgttagagttagggtcaaaatagtcgaatttgagttttagagagaaaactaatttttttgccaggcccgatggtggtctgatggtggcctgataccttcatgttgttaaaataagtaaaagttgaagactaaggtctgatggtggtctgatgctacctataaatataggatatggtccgatgatagtccaatggtagtctgatggtggctggatgtcttcctgacgagcttaatgaattgagcttaacatttataaatatagaatatagtttgatggtagcctgatggtactattttttatgtacaaaaacataaaagaagagggatagtatcgagccaccattgaaccaccattagatccttatcggactaccatcggtatggatgagaaagaggagtatggattgtgaagttagaagagaaaaaaagagagaagagtattatatattattataaaatatgcccatttttttattttggtaaacttgtattaaaaaatttaatatacactaaatgtatgcatataaatttaaatttttatatattttcaatgtgcatgataatgatcattatttaaggaggaaattacattaactatgagactttaaaagttcttatgttaaatatgatacttttaagtttnnccaatttatatggtattttttttaggtctttctatggtatttgatatgccatatatatatgtaaattaggtttttaaattccatatttaatgtttttatttgttactggtgccgaaaaaggtaccggagtttactgccgatgatagaaaaatcactatagtagcagtcgctgccagaaaagtcgtcggaattgttgtcgacgctggaaaatttgtcgaaattggcattgtctccgaaaaaatcactgaaaaaattactaagaaactgggttcttgatgaagaaactactttcttggtgattttttttgtgacgatgccaattctgataacttttcagacactggcagctactccgacgacttttccagcaccgacaacaaactttggaaaagtcatcaaaattggcatatagtcgccgaaaaaattaccaa

SEQ ID NO: 28931 - DNA, 4225 bp, Cannabis sativa
gcaattgtacaaagagtcaaaagtgtaaaacatagaatagaattgtgttggcctcaaaagattgatctccatgatagagattggtttcattctttgtaaaaaaaaaaagaaaggaaagagaggaaagtgtggtgtttgtgatgtttgtgatgtttgtatatgaggtctttgacttaaagatactcatcttgtaaatgattgtacaaaagatttgtttgtggattattaatacaactacttgttgatttatcaaaaaaaaaaatcttctcttctacttgacaggatggaagtctggatcaatatttagggtgtgagacatgacagtgtggtcaataccaaccatatcctcatgtgaccaggaaaaacatcaaggttttctcttagaaattttattaaggctaattttattttgagcagcaaacctttaccgattttgagcttcctaaccaggatggctggattgacgtccacttcttctaactcttctataggcccaacatttgcatttggtttgctatgttggggatccatgtcttcgtccctaccttgagcaaattcctattgggcaatgcccttccctttctctgaactctggccggaagtattttcctttttgatcgtagatagagcaaggttgtagtattcctgtgcaatcctttaatttccctttagacagcatactccacttttagttgggaacttaacacacaggtggtacaccgatgtgaaaacttttaagtcatatagggcttatcagtctaacattattttaaaatctgaagggacattgatcacgaagaactatgccattatagttatgctctttggagcttgcccaactgtgagtggtaggagaatttatccaagtggcgctaccctctggccagagaacccatagactacctgagtgcaaggaatcaaatctttaagttggagccccatcttttcatatgttgtcttaaacaggatatttgaggaagctctattgtctattatagtccatgccaccattttatgtgcaatctacacctcaacaaccaaagggtcattgtgttggaaaatgacgtggatggcatctacttcggagaatgttattattggttttccaacacgtggtattttaggttttctttcctctacggctaggattgcatcattttgttcatactgcaagtcttgggcgtacttttctctagctttgctcgaatctccagccaggtgtggaactccaatgataacctgaagatgcctatctactggtggaggcatcaacatgttctggtcattatttgtttgggcagccctttggtcttgattgtccttgacatacttttacaagtgcgggttatttttcctaattaggaacttaatctctgactttaaattgttacatcattcatttgtgtaatgtcgtcgtagtctgcatgaaaatggcagaacttacttgtatctcttttgctcatgtcttttttcatgggagatgttttttgtacgacacctagactgggtagttgcatagattgccatctgttaggactgagaaagcagtaaattttgaggcactctctctgggatttcgtttgaagttgccattaaactttcttttctttccattggcctatctgttgtcgttgttagacctcttttcatttagattcaaactgctggggtgctatgaattctaggcggatgcactgactgtagtggtgtgctattgatttttgttttgtcccactgtatccacacgttgtactaccgctttgagctttatgaatccatttgctcaatccaaaaattcatccatcgatcccacaattaatcttttgatatccttttgctgaactagcctaaaggaagggggttgatcctcaattcgagtctcatgtctcacatttttaattcatttcaattgggaaagtgttcagtgagccgatctagacctaattgatctagtttctgagagcactaacaaggctaaactcaccagttgaagagagcattgaatcatccgaaaggagtaatctttttttagttccatttggaattgattaagagaggtctgtgagctcgagctggaagagggcatccgttcgcttctagagtttaggactgagtcttgatctcttcattttttgttcctgctgccccggtgaaagatcgaataaatgggcaatatcaggctgatgtatcagcttccttgattgaggttgctttaaacaatggctttgattctgttcattaaccaaaaagggcatcatttcccatgaatttaaggggcaagatggaattaggtttttccttttcactgaagaatagcgagatgcaagctgccattttttccttaattgaataggaagacgtaccataccataaataaaatagtcaaggaaggtggggtcaaagctcacgtgctcgaatctcatcagttcatcgatggtctgcaagtatgatggtactaatgatgctcctccacttcctgtctatctactttaccttgggaattgcagggggctgtattaactgcatcttttggcgtaactgcttattccttacctcggggttattgggcagtcttgtaagaggtgtgtcggaagctacaacctgtagctataatagagttcccccagagattcaatgcccccagtatggttgctaatcttctctcctcagttagcaccttaacttttgttgcttcagtcacgaacttgctgatattggctctcagaggttctcctagaattttgtttcacttctacaaagtcttctaggtgtgaagagaactactgagaggaggaaaactatgcattgaattcaaatgagaaagaaatccatgaattaaactttcctgaaggaaattggaaataccattgttaggtgggctctgctagtgtggccaaaattttttttcaccgtacattacttcttaccccctgcaaatccattttcatcttaaattatttcaaatgagataaaggatcttcttttccgtgtacatcttccatactagcatttaaactttagggtagatcaagagcatcaattttaggtgaaaagggtgatcctcttgcccggtcgagtttgaggtcaatgagtttggggtcagtcaaaccttgtaccatgttttaagttgatctatttatgcttgcacaagtggatgaacttggacagcctgctgatcgacgtgtgtcacattgagatctctttgaactggatcttggacataataatttggctagatggttagtggaattttttgcccgtctagtccccttctacaatttagatcgtttctaaggtcatgcacggtgcctagctaatcaaacatcgatgcacaagtggtcttggtgtttgacctacttggttgagtacctcttcctagggggtagtctcgtaggatctagctatccaccatttggcccacaaattggaattgtggccttagattggatggctggccattatgagtctgtgtgtatgattagctatatacccttctgagccgcttagggggatactagaatcagtcactagttgctaactggtaatctggtaggcccttctgatcaacacaatggcctgccttgaatgattatcaatggctgcttgttgagctctcatgacttcaatttcccgatccctccattctatgaattgatgtctttgctcgtcaaaggcaaggttgatagatgttaggagatcctcctaatcatggtgcaaagtggtgttatcgccctccataagcccaagcgcatctcgcaggttttaaagtttagtatcttctccaacaggcctttgagtgttattggtggataggatctcaatgctaggagtggtttggtcgactgctgtactggtattcctagtttcgtgtatgcctcgtgtgaacccaattagaggagaagtcactccatggcctacagttggtggttgtgtattaatttgtcaagggtttatccttggtggtcctctcatgtatctaggagtttgcatgtttagatctgtcaccattggatcgccttaatcagttaaacctccccttagagtttgtacaaccatcatgttaaactatcaagactttaagacaaaaacttgtaaattttctctgatttttgctcttgcagctgtacggctggggctatggcaagaacaagatccaagaatcatggaaaacctagatctgctatgaaaatttcaaagaagagaggcaagaaggcgattgatgaag

SEQ ID NO: 28932 - DNA, 1580 bp, Cannabis sativa
tagagatattttttaaaatttattttcttaagttatatgagacttgatacttaatcacaccaatagtaatatgacactgagaaatgtgctaggcactagtaatgctttttaacaagtccgatccaaaaccattggtgttagaaaataatagattagagggaatgtattcaattataaaatcttattaaaatttaatactattactaacaaagtttttatagttctattaagtaaatttaattcctttcctttttaatactttaattatgcagtgtcactacactagaagtaaaaataatgaaagaagcttagtttaaagcaaagtgatacatagtaaaaaaaaacaattataaataatgtgctttatatatccttttttaaattatgttaactttccctcctttttatttagttattattcacgtgtgtaaatatacataataataataataataataataatatgctttcttttcctatatatacaatacaatacatatcatatgtatatattgattgatcaagctaaacctagctcatgaaacatcatattcatatcattattaacatatacaagtagtaaaatactattctaaataattaaaaaatagtagacatttttttatagttgaataagttgtcaaaaaggagatttttttttggctacaaatcacatagagtagttatgagaagtaattgttaatagtactataaatataaaggctaaaacaaactcctctttagagttttagcttaaaaattaagcatggtttattaaaaactatttatacaaatattaatggatataattggtaatgggataatgattgatggtaagtaaggattggtcttctcttgaccacatcaagtgtgcttaaataaaaattataaaacacaaaaagccaaagccaaaaatagtaatccaacatttaaccatggttaccaaaatgactcaatcttaggttaaattaaccaccaatggttatgacttctttctttcttggctggatattagctgtcaaaatattaataataagaagaagaaaaacaaccaaagaaaattatacactagtgtgtatattttttttatactaaactaggagtaatatactatagtaggagtattatactatatttttacgagtaattgacggtaaattttttttatattttaatttttttaattttttttttttataaatttgaggcatgagttaaatatcattattcaatactaattaaatgactattacgtatatttatatataataaaactttaaaattaatataataataatttaattagtatttaaaaataataattaattattatcgcaaatttaaaaaaaaataaacataaaagaatttggaacaaataactttagttttatttgttttttagttaattaattaattaattaattataacataaattcccatatagtaattaagcaaatttatacctatataaaagcacttttgaaagcctcatgcccactctcattcccaattttcagtttcacactcttttctttagactttttcatttttccaagtctctctctctttgctttcttcc

SEQ ID NO: 28933 - DNA, 2419 bp, Cannabis sativa
gaacaagattatttggtcaatgaaattcaataaataatctaatttattggagctaaaaaattatagttcatggtcttcggatcgccattttgaaatactgtcaaggagtgagataaaagttgcatatggaagttcgaaaaaatataatttgaattaatgtcaaaatagtaattacttattttgtaaataaacaatttatttttcaaattaattaaattgataaaagacaatgtgccaccagggttattttgttttttgggctaattaattaattaattcaataaataaatatttaaatttaaaaagtagttgagatattctttcaagtgactgagagattctctcatgatcggttataaaatatgaatatctataactgaatttagttatattatttattcaaataattaaataagatttaataaaaaatttgagtttaaataattaattaaataaaaattttattgagtttatttaatatatctgattttttgaaagcttaaaaatgattaattagtaaatttttttctctccatcactaaatagtaattaaatagttcttgttcatgcgttgagatttaatcaaaaacttaatttatatacactattatcctactagtctacaatggtggaaggtctggaagatcatcaaggtgtgagtttgtcatcacttttctaaagatatataacatacaaaaagaatcgaaaataacctgatagattgacttcgagatgtaaatgttcctttcatctttttactttcagtttaatatatatacatatggataggaatgagaatgagaatatgaataaaaatagaatggaataaaatttaaaaaataaaaaaaaaaatcataaaaaaattattaaattttttctcatcatgtattggaatgatatttccttctattttaaaatgaaatagttattctactaaaatggtgaaaaagcattccattagaatgatattccaatactttaatatgcaactaaataaagaaatagaatgaaaattgtttctttttccatctcattctatttcattaccttcaaccaaacgtcaccataataatcttaatcatatagtacaaggataaaaattaagttttgcatggttttaatgaggtcaaaaaaaaaaagtaataataaaaaatacttgctcttgtaagccattgtgttagaattgtttgtcgtgtatatatttatcacagaacccctaattctagggaaattggtgtaagagttggttgttgtgaatacattcaacagctaagcttagtctcaatcttcaccaatgagtaattcatttacagctttttgaatttcttgttgatactcttttactttcactctccacagatcttaaatatagcacctaccacactatatatagaaaataaaataacaaagaagaataagtaattcccacccaagcaggccagttcattcatttttgtcatttaattgatattgttaaaaaaaaatccaaatctaccaatattggtaaattaataacattaccaaccaaaccaaaccccaaactacactaatattgaatacgtagtacgagtaatttattgaaacttgatacaagacatattatatatatctgattattattgtttacttctttagacgaaacatatgtgacaatgcttttactttgccgtgtgcaataggcaaatgtattaagattaataatactatacaaaaacaggtatggatatttattttacttattgaaatatttatgagtgaaataatgtggccgaattcaccagatacaagggcatctccaacccaacagcataattttcttatatatagtgtgaaattttcgttttttttactccaatgggactgtaattattaccctatatttatggggatctacagtgtcccactattaatagtaaggcactagatcacagtattttttttttagtttttaatgattaaataatatttattaatataatttattagatttaattaatattaaaatatttttattatattaataaaataatagaataataaagaatgtaaaatttggtgatttttagtgttgtggttggaattggaaaaaaatttggtgctaaaatagtaattttttggtgttaatttaacactaaatttaagttttactattggagatagcctaactaggccaatagtgttatactgttggccatctgttttggtctgatatacgaggagtgttgttgtcagaggaattaagttaacaccaaaataggtgagcattcatgtaaagtaagaacactcacgaaaagaacagtgagtagttagctagagtggcgaacatacttcaacagaaaataacgaatatttaaagttaggggtgttcgcggtgcgggtgatgtattttttgacaattttttcaaatcaactcgtacat

SEQ ID NO: 28934 - DNA, 1909 bp, Cannabis sativa
catccctcatattttctaatttttataaccatatatattttaaatattattttgttaaaaaattaaaaaaaaaacacacaactaaatattattatatatcatagtggacatttaagagacaaaaggcatactcccaaccgtaagtagttgtttttactttacccaccaagggtggcaattgtgtggtaagagtactattaacaaatgtgtaaccattattttattaggcctttgattttttagatatccttaattaatttttttttatttgttttggttagattacttcatattttattaaaatataaaagcaaacaaccttagttgtccacatacttaacggtaacgttattgattttgatcacaggcgtggggttctattcaattattactgtcttttatattaattttgccctaaaatcatcgaaatatgctcatcacaacatttcctcgattcctgatatttaagatataattattatttcaaaaaatataatataaatatttataattgacgtcattgccagacccagaaccatatgtttatatatatgagtgtacagttcaatttgacaagccaaatcgttacatagaattacaattgtgatttatatattttttctgttttactataattaatttttcttaaaacgtgtttttgaaatattatttctacacggaaaagcagaagaatgaaaacaaagatatctgtaacctgttacgctgtaacataagtgtacctataagtacatatattaaagtcattaattaaaatcatccaaggaactagtatatatgatcatttggtacaatattcgttgacattttcactgtcaatattttttgtagaaaccaaaaaccttacctaattaatccatcatgaatgatgaaagtcatttcccagcgataatttatggtaattataaattcaaaccttcattaaaatattaatattatttcagttatacaatgcattaacatccttctaaacgttaatatatattatttttggatgatatttgcttagtaaaaattgtggatctttctcaaatataatttacatattgtattttacaaaatggaacgtaaacactaatattaaaattaaattaggaatcatgttagaaagagtatgtttcaagattatagggcttaaacaatattattttttaacaaaatcggatttagagtatatcatcatgcttttttttttttttttttgtgtctgaacatcatttgaaaggttcaatacttttgtttttttgatgagaagagttcaagtatataccttttttttaaagagaacagttcaagtatgctcgatgacaacacaagtactgctgtagatatctatatttttttttcttttgaaagatatctcatttcctagctaatagtaattttctttgaatttattattagttcattgactctaattgttgtttgcagctaaatatatatatctttacatactatttattatattactattaattggtcaatagaaagaaaaggcacatggattttttttcattcatgtacgtaattaagacacatatgtaatgtatacatacactaatggttgaaaacgagcattacaccaatgattagagttggtaataatatattattaatttttattacttcgttattctcatagtatacgctaccttgccaaaatataacagaatagtgcccaactatttgatttataaattattattatctttattattaaagcttaaaaagtcttaaaaagctttataaaaaaaaaaaaaaaaaagcttaaaaggtcaaatgtgattagttaccgacaaatatatagataataaattgttggaaatcgttattggtgagccctgaaatcactcctcccgcaattaatgtgattaatatatatatatatata

SEQ ID NO: 28935 - DNA, 4239 bp, Cannabis sativa
acaaaataatatttaccctttaaaaaataacatataattttccaaataaaagctcacaaatattttatttttttgttatggtccattaaattttaaatccagtcgagcacttattttaattttaacaactatatattacacaaaattgttaacaattcgcaaggagtctaatagcaatgtgctaataataatacatcacaccttgccattttcaaagctagttgggacagattttaacaaataatatatcatcccaattattgtacagtacttttagcatatctttgggttctttttttcagtatcaatagaaccatgcatgcattaattgattttattatttatacacataaatgattgaatttccattacgtgaaattagatttatcaaatatttttttttaattatttcaaatcaaatattaaatatgagaaactaagagaaaggaaaaagagagaattaattataatattactacatggtcaaatatgattgggacctacatgatcaattggttttaaatcatttgacgatattataattagcaattcttaattagtcttttttaagcgtcgaacctacattattcagtgttttgaatcaatcctttaatctttttaagaaaatttcaatctattacaatcaacccaataacgaagaaagcacctcaatcacgattttttttacaacaatgctctttgaagtggccacaatgaaatgaatagtgtataaagcatcaaggattttttttttgtattcgattataatcttatttttagtcacaataaaatttataactaaatgtaaaaaaaaaaattataagaaatcatcattcttatattattactaaaaaaatcattcccaaatggtattgctaacaaaaatcgtaatttgttgtgtgactaaatgtgattttaatcgtaatatttattataattaaaattatattagtgataatttatatttaaatactatattttagttacaaataatttttattgtgactaaaattcatatttaattttaaaaaatttatgttgtaaccaaaaaatcatttagacttcttttgtagtgatattttagtgttacccttttcccaaatttgttaaccttatctatactatgtttacagataattaatttataaatatttttcctttagaagaagaggttgaggatcgaactagtgttgtgtgttacgaaattaggggattgataaatattgaaagaagacgaaaagaatatataggtttggtgtgaagtcattttcaatcaaaatgatataatttttggtatcttattactgctgttaataatatatataaatatttatatacatagtttgagttgataagatgggatatgtacttaatcaagacatgaaagacccacacgcaaatttaatttctatgcttacgcaagacatgaattgaaagtgaaacaaatatttttctcttaatttgatctgttgtgaatgatttgcttggcatcttattaatttaattattattatgatcatgtcattcggtccattaattataattatgtctattagacacaaatgatcagatcatcaagtcatagcttgaaattaattaataaacttaatcttcacaattaatgttaaagtttaaccgaaatgctatgtttaatcgtagcaaattgatcttatataaataataacttgtaattgttcctaattactctgaataagtggtctacgaattgagttgtgcactttgtcgtcaaaaattctcttttgctagctgatcatatgtttttgaggacttttgtttcgcctgactcattattcattttaatgagcaatctaattaatgaagttgcgaatttggttttaaaaaaattataattaagatttttactgttgctccttgacatgtattaaatcatgttttttgaattttgaagattgttaaaaaattactttaattaagattattaaaatttaaaggatataatttagtgttacgttaaaattcaaaaaaacaaaaattttaattatatgtgtcctatagacacgtgatttattggctaaactaactgttttttaatttttcttaaaaaaatgttatttttcttcttttggaaagataaaacaaaaaaggtaatgttattaactccatatcttaatgcttacaaggcggccctgtcaatttacttttatttgaaaatttctccacactaccaaaaaataattaattttagtgataattttttgattacaatataaatttttatgattaaatgtaatttttaattacaacaaaaaattacttgtaactaaaacataatatttaaatgcaaattgtcactaacttattgtgactgaaaacatattaatattgtaatttctacaaactttttagtcacaaggaatgataatttataattagttataagttatttacttttaatcgcaaattttattataactatataattttttgtagtgcctattttttcactcaaatattttcatgaaattattttcttgattaaaaatttatatattttcataaaaatccatcataattttttttcctaaaattcaaacttcaaacaaaacctaaaagaacaataggtttagaatttagaaaactattgtttagatgataacgatatcgtcttcgtgtttttaatttttgtgacattacttgttggatctaagatgtagagtgagtttgccgtaaaaaaatgaaaaagaaaagatatacagtgagttttttcatttttttttaaaggagatatacagtgagaggtttgggtcgtttgggcctctcaaaagtcctaggtgtagttgttgttgtagctgatttgcctattgcttaatttgtagttgttcttgatttgttgtaaattaatttgtaagagtatccatataatcaaggaaacttaaaaaaatactggaggttaaattttacaaaaatactgtcatacggaatttttttcaaaaatactatgtttttataaaatactagtaaaacacaaaacagaacaactaaaaacaacagtagaacaactaaaaaatactagtagaacaacagtgaaaacttaacatctgcccccacagtataaaatttcatgtggtataattatcctataatcatagtgtattttcattttaggccttttaattcctgggcaacattttgggcttgatggattggaaatgggaggttttcttttcatactgtttggtttaggcttctaactctagagccaacatttgggcttgataaagtagaagagttttttttagggattgtttcaaaaatatacaaaaacaacaaaaaaaattacaaaaatacggctgtacggaattataaaaattttacggttttaaaattttatttacagaaaatatgctcttttgatgtatcttttataatgtactcgttatttttttttttaatttttgttattttattatttttatattgttttaatagaacaccataaaaatacaaataataataataataataataataatataataatctttgaacgtaaatagtactttatgtaattttttttattaaatttatttatttctttttatttttaggcttctattccaaaaccacagtttgggctagaggaaaatggaatttttgttttcatttcaagctgctaacagtgctaagtccaaagccacaacttggactttgataggggtaaaagaagaaagtatcccccacaaagaaataaactctttcatttttcttttcaaaataaaatttccaaaaaattaaaaaaaaaaatagctagcatttatctaaaacaaaatattggcaaaatagtactaaatttaaaatgtatatgaaataaaaaattatatcatctgaattcggtggacattttttttaattgacaactaattaagacatattatactactaaatatattttcttagttgtttagtatgtgagagaaaaaaaaaagtgaatttattacaaaattattatattaattttaaataattaatataaaacgtgtgaaaaaataacttactaactttaccgatttaccccttttttttcagaaactttatcacaatcaaaacaattccatgccttttacagagtatgtatataggcgatggtctaatgatataaagttttagacttttacttcttacatcgggcgggtttaccgggtttcggattggcgggtttcgggttcaaaaaattgaaaccgaacccgaacccgaata

SEQ ID NO: 28936 - DNA, 3574 bp, Cannabis sativa
ttaaagaaaaagagtagaggtgattgtttttgtgctcttaaattggacatgtcaaaagcttatgatcgggttgagtagtgtttcttggagaaatttatgggaaaactcgattttcatagtgtgtggattagaaaaattcttgactgtatctcttctgtggagtactccatgctactgaatggtgaggtccttggctctattactcctcaacgaagtcttagacaaggtgagcttatgtattcttacctttttcttctttgcactgagggtctttcaagcttggtgaaaagggattgtgataataaattgatgtatcgcctggcttgtggttgtggtgatcctattatctctcattttttgtttgcttatgatagcttgtttttctttaaagcctcagatgtgtgttgtgtaagattcaagcagttattacattggtatggagcggccttaggacagttggttaagtttgaaaagtcttcagtttgttttagtcccaatattctgagttttgagacaaataaattagttgtttgttgggtgttaagggggtcgattgccacgagaattatttgggacttccttattttgcaaggcatagcaagaatggtttgtttgataccatttgagacaaaatttggaagaagcttaatgggtgaaaatcaaaactatattctatggtcggtcgtgagatcctcatcaaagtggttattcagtctatccctacttatacgatgaatctctttaagtttttgaaagcttttgtaaaaaatgtttatcatatgtgtgctcgtttttagtgggtggcaatgatgttaataaaaagatgcactagtgtagctgggagaagctttgcttacataagaaaaatggtggtatgggcttctgaaatcttcatttgtttaatcaagcccttttggcaaaacaaacagtaggtggtgactagtttcccttcccagcagagagtggatgtgcctcatggaggattggcggtgacactgagttcagttcctccaatctctaaatgggctcctccccctcctaaatttttcaacgtgaatacagatgctggaattaattcgatgagaaatgtgttgtggtttgagtttggtaattcgtaattatttgggagtggctaaaacttcgggaagttggcacttggaagattgttttgttcctgaagtcactgaagctttggcgatccgagatcctttaattcaatgcctctcctttgggtatgacaacatcatctttgagtctgattgtttgaatgttgtgcttaaaattaaaaataacaattcgatcatctcttctttgggtcttgttttagatgatattgttggtctttgtaataggctccaggtattagtttggtccattgtaatagatcatgtaatggtgcttcttataccctagccaaacttgctttttcggcacatagtcgtattatttggtggccaagtaatcccagttgtatttagaatttgttgatagttgatgctatcattgaataaattttctgctccactttcatagagttcttgttgctcttggtgtctgatggctaagattttttttttaaataaaaattgtttgagatgattaattattttattatttttatatttttttggtaaactaattattgaaagcatattgtttccatgtaaattgaccacttttgacattaactatattacattaagataacattattagaaaattaccaaagaagtgtataataaagtacaattgaattttccctaaaaaaaaaagtacaattgacttatcttcaaaagaaaaaaaaaagaagtattgagcgtctgccctctctaatgctctgtgacagttattgtccttcatagttttatagttattcatatgtttctcatcctttttcctgcaacgcttttccagtttttagcagttattattcctcccttagtagttttcaatagtttttgctctgactgcctattgttctaagaaatttatagtctctcatcatggatcttctaactaacaagatgaagtcgaacattactctaactgaagatgaagaagctgtgtttgaattccatgacactgaagcggtttcccctgctacttccacggatctagtgttgtatgccaaagtccttactaagaagaaagtctggttatccacattacagaaccaaatggcagagcactgggatggtagatttccagttttgatatgtttttgctaaccttcggctgtgaaggggacaaaataagggttcttgatcgtgagccccatcatttccagaaccatcatatagttttgcatacaccataaattggtaaaaacttcacttctgcagatctcaaacttacacctttttgggtgcaaatctatcgtctaccatttcttagtaaaacaaaatcactggctatggcacttgggaatacaattggtgaatacattgatgtgtttgaggattctttaaatgaaggttggggacccttcttgggagtgagagttaaattggatgtttcaaagcctttaaagaggggacggatgatctctttatcaaatgttcgggataaattttgggtgcatttttgctatgaaagactagccgaatattgtatggagtgtggaattattggacatccctttaacaaatgccttgtctatcttgaaaaacttgacaatggggtggaacccgatcttcagtaccaaccttttatcaaaggttctgcactccctacttcaggatatgatcgctatcgtacgaatttttcaaaaggaaatgcatggccattgttgactaggcttgttaaaaagagtctcacttcagcaattccgcaattggaacagagaggtatgcctcaaccacgaaaattgctctttggtgagtcctctcgtttgactgttactggtgcagaagaggatgttgataatatacctgccaccataatgcataggccttccattcatgattcccttggtttaactccaaacttaaaccaattaaagcagcctgtcatttttgcaccttcacatcttgataagtcatcgatcattccttttacctgtgcaaaaaagatcctttccaatctgctacacatcaaatctctggccacttcgaaaactacactgatcttactgggatttttaatccgatacactccatttccaacaacaataacctttttgcctcttaccccgctgccactacaccagtaccagtccctaataccactaatcaagtgtgttcctcaacttcaccatccatggcatttgccacactcacatccactatggctactagttctgcttatggtcaggaaaatatcaatcccaatgtgcaatcaaaaaggcagaatgagagtctttcactaaggcaaactctgaaaagatgcagagcaaatccatcaacaacttcaacttcttccttgtcagatgaagatgatttccaccttcaagtttctgtggacaacatggattctgctggtgtaatggataaatttgcggaggctggttaccagtcccgtaatcagccatgaagttcataagctggaatgctcgtggcttgggaaacccgactgc

SEQ ID NO: 28937 - DNA, 3178 bp, Cannabis sativa
  modified_base (1322)..(1327): a, c, t, g, unknown or other
gtgttgataatctgaattttatttgctaggttagtattagatatatatatatactgaatattatatttttgaaaaaataacctagtaacttagaaactaatgaacatcaatgcatcacctcttcctctctttctcgagcatgatagcgccagccaaccagggggaaatcttcaccatttttcttgaatttgagcagattttatacctaaactaaacatagaagctattgagatatgttctttgctttgttaattgagaattgtaagttttgagttgggtttaggttagggttttgtaattttgaggctgtggaattaaactgggttgaggttgtgttcttagatttgtttttgagtgtgttggagtttgaattgattggtttctatggctgttgaatatgatttttcttagatgaagtaaaaattagtttttcttcacttgaatatgtaattttaacttaatggttgaattattgttagtggatggggtgaatactttgatttatgctaaatatgttgttctggagctgttggacatgtttgtgaatgaattaagatacagtcattaccgttatgagtacttactcttgaaaccacggataggtttcttacttatcgtttgtgttaatgggcaacgatagtgacatacgcagctcctggataacgagtggtgaagattagtaacggtcattactgttacaagtaattactcgttgaaaccgtggataggtttcttacttatcatttgctttatcaggcaacgatagtgacgtacacagctcgtggataacaagttttacgggagccttaatgaagctccgagaatatgtgattagagtgctttataaagcactgaaactatgtgtttatggtaatgtgtaattagaatactttacaaagcattgagattatgtgggtacatgctgaacgaatgtctattgggtgaaatgataaaattgttgatagtgagttactatgattttcttataatgtgaagtttatgggttagtattgatgctaatcaaataagcattgaaaatataagtattcatatcacaacataataaacatactcatgattcaatacctattcagcatgcatatgatctagtaacttttcttgttgagtcattgtgactcacgaatgctttgtgttgcagataagaaggaaagcagttgtggtgtcttggcttccgggaagcaggattgactaattttctatgattgtaaatgaaacctacttttgtaataatagttttgtaattaattgtaaaagcacacacgcggcatccctaagtgtgagggcgttacaacatggtatcnnnnnnaccaaggtttaaaaatcttgaaaactggctcaatatgtacattggctgcgaagactcattcgacttatggcttagtaggtgttgattgttagttgattagtaaaatattcattgattgtttaaattgtctgcttatttgaaatgtgtaagttattggagaagaatgttaagttttgatataaagttgctgagtatattcatgcatgtgccgtaatacttattagcattaattctagatagaatgattctaactatgagcaaggaatggtcgcgagtgtactagaaggtgtacttgaggtgatgtagtaagaataattgcgagcctgctaagctcaaggtaggtggtgtgggtatgaatattccactaccataagaccgagagtaaatgcatgctatgaattaagagattacctgagtgacaaggtagtagaacctgtatggttgatctcgagcagcacagtgatggagaatgacactaagctggactgattggcaaagttttgtttaaatgcagttgctactaaggctgctaggaaggctttaaggtggaacaagtatatcgtacagaaagtagatattatggctaaacaactaggagttttctagttttatgctgaggtggttgagtttacccttactgttgagggtgcaaggattagatcacatggaaatcatatgaagagagattcataaaagtaaagatccaatgttggatcaagtaaagggagttaaccctaatgcgggcccttccattgtgacaggtcagctttttgatgctagtactttattgactgtattgattgattctggtgtgatgcctctttatatctcaagtagcataattgaaaaaaaattgagtagacctagtgttatgcttttaggaggttttggtattttactgcctactagagagttggttatctccagaaagtgggtttggaagtaagggagctttcagttgatatgacagaattatttggaagactttgatgttattttgggtatggattgtcttgcaaaatgtaacataaccattgattgtaaaggaaggatggtaacttttcaaccatagggtgagaacccataagtatttgtgggtaaagtgcaaggatcttagattcccttaatctcagcgttgaaggcaaaagatttattatgtgaggtgtgtatcagtttcctagcaagtataatggatactacaaaggaatcactagtgggaccggaacatgttccagtagtttgagaattttagatgtctttacaaggaagctaccagggccaccccagaagtgggaaatcgattttgaaattgatttaatacaaggggcggagcctgtatcaaaagctccttataggatagcactgtagagctgaaactgtagttataagggatgttggatcaaaaaagtcactagattgagtacctcaccttagggtgcgctggttttgtttgtgaaggagaagattaatactttatgagtgtgtattgaccactaggagtcaaaaaaataacagtggagaatgagtattcgttgtcaaggatagatgttatgttgatagattttaggaaagggtcgtcttttctagggtcggtctttgatctggttattactagttggagattcaagaggaacatatttccaaaacagtttttcgtatctgatgacttcataattgtcttcattaatgctattttgatttctttcgactaaaaacaaagaggcatatgagaggtacctttggatggggttgctgtaacaccctaactaacataggcgtattacgtgatttgtaaacatgctgtgcagctcgttgctaataacgaggtttatggaaaacgtgattaattaa

SEQ ID NO: 28938 - DNA, 1380 bp, Cannabis sativa
gtaattaagattaaaaaaatgtgtattgtaaaaattcctataaatgtgttggaaattggagtctttaacaaagaaaattccagtggattttttttttcttttttttattatttagaaatctctctaacttaggatgtatatttttattataatgacaatgatgtgaggaatctctaactaaatagaaaacgaggcggagacaaggattattttatgtttccgaatgttaaatgagtaggagacgaaaatgacactccccatcttaatgaggactcgtttaatattttatttaatcttttaatagtagtttatagtttatatttgtactatattagtgtcatttttataaaattttaaattatgtttaatataataaataataaataatgtgtaataattttttttgatagaaagttttattcaactaattaaacattcatccattataataaaaagttaaagaacctcgagcttcatgctcactatagataccacaactttatatatgaataaagaattttttgatatttatatataaattattcaatatgaaatattaataatttaacattcaaacatatattaaaattttcaactaatatttatagttaataattttgttacaaacttgttagatataaaccctaacattatgtacatgagtttgcgaatttagacaaaaaatcaaacatttaccttttaaattaccctttcacatgacttttttttagaagaaaaacctcagtatctcccactctcagtcactaattgatattatatttgataatatataattttttttcttttgtaagaataatataaaatatttcaaggtgacagtaagtaaccaactctgatttttcagtactatatagtatactcttattacgaaaaataataaaatatttaatattacttttagggtcgtttggtacgagatgtttaaaataatttaattatattagatagtcacgcatctctaatgtgtagaaagattatagaatatataagaggaatgggctactcctcccatttccaattggttttgagatagaacctcattcaccttatctcaaattctaacatggtatcagagcaaaacaaaaataaaaaatctcacggctatccgacccgaaaaaaatcgatcgaagtagagccaccaaaaattaaaaaaaaaaaaattgatccaagagccaaagtcaaaaaagtcacttgtgattcgggaatagtgagccaaaaaaaatactgatccagtaaatagagcaaaaagagccacttttgattagggatagtgagctaaaaaaaaaaagagctacaaaaaaaatatcaatccaaaaagtagaacaaaaagagccacttgtgatcagggatagtgagcca

SEQ ID NO: 28939 - DNA, 3323 bp, Cannabis sativa
taggttacaaacaaatatttttggcggtaatactaattaagttatattttactttttaaacttctataggtacctgattattaagtatcaagttattatctacttgtcatttttttattagtaaatttgaattaatttttaaataaaaaataaaaatataatgacctggactaattaggaactgccacgtgatcattgacttgacatgtccatgaaagttttaaaaatataacttaattttaccgtaaaaaattaaatttaagtaatttatctgtaatcggaagttaaacttaagtatttatgctgcaaattatttttaaaattataaataattcaattagaattctggatacagaattgacttgtctatactgaaatcaaatttaaaaatttagttttgtaacactagatgatgattgtgtttgtgatcttaatctataattgcagattagagtatcttctgagattagcaatggagaaatcattcttaatgtggattgtgatatgtacacaaacaactctcaatccataaaagatgccctttgtttcttactagatgaagaacaagggcatgagattgcatatgtacaattcccacaaaaatttgagaatgttaccaagaatgatttgtatggtaatgatcttagaacaataagtagtgtgagtctctacacaactcaatttcattaaagaacccaaaataataagtttttattttacactaatattaactctttatatacttatgatcttttaaggttgaattccatggtcttgatggctatggagggcccctttatattggaagtggttgttttcatagaagagatgttcttagtggaagaaaatttggtaccgaatttgagaaggaagagaagaaagaaaaccgagaaagagaaagtgttcgagagttagaagagaaagcgaaggagctagcgagttgttcttgtgagaaaaactctctttggggaaaagaggttggtttgtcaatctccactcatatttattattataatgtttattttttattatttaaatgtttattatctatgtgggatcccattttgtcaagtttaaccaaaaaaaaatgaagtttaacaatgtttggtaaatttgtgtttttgttatgatgaataatagaagggattgaaatatggatgcccagttgaagatgtaataacagggctatcaatccaaagccaaggatggaaatcagtgtattgcaatccaacaagaccagctttcttaggtgtggctccaacctcattggatcaagtgcttgtgcagcacaagagatggtcagaaggtgatcttttgatcatgttgtccaaatacagcccagcttggtatgcttacaacaaaatcagcttaggtcttcaacttggatattctgcctattgtctttgggctcctaattgtttggctactctctattactcatttataccttcactttaccttctcaatgccactcctttgtttccaaaggtaataattatttcatctcaaaccttattattcgagtaatcggtgaaaatagattgttttttagtgtcactcgacaaaatatttttgtttcggtactttgcttttaaaaagtagcgttcgaattcagtgttaagagtcatcgacagggtttcgagtctatcgaataatgtctttttggaagatgagtataagaaaatgttatttaccaaacaatattgcgtcagggccagccctgacagtgtttggattttacgaaaaaaaaaattattagacccttattctaataatatgtgggtacttttaaaattaccaaaaaacttatgtatttttcaaatggaactattttttgggagttctggggtgagtgggccctaggcgcaagtcttagctgtcttagccaagatcaaccctgtattgagtatcatgttgtaaaacctagcaaaataaagtaatttttgtgagaaaatctttttatgattgttgacataatttcacatatgttactttaataaactcttgttttgtaatgatttcaggtctctagtccatggattataccatttgtctatgtgatttttgccaagtacacatatagtctagtagaatttctatggtctggtgggacagtcttaggttggtggaatgagcaaagaatttggctttacaagagaacaacatcctacctattcgccttcatcgacacaattctaaacttgcttggagttacaaactcagcatttgtcatcacggccaaagtaacagacgaagatgtctctgagagattcgagaaggaaatcatggaattcgggacaacctcaccgatgttcaccatacttgcagtgctcgccacgatcaacctcttttgctttatcggggtagcaaaagaagtagtcgtcggaaaggatattgccagggttttcgagactatgtctatgcaaattttgttgtgtggggttttgatcctaataaacttgcctttgtacaatggcctttttcttaggaaggacaagggaaagatgcctagttctttgacagttaaatcagttgcatttgccctatttgtttgtactagctttacatttatgtattgaataataattcattatattgttgtaaatcttcttcaatattaatgcagcatcataccctttcttgttttcttgtttttgtttcaaatgaagggcttattttaatttgggctcactaagaaaatttagaggattataagaagaaaaaacaaatataactgtaaatgaataaagctctaaatgagaagaaaagttgagaaatggcttaaatacttgagcctaattaagatttttgttcccaaacattactaaattatatctcttgaattttttaagcagttaaaattctctctaattattgagattattgaattcgagaatttttattataatattataacaaataacttatattaatatttcttttttaagaatttaaatcatattaatccataattttggtgagttaaaataatcctgctactaggagattattttttaatactctggacaaaattgtctaatcctctaatagtttcccaaacatgagactagataattgtgtccaattccacacattaatttcatacattctatcacaaatactgtacaatgtacatgttattattataagagttaatgttatttggattctatattttgtaaaaattatcaattaaattttttattttgtaaaatagtaaataaaattttttgggctcgtttggaacgccgtattaagtcgtattgtattatattatattgaattagattatatatcatatttttatataatactatgttaaa

SEQ ID NO: 28940 - DNA, 3122 bp, Cannabis sativa
tgggtacaatacgtataaaaagagatatgtttcaattaaatataaattagaggtaatataaaagtggtatttttcaacttatcccttttatcttggtaagacagggtggcataaacctcaaatcttatattaaaatatctttaaaatcgtaaactttcaaatactaaaaatcaaaactaaatcataacgctaaaaattaagtcaaaattgtaaaaggaaaaagttttattaaatatttgaactagcagcttcaagtgttttcaagaagtattttctaactaattgctagcattttatgaataagttactcttctaggcactattgcaaggcccaatacttagaaaagcctctttggttgcacaaacataaatgtacttgttatttggctagttttgttgggtccaacaattcaaacaggcccaaataagaataataagtgaagccttagcattttgcccttttctgagcacttcaaacaaaaaagcaatattgggttagatatacagcatatttgttttaaagtaccacataagaaattacaaataggggatgttgctcattattttatgaacactatttatttagcaacttcctttaggttgcataaaaaaatataaatcacaggaaaaagaagagtttaaggttctaaattttcaaaggtatatgaatggctgaaagaaacttatcaggccaaggatattttattttttaatctttgatacagaggcttaggagattactcttgttttagtagttgttgatgaagtgcttgtatattgtccatcctttatttagaaaaaaaaaaaggatgggctctccctgtttaactttacaatatttggagaccagaaactatcgcaattgcaatgtagatacccgagaggaaatcgaaactcaaaccttgtggaaggaaaccacatatgacattcgagaccctcttgggtgctgtattatgtccatcctagaaaaagattaggccactaatagccacttataacttgaagctccagtcaaactctttcttgaggttcatctttaaaaactctcttcaaagttggggttggcacatgttaacttttctctcaacatccaatcttttttaaaatctctctagagagctaatccaaatctcaacaaggtcatctccttcttgttttattacgagactaccctcatttccttttctgttaaccaattcttggtattttctgttatattcagctgagttaattcttcccaactaactcagctcactataaaagggtccctctcttgtagttgtatttattaagttcaggaataataaaagacaaatacagagtattttctctgttctttttccttctctttcattttttttcactcatatggtatcagcagcacatcaagattctctttcaatggctagacccaccgcccattctcaggacggcattcccccacccaatttcgagaaccatccaacagagtctaatccagacacaacttctacaccaccaatggtggatacttcagttgatgctcgatgaaatgccaacccaagagctcgtacccagaacgatccagacaccattgcaccagcaaattcttctcctgctcctgttcctgatgttcctgttcagggtcgacggtccttagccgatcgattggctcacgaagatgtttccagcccattcttcctcagcaccgcagatcatcctggtctggttttagtttccaccgtgctcaatggcgctaactatcaatcttggaaacaaggaatcatgatggctctcacgggaaagaacaaatctgccttcattgacggttctcttcctcggccagccgctggtaacactcttctcccttcttggattcattgcaataacatggtcatgtcttggcttgtcaattccgtttcgtctgagatagcacaaagcattatgtactttgatcttgctaccgatatgtggcatgatttgcaagaaagattcaatgagggaaatggtcctcgaatctttcagcttcaaacccaattaactcatcttcaacaaggtgatcaatctgtcacctcttatttcaccaagctcaaaactatttgggatgagctaaaagaattccaaccaaacactatgtgcacttgtggtgcaatgaaagttttcttagaatattacaatcaaaaccaggttcttcagtttcttactggtttaaacgagtcatatgcatctgttcgggctcaaattctacttaatgaacccatccctaacctctctagggtattttccatgattgttcaagaggaaaggcagcgcaaccttggttcttcaaccatttctcttgttgcctctgcccgcgcccctacaaccaatccccctccaaaatccaagaagccaagaccttcttgcaccaattgtggcaaaccgggtcattacgtagataaatgctactttcttcatggctttcctcccggctatggtgataaaaagaaacaagaaaaggctaaacctgctgcaaatcacacaagcaccaactcgaatgtgcttcctactgtcaccaccaacacagacttgactacccaatgccaacaactcatttctcttctcatccaacaattaagccaagctacatctcgagaggataccaacaacctctctgctgcctcaaacatggctggtaagtcttcctcttcccctacatttacatggattattgatagtggggcagcacatcacatgtgtgctacccgaagctgttttcaatctttttccaatagctcttttccccaatctgtcgtactccctaccggtgctaacatccctgtaaaaggcatgggaacagtcagattaaacaagcacattactcttcaaaatgtgttatttgttccaacatttcacataaatctcttctcccttactgccttcattgaaaacagccttaatatagttgttttttctaataattcttgttctataaaggctccttcactgaacattgtgattaggaaagctaaacggcttgggaaactctatgcaattcaacaagagatcaacccaaaattttagcatacttgttgtctttctttacacaataatgtagatcaatggcactcacgccttggtcatccttcattgtatatttcaaa

SEQ ID NO: 28941 - DNA, 1654 bp, Cannabis sativa
  modified_base (71)..(72): a, c, t, g, unknown or other
tttaacttttgagattttttttttctaaatagataacttaaatacaaaaagggattatttcataaatacannaaaataacaaaaatacggtttcatggaattttaaacagttttacggtttttttgattttatttacagaaaatatggtctttttatgttgtactcttgttaatttgttgattttttttgttatttgtatgttacttttatttagtttttcttattttcgtgttgtttttatggaaatccgtaaaaatattttaaacttttactttattttaaaatttctttaaaattcactattcatattctatatttataaaatattatttattcttcttaaatattttattaattatttagagttttaattttactttttatataggggtatgtgtaaatgttaatattatatgtttgaaataaataaaatatattaaaatttaaaaaaaaaattgaattttagtgataaattttaaaaaaaaattgatatacagtgtattataaaagtttgaggtgaaatgtaaaaaattattttaacgatgtattttgaaggttatagtaaagaaattgatgagattgctttaggctcagcttctaggggagaggaagctcccattgagtttgcatagagctaaagtttcaaaccctgctagatggacccacttatttttttttatgtatattatttattattaatttaaaaattaagtatgacatccttattctattaattatttttataattatggctattaactatagttttgatataaatttaaattctaaattattttttttgtagtaatttagattttaaactattagatattcatttttaattaaaaatattgtgttaattaaattttaataaaaaaaattatttatctatattattttatttttccattttctcctcctttctcttttatttttattttttaaaaaaacttttaactcatttctccattttttaatttattttttatcatggatgttgattttttttttgctgattttttttttttttaattatattgacttaccttacctaaattataacatattttatattaataacaataattaattaacaaagtatctaaattaaacattaatattaattaatttattacaaatattattattgtaaaattgtgactatgctcttgcagtacattatgaacacaaagtttgtgataacagttttaaatgtgaaatgagatacaattatcgtaaataatgactatgttattatagtgcattatatagacaataatgttaataataattttaaatgtagtggtgactataaattagatacgatgataagaataactttaaatatagtaggaactatatataatttaaatttcataataaatattaattaaaaatatctgaaaaatttatacgcaagttcatatttaaattattgatccactctatttttgtaatacttatactaggaataaatttgtacctagttttaattatattcaataaattatatattttgaaatttaaaatttagattttagatttttattttatcattttaatctttaaaatattttatttattaatcatacccagtaaatatataataaaattagtaaacattaagataaaaaaaaatatctaaactactga

SEQ ID NO: 28942 - DNA, 4502 bp, Cannabis sativa
tctagaagctctaatttttgttttaatatttttgaaaatactatatatttctttaataaaagcctaatattattttcttttcttaagatccacaaaatctcaggattaacttggtctattcttgatatacatcccattgttatacataatcttaacatttttttttcttatttaccaaatttacaggcattggcagctgcattttaactggtaagtactttccatattaattaaaatctttagttaatttaagaatcttataaaattagggtcctttaagttttttctttttcttaagagccaagaaactttgttttatttatacccaaattttattttgtaggtggagaaatatcagtggacttatcatcagtggtaattataattagttattagtgtaacatttttcttaataataattaattaattaattgagtggtattgtttggctatagggaaagtggtgtgtggctaatccagtgagcaataatcagatgttacaaaccaacattgactatgcatgcagccatgttgattgcagcctaattaaaagtggtggtgcttgttatgatccaactaacctaattagccatgcctcggctgctatgaaccttttctatcaagccaatggcaagcatgattcgggttgcgatttcatgggtaccggcgtaattgtcatgaccgacccgagtaagaaaattattaacttattcattattttttagataattaatagcgaaatttctttatgttttaatttttatacacttactcctaaaatcagctgaatatctcactgttaaatgttaattgagattgacaccgtgtatacttgtgtaaatgtggcactaaaatctcgaaactaatgaaaacatgtcacgtatacacacatgtgcatggtggtaatctaattggcattatacggtgaaacttaactaacgtctcaaatttcagaaagttaagtgtataatattttaatacaataggattttaccgttaattactttttttttttacttttcataaaaaaaaatgtacaaattttattaatttattttactcttggtgtggatttttcaggttatggtagttgcaagtttgagtatcgaaattgagttacaaataatccaagaggaatggttcttggagaagtacttaatgtattaaacaaatgataatgatttgataatgatcttatttttattgggttttgcagcttatcttataagtgattagtgtggttaaattgtaataagtttgcttgaagagtattttctttcttatgtatttttgtgagcttttaatttaagacataaaaatttgtgaataaagaatgtttgatttctcaaatttatacttttactttgaagtactaattagtattatcaatattagaatgaatatgggatgcttctgcaatgcctactaaaaaatggtgcattgatgcatctcgacatttaggatttttttttttttaattttatatttcatgtcatgaagcaaacgttataattatttttaagatatttttttaaaaaaagttttgatgtattttgaataatttcaaagtaaaaaataatattcaattaatttatttcacacacatatataataagggttgcatttcaagtcacgacacaacaacacgacacaggctcgaaataaattattgcgggtcatgaaaaataaatgcgggttgaagttggttctaacccaaatgacacgattatttattttgattggattagggttaacgaatgtgacacgaaatcaacactgactgatatatttatatctaatatattcttaaaattattaatttatagttaaattaatatttcataaaaaatatataaattaaaaaaaaaaagttacttacaagaagataaatatataatttatatttgatattgagaattttattaatcgtactaataattcgtaataaattatttttataaaaattaaatagtcatactaatcatatcgatcaacatgtactgtaacatatttatagtctacaggcgaacacgatacattgacacgagaacataatgagctgggttaggattaaccaatcaaacatgtcaacctgcataacgtggagtgatgcactcagaatttttattttgtggggctaattatttattataaaaaaaatatgtacctatattataatcactcttactaaatttattttattttgtggggagcttttttacaattatagtttataattttcaaataaaaaaaatatatatttatttttttaaagtttaatattttgtttagtggaggttattcccctgaactataacatactcctgcaattgtatattagtcatttatttaaataatttgttgctataacactaatatattattaattcagttcaatttaaaagtcaagacaagaaataaacacataattagcagcctaatgataaattatgaggtatgtatgtgcattcttagagctattatttatgtgtttaatgctaataaattagattttaaataaatttaagttattaaataagtccttgtaatacaattgtacttgtataaaaaagtttttggcggctaaactctctcaactatcttttcacgtgcacttaagtcttaaccctctaaattcaaaatagtaaaacctttcaaactactgaactggtagcaaatttaagttatcatccagttaactaccactatggactgtttatgtgtacactcttgtacatgtgacacgtttatattggtacacctaatattattatttaagatttattttaaaattaaataaaattataaaaataaaaaatactataaattttgaaataattatattaggtgtacttatataaacgtgtcacatgtagaaaagtgtatacataagtattctatgttgacagttaattgtaaaaaatgaatgacactttaaatttactaaaagttgagtagtttcagggtcggccttaggtatatgagggctaagtctgtgcctagggcccacctagctgaggggcctaaaaaagttcgtcttcttttagcattacacttttttttttttactcattttgaaaaatattatattctttcaataaaggctcaaaaatataagttttttttttcttatagcctaataaattttaggggtagtttggagggttttactatcaaaagttaagtgcaagtgagatggggggtcttctacctctccacagtcctttacccagttcttaacccgttgtcccttgagtctacccttgtttgtttccatttattctttgtggtctccctcctgtccttttattcgtagtgccctctctatctctctctctcgtttcctagtgtgtcgtttgtttgtctcttgttttttctccctggttggtgttttcctttgaggagcttgtggaggtggggtttcctctgttttgacttttagtatttgtctgcctagtgtttttagtgttttttttttttttttctagtgttttgtcctctgtttgtgcgttttcgggattgtgggtggaggtttggtgtgtggtagtctgagtgtgattagtgtgtaccgtaagtcgtgtggtttagtggtctttggtgtgtgaatctgtgttttttttattcctcctttttggcctcttctcttgttggtatctttgtctttggtgcagtaatggaagtagttattgctaccaaaccctctactaagggtaaatgttactcgtgctctgaagcaactgtcactctatctcctagtgcttcttcactcaaagctttaactaccttttgcctttttggtaaagttgtggcccctatgagtgtggatgttgccactgttactgactttgtgaaaaaaacatggcataacaatgtgtccattgtggcaatccctggtgaggcattaaactctaatcattttgaacttggctttaatgatgaggaggatcgttcttgggctttggtgatgggtccgtggtgtgttagggggtacacttttgttttgcaagcttggtccccgagggatgaaggaagacttcattttaaccacctgaatctctatatccagttacataaccttcctcatgagtatttttcagtggataatggaaagctcttgggtagcctggctggtgaagttattaaagtggaatttgacgaagctaaaccggtctcctggagtgattttctcagagttagggtggttatagatattgccaaacctttacactcgggctgtttctttgaggtgagttcaggggttaagaaatggattcagttcaagtttgaaagaataggtattttctgttacaattgtgggtgcctgggtcatcaacggcgggggtgtgccctctctacccctgtcacagtggagaaaggaaatggtattccatttcctctttttggtccatggctctcaacctcttcaacatatctggatgtattctctggggctaactcgttcgtgccgaaccgtgcatcctcggtgatcccccctcctagtc

SEQ ID NO: 28943 - DNA, 4775 bp, Cannabis sativa
  modified_base (420)..(424): a, c, t, g, unknown or other
cacggggccacacccagagaatgaaatcaattaatcaagtatcaacgattacaaagacaattgacttatacaagtttaaactccctctaaattattaccggaatcctttgtaatgcactttatgaatctgacttctgaaacaccttcaaatagcaaactcccttcatctttaaagtgtgagtgcttacttcctctcgaagtaaggcttgaacaagtcttctcccaaagaccactctcttgttcaatcaagtcgttctaacaaactctaaggcagaggaagaacatatatgagaaacactagagcctagatgaataactaggttctcacaaaaagaactctcttctcacaaataagcaaaatacaaaaatgaagactagaagagctgattcgaatgactgctctctaggttctatttatannnnntagaaaccctagagacagctacaaagtcaaatctacagctgtataaaactttcctaagaaaaacttaatttccagcatcaaaagcagattctgacgcaacaaatcaaagcaaaaaaggaaacttgccaaaaacgagtctgatcttgtattgggtcttgatacctgccataaacagtgtgtatgatctgattgtatcaagacacaatcgaatttaataaggaaaataggaagagtcaaagttttctttaaaaataaactttcgataagagaattgcttctcttataagaagtttccatacaagaaaagtccagctgaaaatacaatcttcctaacatagaaaagagcaataaaaccgaataataaaggtgagaaaatcggttatgaatgcaaacaaatctcaccataaaataaaaaatattttgacatctaacttgccaaaaaaagactttacaattttaataagttttgtttaaaaaataaaacaaaaaatgtataatgttttagtgatttaataaatagtttactttactaaaattattttaagattttaaattcttactagtagatatgctataactatcataaattagttattttaggttactgatgtaagtaatataaaatgtgagatcttttaagtaaaatatatttattttgtgagatatttagtgtgatattcggtgtgaatcattggagtttattgtatcaaaactaaaaaaatttacactaaatttgtgtaacattagagatggtctaacaatgcgaaaatacgatatattgtttgttagaaaaataattacattaataaaatagataacacctgaggcaggattcaacaagccttctgaatttcaaagagaaatacaagagcagaaaacaacaaaacaaaaaatatatattaactcatccaactagaattgtctaatatatagctatatgagaggaaataatatatgttgtgtttctattaatgatatatatatatgtatgtatgtatatatatgaaaagatgagtacattaacgttagtgtttatgttactgtagagagaaaaaaagaagaataactagtaattttactccctgaatttttgacaatagtgattttggcccctaaaatatacggcttgttaagaatccccctgaacttttacatttacagaaatttagtccttctgttgggtttgttgatctcacttttagtcaacgacagtgagtcaattaataagcaattcgataaaaacagagcaaaaatcaataagcaataaaaaacaccaggttttaaagaggttcgacccctttagttcagtaatagcctactctccttagattgtattgacttgagaacaaagaacacaatgtttcctctctcagagctctcacaatgaaatatctgagtattttctcttaaatctctctctaaagcaattcttttgatccctttttcattaaagctagatcactatttatagggcctaaatgcatgagggaaggtttcccgtttacttacaatatctataattggtaagaacattcattacatatttagaatacatgaaatgggggattgagatagcctgtcgtatccctctaatacaatcccatgaatgtagggattgccttcgtacttgggcttcacgataccattatggagtagtcaagtcttgacacatagctcggagaactaacttcattctttgctcagataatctatcctttactctgttcggccaagcagacttcgtgcatgcagatatgttacttgaagtctattcaaaacatctcttcgaccacgtgcaaggaatgatggccatgtgtcactcgtacatgctgccatgtcacagtgtaaaaaatggaaaaacatttgcccccaagtctgcgcgggacttccaaagtcgcgcgtggacttcactcggcttggatatttatttgaacgggtgacacgtgtttgatgcgtctgttggtgatccaacgtgattctgaccaagagtctctttcatattcgactcattaatgctgattgatcggtacctcaaattactctaaaaatttgcacgctttgacggttgctcttcaagtacttgaatgcctaatgtttacttttagggggaaaccgaagcatttaaattttgaaatggttgcacttcctcattaatttgcttataaatagggcagagatccctaataaaccacttttagcatttttccttcttgacaatttcacagcaagaacattttttcctctcaaattcttcgaagaatttccaggaagtgcctatctgtgtcattcgaacagctctaaagcttcaaacagtgagtaagttcttcatctgtttcctcttttatgtttgaatatttaattttttggctttctacggtagaaaattcggtagttcttgaacttgttctaggaaaaccgtagaaatctaggtttaggaatatgatattttgattatgcttatccatgtggcttgactgtgattgcattctgattttgattccacgatattcggtttcacttgcccattcggggtttagtgaaaattaacccttaatctgaagttttgaaattctggattataaacctaatatcatgcaaaattcccttttttaatcctttgatcagacctagttggtatattcaatttgtttttgttcgatatcccggccaaatactcatcttgtgtcctaccttctgtagatggaccctggtgagtttttgggaggagaacatcatatcgaccatgaccttcttcaacttctgtacgaggatcaacctcgtctttgtgccagtccatcctcatcacgtgacaatctttccaactcgagctttgaggactgggagataagcagcgaacatacaccttctccagaatgcgaggtgcagaaccattgttatcccgatcagattgcaggtgaaggctacagacgttttatctgggagcttaggaaggggtggaggcaatattttccgtccaatcagacatacatcgtccggccagatatagttgacactatacctgtaggccgcccaagttttgctgttgtaggtacgcctatagccactttttgtgtgaccattgctaggcacactgatcaagctccatccagggatagaatgatggcacgcactaaacaaacagttcggagatccactttaactgatcctcacgtggctcggcttgccacaatgctgagtgctgaacaagttccagcgtgctgctgaggaggaagacaatgagggggacgtcaaagttcaagaggtggaggattagggcgaggtccttcttgacactccatctaaagccgaggaggagggagttgctcggggatttccctttgggggtttcaacgaggaaggggaacccgtgtccgaggttggtgaagtcctggtagagggtgaagactatgttactgaggaatacactgaggatgttcctcagagaagacaaggtgtcgtaggagctcggtgggtttctcctccatccatagtaacccaggccaagattaataatttggagaagcaagactacttggggaatgttgaatgcttcttcccctgtccaaatcaccgagcaaccagtcccaggcaagggttttgtgcctggtcgggcgcccataccaagcagggtgtaatgctacctttgcttccgtacttcaagaggattgcaaaatactaccacctctgcctgacccagttcactctgaagggcatcaaatatttgtccgccctgttcatcctttacgcctcgcaaggatggggcgagccatctccgcacgatactaactcgcttttcgacctgaagtcaactcccaagcagagcaggtcggggtatttctacttctctcaactagatgagaagtggctgaagggcactatggacaccgatattagaaaaataggacattttatggacgagtactactttgttcagggcatggataccgtccacactcagttccagtagatttccttgtactgccgcgctcctttcacattgggactcagggagagggcacaaaaaattcttcaactgccaaaagatgctcggaacattactctactggccactgaggccaattatgttaagtaaaaactcttcccagaggactttgtgccgaggcccgtgaaggagaagaagaaaaaggcaaggccaagccgggttggtgggactgagcaagaaaaggagctcattcaactcaagcgtgaggctaagttgaagggagataacagagccaagcagtatgctcaagaatattcaaagcaggagaagccgagcaagaagaagaagaaggctcccctaactgaccaagcaccagtaaaacacgctatcaggattaaggaacctgat

SEQ ID NO: 28944 - DNA, 5086 bp, Cannabis sativa
attttgttgtaacactattctcatattttttttgttctttttttttttttttacttttttatttttgcagatagagcctatcttgagtggaaatctgcctcctgggtttgattcaagtcaatgccgcagtgtgtgagtgttgtatagacattttctttctcttttttcctttttcttttcttatgtttttctttttttaggaaatgagtgttcttctaggagcgttttgttgttaagtagttagttttttagattaaaaatatgtatatacatataatatagttccttaaagtaattgccaaccgtgatgctcaagagcatatcatatatttacatattttgtagatacttttaaaaatatttttttttatgttatcaacatctccccaatttatgttgtgtccgtatatttcagtttggctttcgagttcatctgtgttaaatttatgaaaaatgtaggtacgtaggtaacatccacccgcaggtcactgacacagatcttcagcaagtattttctactgctggtcccttggaaggatgcaagcttatcaggaaagataaggtgatgctgtttgtgcttattttttcttttgtgtttgattaacaagttagcaacaattttataatcttgcagttgctgtgaagattctttgctctgtgcaagttgctgtgtctatgttctcattttctattgtttatatttagttgaggcttttgcggcctcagctttttgatagatttgcatttgactcatttacatggctcttacttttatgcagtcatcttatggtttcgtcgactacttcgatcgtagatcagcagcttttgctattataactcttaatgggaggcatctgtaagtagagatcttcactggtttttttgccagactttttttttgtaaaaatttattagttatttgactctaagctaacatgttatttcttcctcattttcttcttttctttcttttttctaggtacggccagcctattaaagttaattgggcatatgcaagcagtcagagagaagatacatcaggtttgaaaggaacctgaattttttattacaatgtttaactttatccctttctttaaatcaatatgatcttcctttttttcttttaatctatattcttcaaaatttttgcatacaggtcattttaatatttttgttggtgatcttagtcccgaggttactgatgctacactgttcgcttgcttttctgtttatcccagttgttcgtaagtatcgtttctgctgtttactctattagtttttctactagtttttagattttgagaaatactttaattcacctatatgatagaaacagatgcttgagtaagctaacattgggacatattaattaaaatttcagagatgcaaaggttatgtgggatcagaaaactgggcgatccaggggttttggatttgttgccttccgtaaccaacaggtagttgaatttacaatttattttttgggtgttactgttaaactttaacttgttattggacgtttatcttttgaatcatatcatgaattctttgtttctttggcaggatgctcaaagtgcaataaacgacttaaatggtgagatgaattcattgttgtgtgtgaaaacagtagatgtactagttttattatttatctttcagacataacgtcaagtgttagtttaatttctctcaccctctaaaaaatacccaacggtttgttggacagttttagacctgtgaatgagattttcttctgagaagaaatattgttaagaaacttttgtacaacatgctgacttctgcgtctcatgattttttctcttggtcttgttttttttttcttttaatttttttttgtccattaaaactttatcaggggcctctcctttctttaagacttgttagatctttactcattctgtgtgtaatcatgatgttttatcaatggattgatgtttagattttaaccatttatttgctggaacatttcaggaaaatggcttggaagtagacagatcaggtgtaactgggccacaaaaggttctactaccagcgaggacaagcagatttctgattctaagagtgttgtggagctaaccaatggctcatcaggtgagccttttagaacctcttatgaaaatcgtgagttctgttgtgggtttggacttaggatttgatatttttatctcctattttcttccattgcccataattgttggagaagtttcttgggtatagcaattaatttgtcaaagattagattccatcagctgtaatctattgaggcccttgttagataatacttttggctacatgctccctattttctcttacaatttaactttttggaaaattttgtgacattgcccccacccttgtctttaattatatttgtgcttttcatgtgctcagaagatggtcaggagatagctagtgaggatgctccggagaacaatccccagtatacaaccgtgtatgttggcaatcttgctccagaggtatggattgacgatctctgttacaatcactaaatttattatgttcatgtaatcataaacaagtgttgaattagaagacttttaaacgaagagttttaggaaccatagtgtgaaattgttcagatgacaatgcatagacttaagaaaagagatctttggaagtgctgttaaaaagaatctgatttaagtttggataaacaagtccaaggattatgtgtaagaaatgttttagatgaaactattatcaaatgggttagtctggcatcatgtgatagtaaaacaccaccgcctcactttcctttcttttaacaggacattttgaaagatggattttcgtgtaaaagtgatttattaaacaatcttccatatttgttgtttcaatgcaagttttagttgagttcttccagattttcctaaatgtttagttacaactttttgaaggtcacttcagttgacctccaccgtcacttccatgcccttggtgctggaactattgaagatgttagagtgcaacgagataaagggtttgggtttgtgagattcactacacatgctgaagcagcaatggctatccagctgggtaatgctcgtatgttgtatggcaaaaccattaaggtatgctctataatttttaggcatcttcagagatgacacttagttttgttttgaacttggttggtctgttgggatcactagttcttatgtgttgtgatttacaaatggcattatgatgtataagtatttgtcatgtactctacgtatgctcattgtcataaatcttactgttacagtgctcatgggggagcaaaccgactccaccagggacaaactctgctcctcttcccccgccagcagctgcaagtatgccagttttctctgcagctgaccttgcggcctatggaagacaaatgacattaagcaaaatgggtggtgctcaagcgcttatgcatccccagaaccagcacgctctcaaggcagccatggggatgggtgcaggaggtagtcaggctatatacgatgctggctatccaaatgtagctacaacccagcagctcatgtattaccaccagtaatttcatgcaggaaaggtagtcggcttgatgaaataagttgctcagatttgactgtaggataatatattatgatttttcctctagtttttctttccttttttttaactgtttttttagattgctgtatttgtattacaaatatacctcatctgagtgcgtgaacaggttgtgtgtttctattttccctgttgggattgtgacttattggagctttggctaaaattattactgaatctctgaatgtgccataactgaagaaactctcgagcaatgaataaataaaatatactagtaataaattctatgggtttctcttctgtaaagaaaggattatgttcgtacatggttttctttctctatcaataaaaataaatatactagtaatgtggaatcttcacacgaatttttgacgtcgtgcatgtttgaaatggttttccagagcgcaaaaaaaactacccactacccaccaatttcgagctcttagcatttctcattaacaagtctattttgcaacgtcgagccaatatttttctccataaaaatcattaaatgtttttttgattaataaaatcattgaaaattattatctacatctatacaaatgtttttctttttcttttctgaaaagaacgcgagtatgatacataaaaagctagaccagaccctcttttatttcaacttaaatttcacatcgaaaaatggtaattggtgtgaagtgcagtgctgtcaaacatggccccattgtggacaaaagcgaaacgtctttgtcgacctataagtgctctgtttcttgttcatacgatttacctgctaccctttatttttggatacaataaaactccaccaaattacctaaacaatctactgatatataaacgacaaaaaaccaaaagggtagcaataatttactattttgcttcgatagctcgaacttttagctttctggtccataaagtggtcgttttccgatcaacaccagactcacttcatttccgttttttaaccattgatgccataaaccagtagaaataaaaactccttttaataacagatgtaatatattaatttctttttattaacaaaaagggcaagtaattctcattacagtgcaaaattttcttatctctctcgttttttttttagtttttctttggtaggatttagttagccgcataaagctgattgattctcgtattatgtttatacaatattgtaaccggtttagaaagtgactaaagttcataatggccttttggtttcctcttcttctactaaatggcaacgataccagttgagaagatttcgcctttgccataagatgatgatgatgatgatgaagctgatacatcaacacctcttctggcctctgatctgcactgtttttctttcctttcatcactcaaaatctgacttgcacgacactctggactacaaaacgctttctctcctctgttaaaaacccaaagagaataataaatcagttgagctcatattcaatcaattttcttactatta

SEQ ID NO: 28945 - DNA, 2308 bp, Cannabis sativa
ttcaaatttctgataaggaagatcggataaaaccgcagccttagagcatattttgaattcttagtaattttcttttcacaaatatttacacaacataagacaatatttacaaaaaaaaaaaatgtaacaaaaaaagttactaacctcttgattgtagatttcactaagctttcaaaaattacctctccgtcaacggtaccagaatttgtttaacgcccaaatatgacttccactaacagcggttgtagtttttacaaatttttttttacaaatgttgaatgtttttaatgttttcataaaatggtgccctactatagaatttttttatattattattttttaaaaaaaaattaatattattttgacatacataaaaatttatttattttttaaattaaggaaaaaaattaattttaaaaaactaataaaacattttataataatatataatagatatcttataaaatatattaacatattctaaattaagttaatattgggcaacattatattgattagctactcctataagaggaaaaatataaatagtaatcttaatacaaacaaaaaatgaataattgaatatgttatttataatttacaacataatatattctaatcaatgtgaaagttttgcaaaatttaaaaatatatcaaaaaaataatataaaatggtaaaatcttatcttacaatgccaccttagacagatagataggattttgggtgaaggggttgagagtcatcatttctttaactattttgttctgcccaaagtagagcaaatcgtcaaactctctcacctcaaaacaaagtgtgaagaaaactagtatcaaggaacataatggaagctgctaataaactatcgactattgctaaaacatttaagccttcaccaattcaagaactatctcatctagcccagtcttgcaatgctatcaacttagctgaaggcttcccagatttcccagcacctcttcatctcaaaaacgcagccatttcagccattcattctgatttcaaccaatacaggttagtttatacactcaatttttgggggacgttagtaaatataataacattctaagactaaatttcattagaaatggtatgttctctaaagataattcaatataatgtaaatattcccaaagacattacataacaaagacgcttatttaataatattattggtataaaattaaggaaagtgctaaaggtgtgtatagtactgtgtaaataaagctatctttcaaaatttaactatcgaaaatactttaaaaatataattttttattttattattttttatatcattttttgtacttttattctaaaatattttaatagcaagcatatctaaaatattattcaaataatttgagagatgtttctatcaattttattagacgttctgcaaatagtgttgctcactttttaactcgagcatcttatttagttgttgatcgtgttatcaggagtagtgatgttactccaaattttaataatgtgatcactatagattgcaattaataaagatgatgattttatttccaaaaaaaatattattcaaataattttatattattacttaatatatgctgaataataaaaattttcttactttattacaaaataattaaaaaaaaaataaaatacaaaaattataataaatattattgcaggacatttttttcactttaatagtaagcatttaataaaatatgttaaaaatatatttatatcatcaaacattctttattaaatgtagattaaaagtatgcaaaacccataatcaaatacagaagaaaacatatcagacttttagctatcaataaaaagttccggttcttttgaatcaaatgcaaataaaagctacgctataatacatcttttgggatttttttttcagtgtaatatattaaaattattatggttacaactttggagagaaaataaaccaatatcagattaacttaaataaaaaattaattggaaacttcagagagagagagagaaagaggggataccatccagttcagaataacttaaaataaaacattaattaaaaacttcagagacagagataaaaagaaataccttgagttgagcaatgaggtctgagaaagagagagacagagagaatcttacataataattaatggagtttttatgacttaggcacaaagaaggagtaaaacgacattcccaggcatgcgtagaagaaatagagaggggagaaagtgatttcacaatttgttgtgcctagaaaaaaaagagaacgagaaggtggagggtcagaaagagtga

SEQ ID NO: 28946 - DNA, 3398 bp, Cannabis sativa
acgagcaggtgaagattttacatggttgggcagttaggcctgaagcatacgatctttgggacatcgggcccttttgctgtatagtcactaggcgacaaaacttttttatatgtgtatagctaacttttataaatgtattttgtaaacgggatcccgaaattttatatatgtaatacttaagtttgtttttaaataaccaaattttaattaatcacgttttttgttaatctcgttgattagcaacgagttgcacaatacgtttaaaatcacgttaacacgcctaaattagttagggtgttatagttgaactcttctccttgggtggaacctcatccacctttgaccatttggctggaggtttctagccagagccatcacctgacctcttcttcaaagcttgcaacactttctgagacatagttgcacatgaataaaacgagaaggtcaaaacaagtacgatatacgaaaatgcaaatgaaatttgaatacaagttaaagtaccctacacgtaggcaggagaaatttcttgaacaagcaaggaaggagcatcatcgtctgaagaatcctcctattcctactacaccgggacaatttttctctttccagccactggggcagatggtcgagcaaccctatcaaggttttccctaatcttgatggatccctcgacaggtacttggattttcaaaggggctttcctctttctcttcctcttgctcggagcctcctatatgggcacaacctcttctcgtgccttggcctttggtacaaaattggccaaatgaagtttgtatttaacaaaattagcatcagtggccagaagagaaatgttctgttcatcgaaagaaagttgaagaattttttgagccctcttcctgagctctaatgtgaatgggtgcagcagtaggatgtgatctgctaaaaattggtgtaggtggtgtacatccccttgacaaagtaatactcatccacaaagccccctatctttgtcacctcgatgtctgtggtgcctgtcaaccatgacttctcaatctgagaaaagtagaagtacaccaacctgttctgcttaggacttgacttcaggtcgaacatccagttagtgtcatggggggatggctcaccccatccttctaaggtgtatagcacgaatagggcagataagtacttcaggcccgtgggagtaaacttggtcgggctgatatggtaataattggctatcttcttgaattatggaagcaagggtagcattgcaccctatttagtgtgagctctcaaccaaccaaaataaccttctccagggtcactagccacttgttcgggggagagaaggaagcattcgacattccccaagagaccacgatcgaatagattggtcatctttttcatggtcccatatgtggagaaatccatcgatctcctagtggacttttccttcttgaaggatgagcctcaatatactccttaacaacatagtcctggccggcctccaaaacattgcctacctcggatactgactttgcttcatcattgtagctgttgaagggtagcacccaagctaccccttcttcctcatcgtattcaatattgcaaggagtagcagggcagacctctccctggtcctccacttctaggacttcaatgtccccagcagtgtcttcctcgtcagtagcaggacagatctgttatgccctagccagggttactaggcgagaaatatgtggatcagtcaagaaagatttcctaacagtctatttactccgtgccatcacacaatgcttgggcggatcagaagtgtgcctagcaatggtcacagcaaaattggcagtaggcttgcctacatcagtagggtttggacggccctccggcagagtgttgaccatgttcggatgaactatgtacgtccagttagtaggaaggtagcgcctccaacctttcttgagttcccaaatgaaacgtctgtatccttcacctcgaatttggtcgggatagaaataatgttgcaccttgggctccagagaaggagtatgttccctactcacttcccaatcttcaaagctagaatttgaaagattgtcactagacgaagatgggctatcatggaaatgaggatgatccttgtataaaatttgaaggaaatcctagtaaatatgatgtttgcctcccaaaaactcaccagggttcatctacaaaaggtaggagacaagaaagtgatagttggtcagagtaacgaataaaaattaggttgtatatactgaccacgctcaactgagaaatcaaaagtgaaggtttcacccagaaatagaattttcaatcccagaagttctaaacttcgaattggaatctgattttcactaaagtcgtatgtacgagtggaaataaacatggtaaggttaaatttgaagtgtagttagacgatcagatgctatggttaaacataaataagatttcaggtcctaatcaagtcctaaacctagttattctatggttaaccttgaatagtccaataaccggcaagattcataacaaaaaacctataaatcagacatgtatttcattgcaaatttgtaaaagaaagaaatgaagaacttacttactgatttgaagctttcttgctctactcggatggaatcgtcaaaagttttcttgtgaattccttaaaggatttggaaggagatttggctaaaagatttttgctttggtgtttgagggttgaaatggctaaaaggattgttattgaaccttaattctttttaaaagcaattcaaaaagaggattaatcattccaaaatttgaatttcttgaacttccccccaaaaaagtacattatgtactcattatagggagtataaccgtcaacaaacgcaaggttcaaaccgtgattcgaggaaaaaccatcaattggcattaaattcgtagaaattgaagagacccctaatcagggtcacatcgatttgtcatctgatatctcggacacgcgtcaaccatccggacaagactccaggcttatttaagtccacgtgcgaccaggaaggtcccgcacagacttgggggacaaatgttatcctgttttttgcaccttgacgtggaagtatgaatgaatgatacgtgtctcatgttttcaatacctgggtgtaggaaaatattcttagtagctcagttatggttggtaaatatccgtagtgctcggacgaccgagcaggtttatggggtagatgtctgaccaaggtaaagacatgtttatgtcgagcaaaacaaggaatatgatgatgttagagatcaatctcattgtgtccaaacacgaagacaatacctataatcacgaggctgagtcagagaattacgacaacacatcctagtttcctatttctcacattgtaattatagaattaatgtagttt

SEQ ID NO: 28947 - DNA, 3156 bp, Cannabis sativa
taaatgtgaaaaaatgccatagaaaagtggcaaacctaaaaatgccatatttttctaactttgttatgaaatcccatattttatgtaattttcactatatttaaatattttaaattatgtgaactgataaaattataaacggttacgtgtaataaaattatacaaagcagttcatgattgtcttagttgagtgcataagtttcatctcgaaactaattgatagtagttcatacattttatatatgatatttaatttttacacattatcaattatcaaggccggtcctgaaatttagtgggctataaggaaaaaaattatttttgagcccttatttagaaaaaaaaatagtatttttcaaaatcagcaaaaaacttgtgtaattttaaaagggaatttttttttttaagccgccctaagcacagatctagcccgcctatgctcaaggctaaccctgtcaattatcaatgtacggtctaaaatatatcgattatcgatcataatcaaccgaaagagcctaactaagtcggttatatatatatatataaaaaaaaaaaaatttaacaacactttcaactaaaagtctaatatttatactaaaaaaatataatgcttcattattaaattaattgaattttttatttaaaatgttatattttatactcataactactttgacatctcattttattatttttattttgtataaacaatttattttatttattttactctaaaatttatttgataataatatgaaagaaataaagaaaacaaaacatagaaaagggtatgaataatttttttttatatataatatattataaaaaaaataaaagagaaatgtaattttcaaaaaatgagtacgtaacgcatgcataaagattaatatattaataaataataatgtgaagttaaaggtaaaaatggagttaaaaaaaaggtaaaaatgtcaaaatattttcactcccaattttaacttaactatcaaacaacgatggttcaaaaaagatatcaaacaacgaaaaaaaaaatttctaaaaaaaaaactatgaataactcaggctgcaatgttaaaactcaaatttagtgttaaatcaatactaaaaatatactattttaacactaatttttttttcttacaatcaaaacactaaaaactataattattattatattattattttattactataataaaaatatttagttgaataatgaattatttaattagtaaaaactaacaaaaatgtcatggtttatagtgtctactattattagcgagtcaccgtccatcaaaataagatgagttttatttctttgttggagcattttgtaagaaaaactattatatatatgtttttaaagtattaatagagatggcctcagtgaaagaaatatatttagtacaaaaactaagtgaagaaataattaatgtcaaacaacctatgcctattatacatcccaaccaaaaataaatatatatttctttgagagaaaataattttctttatcttatactttacatctttttgtgctattttattaattaacatcgaacaaggttacatttttttatctcattacaaagaatacaagattagttctttttatggctatgtcttaaatgattgtaagattttaattgatggtttatgttcagtctttatttaactttttttttgtaaaatgatatgttaataattttgcacatgcctttgtacaagcttcatttgtggaaattgatcgtgtttttagtgaggattctttacacaccttttacttattcattgctacggatgatttaatttaatgaagttaaactttattaaaaaaatgaactcacatcaagaacaataaaagaattatattatatcaatcaatactaaaaaaaatgttcataataataattatgatcatcgaagcatcttaaaactaaattaaaaaagaaacaaaaacatgttaacattaatattgtgaataatacaaatcacgacaaagtagtagtgtttgtgtattgatatcagtattaattttcagcagcagcaacttcgttggtagtaggcatcgagtagcgacataaagggcacaaatgattaatttttagccaagaaacaatacaattcttgtgaaaaagatgagaacatggcatctctacgattttcaaaccttcgaacaacaaattttcttggcaaatggtgcaactattgtcggtacccacagagactaatagattattatcatcctcattcaattctttaagtttttttatggattcttgtgttgcgggaacatttggaatagcatcaagtgcctccctaaaagtagcatcaataatatttgattcttgttcttgttgtagactactaacggcaacaataaaaagattgatagtaacgtatttagaagccgcaaagggaggattgttgagattattgatgagtctagttactatttcggttgcaaaataagatatcactattgaatctgtcacaccgattctaactagaatagctctagtaaagttgaaaggatcagagaaatagaaagtatgattgaataatgttgtttcatgtacacttcgaataatgtgtcgagaaggtaacaatgcatgacaaaaatttagttgaaaaattaagaacttgctgtttagttgggcataaaaattttgtgctgaaagattatttggcaaatctagactaatagtcatgtaagtagtattcattatttctatttttataatttaaattaataattaaatctcactactaaattttggagaaagagaatttatttactttcttgaaagtactcttagggttttgcatattgattaaaagtacgtattatttatagatgaaaatcagaatacctaatcctaaaaggatattgttaaaaaaaaaatcgtatagataattttactactcaaaataaaaaattttgtataatttttagaatttaaatatttaaatattgtttgtttagttgttgatagatttaaagttaagtttactttcattaaaagaataatttattaaatgaaaataaaaacatttctataatttatttatttatataaataatacattaatctttttttttttcttttcgtgtataacaagaaataataattacactcaaaattaaaaaaaaaaaaa

SEQ ID NO: 28948 - DNA, 2423 bp, Cannabis sativa
gactgaagaagccccaggtggagaaggaggtcatttttagattttcgccaagttttttggtaagagaaagagaggtgaatgcattgcgcgagaaggcttcagatctggggttggatgaacgtgaaagtgtttacacatctggggttctcagatttagtttatttttttttgtttgttttgcttctttttgtgtgtatttgtgatttagatataaaaaatagggtacggtagtggcgttgatgattagtggtggttttggtggtagttgtggatagtacggtggttggtaggaagtgatggtttcggtggattggtgatggtggatgtcgatcatgtgaagatcgatgaagaacaagaaaaataaaaataatgaagaaaaaaaaattgttggaatgaaaaaatttattttacttttaatttttaaaatatttttctttattttaaatattattttaattttaaatattcatttacatagccaattaaattgtgccatgtgtatactgtgtacaagcgtggatattccaacatggcacttaacacccaaaaatagatgaaaatattaaactgctaacagaacatgagttttggcggttttatcactaaaattttagaattggaggttagttacaataaactaatagtacttatggaagttatgtcgcaaattactctaattataaatcatcattcttatgttgtgttatgactaaaaaatttgtgactaaagatattagtcacaaatatcacaatttgctgtgactaaatgtatttttagtcacaatacttgttgtgactaaaactaaattaatatacttatatctaaaaatattatcttttactcacaaataattttttgttgtgactaaaagtctaaaaattatattagtcacaaaaaatttaattatgttgtgactaaaatgttgtcactaaatttacgtaagcatttaaacagaattatatgaaaaaactgacctaatagaatgactaaatttctataaatataagagtttctgagtaatttttaacaagtcgtatattttaagggacatgatcaaatgtgttgaaagttcatcaggggataaaatcactaactgcacgaggtttggttttttctttcccaattttcttacatttgtgagaatgagagattttataacttgagaccatttctttacgagaagagagtgtaaaattaatagggtatgtctatgactactttttcgctcaatttagctttctacaattcaatactatatacgttacaataataaatttaaatagcgtatcaatttcgagggtgtaataaaatgatcgagtgtctgtctagcattactcttctagaaatacaaatcttcaaatcgcgaaccaattggactttaacctcttttgatgttccttgttgatgtccaccaaaagcatcttcacaaccatttgaaagtcctggaaatttgtaatgatttcatagataccaatttcttccatgctttctctaaagactggttctacactaaaattggctcttaattcaataaaatccttccaatattcttgtgcttcctctattttgaagggctctaaagccatgcagataatagcctgcatgtcacatccacatttatttaaaaatatatcatattataataagagtcgattgtacttattaatcatgttattataaagatgttattaagtcaggttagacttgcatttagggcccaaaaaaaccctaaaagaataatttaatttcttcaaaaaagtgtacaagttgttttggtacgtacatatatctttaataataaggctaaattaattggtgttgtacctgatatagtggaggacgtggatcagaaatattttgtttagttaagcatttctttctttttgccatcatatagttaccctaaaagtacatcataattaatcagtcaaaatgtataattaatcaaacaaaaatataaaagtttaagtaactttttattttcttaccataatgtttaagaaaaagccatattttatgtaatttttacttgtatttttggagtacatatatatatatatatattaatattattgagtcactatctagctagtacaagagaagttaatataatgagtattgtatgtctatatgataccttgtaaatgagcatttctacgagtaacatctccatctcataagcctcaagaggctttatttcttgtatatgatccaattttttcttaagaagctgcactgctttctcttcatttccactcatttcaaattttgcaacaaccctcttttcacacacaaacaacaacaatattgtaatatatatatatatatatagaacacttcttaacgggtaatacccattgatgggaactaaaaaaattaattaggtaacaatctaataactttttatggcaagtttctaaca

SEQ ID NO: 28949 - DNA, 2248 bp, Cannabis sativa
ttttaaagtattagaatgatattttaatggaatgttctttttactattttggtggaatgactattccattttaagaaagaaagaaagactattctaatgtaacatgtacaagttcggatgactaaaattctaatagcctagattgtttgaataattactgttgtttggttttttcatcaactaacaagataggacgatagagtgtcttttatagttcaaccattattgaacagacatacttctattgtagtcaatgttattgagactgtatatattgacagctagaacaattatagagaagtgattaatgtttttgattttgagctaatggaatattggcgttagcactgttgatgaacactctcgtggtgtttaatgagttgtgcgttagtatttatctgaatatcactccttgttatggccttctacatgggtgaaaatatcctaccactaaatatatagttggttaatatgcatttatcttccacatcacctatcatcttatattgtcatgtttttaggtctctaacaattatttaatgctcaaacatttggcttaaatttcaatgtaatttggttaccgaaatcatatgtaaatattttaataagaatgaaactgttatatgaaaaaacaaatcacaaaaaaaaaaaaaatctcatatcgatgtaccttttaacaaaaaaatttcataaaatatgtaaaagcaattaccaaacatgaaactaagattttaaattgattaagaatatatatgataaatatgtattccaaaatttttgggccaatttttttggtacataatcgattcctccgatacaaaaacaaagtattctgtacaatcattccatgaaaaagagaaggaatagcacatgcaaaaaggaaaattacaaattgaagaaacattgaagaaataaaacaaaaattaagaaataggaagaagaaaaagaaaaagaagaaagagaaagagctggcaatgggttgcacacacaacctaaaacttttagtgacagtaaagaaatagggtgaagaagaagaattgagtggagagagaatatattatttaattattattttaaaaataatatttacttttacttgttatatattattaaaatattttaagaaataatataatgtagtacaaatatgtatcattattatacatccacctatttattaccattagatttattatctatggttgtaaaaatttctctaccataagaacaaaacaatagttcataccataattttatcctatatatataaaaaaaaatataacatataaattttagttcatcaaacattatagaaaaattacagcataaagatcaagaaccttgagttgttgagttcaatcctcctcttacgtacatgtaagaacataatatgtatacagttagagattagtttaaatttgtagattcattttatttatttatttgacataagaataataatattttagaatatcttcaacccattatatagcataatatttttttagcaaagaaaataatttttagtcaaacaaaagtcaacaatataatgtgagactacaaaaatcaagcagccctccaaaagaagcaaatcataaagatttcattttatctattacatgaacatcccttctcttaaactttaaactattaaaacccaacactctagctttttttttttttttggttattttaaaaatttaagtattttacatagatgtaagaatataatatgtacatagttaaagattaatttaaatttacaggttcattttatttatttatttgtttgatataagaacaataatattttaaagtatcttcaactcattatatagtataatatttttttagcaaagaaactaatttttattcaaacaaaactcaacaatacaaagtgagactacaaaaatcaaggagccctcaaaatgagaagcaaatcataaagatctaattttatctattacatgaacatcccttcttttaaactttaaactattaaaacctaacactctagttttaatggctagtttaacggactcacaaataactctaaccgagttacatatcaaaaacacttgttgcggttgcatcaaataatgtagtaaatcgcagagaaaatggcattacaaactttaatactatatgttgcccctgaattcgcccaaaatacgtggaccagtcgaaaagggacacgtggatcagataacttgtaaatatttgacaagtctttgtatgccacaaggaa

SEQ ID NO: 28950 - DNA, 4867 bp, Cannabis sativa
caatggatacgagtatatcaaaggaaaatcactaatattacatttacatgtgtgacaataatagcgcagttctcaaattcctggaagaactatacgcttaaaagtgtaaataaatatgagactgaattttacactatttcttagaagagatacattttagtcttgacataataatcatgtcattatcgatattactgtgataaagaacatctgaattgggaacaaatttaaaaagcaatgaaaatgagaatatggctttattcaataagataaaaacagatacattaaaataattatgaagatactaaaagaattacaatggcaagttctcaatcaacacaatttttgtcccttttcaagaaaatgatataaaattacacattttagatttctgcctgatatttattctcacggaaatcacaaatgacacgtatttgaagaaccaacagctttagctcaatctcatggttaagctaggaatagagctttacactgctcagctgtatcttcagggctagtaactgcaaaaaaaaaaaaaaaagtaaagcaaattgtttaataatagtgaatatacaagaacaacaacaatatttcgcagtctcttttttatccatctccatcaattactctctcaattattttcataaggccaataaaatgagtctgaagacttgagacatatgacaaatgaatcctttgtacgggtattgttttaggaattctggccatttaaaaacttggatatatgaaaaatatgattgtgtaaattagaaataaacagtagagctttacctgtgtgacctacagttctttctgactcataaatttcatggtcgtttccaccctgcgtaaaataaaacatagcataagttaaaattgattaaatgaaccagtgtaattgatctactgacagacacgaacaagaaaattgatccatagttaaaatttaaatactttaaatcttttttgtttgcaaggccaaacaagggatgtgaaaacattaaacccaactcatgtaatcttataaaacagttaaaaaaatatgtataaattcaaccttatggtaacatgcaaaaaattaaggactgaaattgcagactaaccttgtaagttttgtcaccaaagaaatggatttcttggaagtcgtcaaggtatttcaagcaatatgttttatcccaaccttggggaaagacctatgacatgtaacatgaataaaataaatttcaagcaataggtgtctgtgcttgaagattaactgcattactaccagcagtcataaacaataagtaacttacatcaaagctaatttgtccacctatggagaatgtcaggttgagatgagaaaacttctcccttagcactgaaaccatttttgggcgtatattttgaacctgaaaccaataaactcaaattaaacaagaacaatatttcctcgccaaatcattgttttggtcattgaagttctttttttagtaaaatgttatgtagttgaagatgaagcttttaccttgtcatatctttcaaattcatccctttcttcctggctgcagtttctcccgattggtgagacattgatcatcccacttcgaaactctataaatgttcctctaatgtacaataaggaaagcaagtcagtctaaaaaccatttcagtacatgaaaaggaatagtggttatcaattaacaaacctttttattgggatatccaggtcagcaatataatgaagagtaaaattgataaattcctgcagccatttgaaatttcattaaaaaaaaggcatattgaatatgttctacaattggccatacaactctgaacctatagaaatatcactacaacaacaccacttcccaagaacaagttggaaacaaatagattcttcaaacttttcaacagtttgtgcttttgatttcatgatgttactatatatggtaaaatttcatcactaaattcttgaactcaaacaaaatatgtactaaatcggctccatctgtttccagagttcatatcatactacccgcaggtatcttccataaattaaaaggtgttgcagaagatagagagggttatacctttagctggtcttctccaagatatgacttcaagctctaagcaaagaaaaatgcataaaacataagtgaaaatttctctagaatttaattaaattgaatctatataaacaaactattagaagggaataagaaagaaagtcaacaaaactttgttataggttgtaaacatgcaagttaccgcaggtgaattatctctagtacgtgctatgcagtctgtatatacaggttcatactgatacgtataacaactctaaaagatgcacaaaaacgataagaaccttttttttttttgagaacaacgataagaacgttttaactaatatcatttattactttggataactttttttagaacaaaagattccacctttacactaaactattcttttttgctcacatgcagggcatcaaaaagtatatttaatttctatttcttgtttccataaaataaaccgatcagaaacggacaataaccttatgatttgtttcttgggaccacctgagtatgaaccaatttcaacaattctcacctattaccactacccccactaactactaggtttatttataaatctaagaaaatcaacatactacaacacacaacttgtttatacagacttcatcaacctatacctgggtgcccattagcttcccatctttgtgagccacgaggccattctcagaaaaaacataatcataatcatcaataactgcaacaaaacaataagcatatattaatagatcaactgaatcaagatcaacttttgtttccctcaaagaattaatagatctagttgcaacaataatggtagggtatatgtgtatcaatattcattactgaaattaattgtaaataaagtggtcctcggtctacataaagagtatgaaaagatgaacttcaaccactatagctcatattcaaaaggatattaaaggtattaaacttggaaaaggagaattctgcattcacaaacgagacaatagagtatggctaatggctaacataaatacctgtctttccaagttgctctgttatcttgctaaggtcagatccccctacaacaccgactgtgatgacctgcagaatgacaaggttgtctcattatccacaaattcataacaataaaagagacccaaatgaaacttcacactgttacacaaatggatcatgtacctttctgagttcacgcataaatgtaagcatttggggagtagcctcctacaatttaacgggaacataattattaaagaattttttcctaaaaatattgcccataaaataaatatataaaaagagccactagaattaaaactaaaccaatctgagtggaaaattgaaatatcaaattacctttcttggagctgtgagagtgccatcaacatcaaacaaagcaatcacaccaggtttcctcaatgccattctctctggttgaaaatattatcaataagctgctaaatggaacaaatacgacaatgttattatggcaaatagcaatccaagatcaagtatatgcagctgcaagtccaaaagttttgaactttgaattacacggaatatatattagactaatttgatcgaaaacgaagaaatcaaaagaaacgtaaagaggtaaggtgaataaagagcaaagtcgaatttacaaaagagaaagctaacgttgagagttggggaacttgttgcagatcttgtttagtgggagagtgtaggggggattatatagattggtgattggtgaggggtgaggggtacagtagcttcagagtgagaggagagcttagatatggagatccgtgcaaatacgtggacaaccattgaatagagaatattcgtattagttcgggtcggaaaccagacccgcccattttagaattgggtcacccacacacagtcacacacgcacaccaaaatctaaatctgctaatttagtctaaacaggtcacgcatctcctccactctgtccagaatattaagacatcctttcctttgacataaatattaaggatcttctacagaaaagtatatatgtaaagtataaaatttccctctaccctatccgcactccatcatctgaaccgttagtttttggccaaatcatgaaacatcttgcctttgcctagcaaattcctttttcttatattggtaggtggttacggtagatctccccatactatgactcttccctaacttggattattatattaaattttttaatatttaaggaaaatttacattaagaaaataaacctactcttccagatctgggaattacatacatattaagcccaccaacaatgacaagcggtataatattttgtttgtttttaaatgagacagatattatttgttttacacaaataaaatactaagacaaaggtgtgttgacgtaaattgagtgtgctcagtcacattatcattacttgcagttgcagtttaaatcaaagtattcacattcctatgagcagtgatgataaaagtgaacgtaaatacgaatgtacctcatctgttcaatctaaaaggcattatatagtttcaatcaaagtcattagaaggaagaatacatgcttacaaaatttaaatcaaaggcatcatatatacacaataatacaagatcagttagaaaatcaaaatctggggtttcctctgctgtaaatcctcaaccaaaaccagttattatacatatgggattgcgttactaaattatacaatcatcccttatgcattgtcacatagaaataaaagtattggaatattctggagtttatatgtgtagcataagaaaaacaaacgaaattag

SEQ ID NO: 28951 - DNA, 1916 bp, Cannabis sativa
caaactcccattgaactcataaaacaaaatgtaaatgtatactcatctttactataaatacaaacatatgaaagtacttctcttttaattaatgttaattttttaatttgagagtttagcggcctattcaaatattttgatttctaaggaacaacatgtcttactgcttcgacaatagtagttaagtcgatcatttgcttcatttgatttattatcattgattagtagtagtttattgtatttttcaacactagtattttattatgcgtagtatttttgaaatttgtgcacaatataaagtgatatttattaattaaatttacaaattactgttatttttaaaaattattttttagttattttttttacataatagcattcaaaaaatatctatacatatcccatataattataaaaataaaaattaaatttactaatttttgcaaaaaaactctgaataaaatgtgttgtcggaagaatttagacaataccaaatatgcgagtatgcaaacaaagttgaagtactcactagcagttatgcgagtgctcacttagaatagcacgtactgaaaatatcggctactaaatatacaaaaacaaaagtagaaataaagagaaaataagagaattatagtagttcaatcagagcttggtttgcttattagtccacttttaaaaatgatttcagcttagtttatttgatttagatcacccctttatatataaagaaagtgtcgtttaggattacataactgattggtttaaaattatttttacaataaatgatagtatttaattaaaataaatatttaaaggataaatgaagaacgatttcatccgttcttgacttaattgcagtatcgtatgcgagttgataagctgcgacttatcctttcatattccaacacatgaactcgcgggctcttcgatgttgtactcgtgggataggcctttggtcctactttttgaatgtctatgttcacatttgatcacattgacaacattgggacatgtgagtccctaacgagtggtggaagacattagtggttcgaattaaacctatctaaagagacaatctttacttgtcgcaggaaaaccatcatttggaaagccttgaaacatatccttcgacctcttttaacctttttaaaagaaaggtgcttgataatcctcactacactttgtgccatactcaagtctatacagtcaccatgcactctagagtactgttctagagcagttcgaatacagaatcataaaaggttctcaagattttataacaataatttacattgttgtaggaaatagctggcagccctgaaatgccgaaactacccctacacccaacaccccaacaaccacaaattaagggcaaaactaacttttggttttatgcggatctcaagggaatatgctttccccaaaaaccgaatatgccacttttcaaatcagattttatcttttcaaaaaccctattgcatttatttaatataaaagcaatcttttctttttcaaaaccctagaaaacattattcactcttcacacacaaccagccgaccctattattcttctcctctccttcttctattttctttgaacaacaagcttttctttgaacagcagaccaaacccagccaagcctcttcttcttccttccttctcccttgctgaaaaacgcagcagattttcttcttgctgcagccgacaccagtccagccccctttcttcttctaaccttcttcttcgagcaatagcagtaggttcaatggccgaacctactgctccttcacacctgcaacacaaacaaacccagagagagagaaacaatagcaacaaagatctaaaatgatctttgttggtttagaagatagaaacccgaaaaacactacaaaaaataaaggagaacacaacagaa

SEQ ID NO: 28952 - DNA, 2086 bp, Cannabis sativa
  modified_base (1867)..(1881): a, c, t, g, unknown or other
ctatatgcagtgcactgtaactagctagtactgcatatgtagtgttaaaatagtgctatgttggcaaaaaattcctacttgaactccaaatttgagattacattgaagatgttctagttttttttttttttttttttctgaaaatgaaatatcaactttattgaaatttagcattcatcatacaagagagcatgaagctcattaagaatgtcattcctatgaatgctacgatcagagaaaaaccgagagcgcttaacaacaatgtgacataatgttttataattaattatttataagagtattaggtaccatatagagatactcttttaacatctattatatataccgtttgtatttataaatacattgaactcaagtttgaaaagggattaaacaagagtcgcaaacaatctttgaaattccatgacctaacattgttgatttaaaaataaaaagaaaatggaaatcaacaattgaggtgtcctatttcagatctttattagtgttaagttaatttaagttgttgatttgcttattttcttaaaagattggttggtgagaagggataaagacaaaactcgtcttgagattgaaactccctttacggcccaactacttcaacacggctacaacctctgctccgtccacttcaacaatttgttatattattatataatataaccaattatattaattaattaatacactcctaagtcctaatcacaggccaaaacccactaattaattaacattttaaaatgggttgtgcttgagcatcctattctcaaaaaccttcttttagaacttattttatgttttccaatttttttattatttatattttcgtcatactcttattggcaatcatttaattctattggatgtagaaaataaacatgctactagtactcatgcttgaaaactgaaaattttggcaaatgataatgatagatatatacgacaggattttattgatttactgatttatttatttatttatttttttttttttgggctttctttgtcatatgtggcgtaagaagtgggataaagacataaaaaagaaaaactttaaacccttttctgaaaaaaagacttaagaaaagggaagttgatcttaaataaatatataattatatatatagtatattttgcgtaaatggaacttctgaaggttgatgagtctgctgacgttctactaaaatttcagattgaaagctgcgtagtaattctcaaaccttttaagagacagaattccaagtttattaaaaacatctctgaaatacttcagggcttttcaagctaactcgtaattagagttcattaatattcacatctcctccttttccatatctttgattcattttcttaattcttaatttaatatatttatttttggaaaatctccttcaaaaaataattatttatattatttataggaataacaagttgttggttcaattatatataataacaaataagaaaaatatatagtttatgtatgtgccgactgcatggtgaagatgaaagacccagaaaagtagtttttgcttggtggctaatcggcagtgccactctgccacgatcttgacatttgacaaaataaaaattaaaattgatgataactgctatgctaccaaatttattgcatattatggctacgtgcacgctcatcaattctccattaataaaactcaaataatattttttataacaaaaatctcaataacttctctaattatatctttatatataaaaaatgagttatttaattatttttattaatttaacaaaatatacttcaaaaataaaaaattctgtttttttttacttagtaggattaattttataaatatatataaatatnnnnnnnnnnnnnnntaaattaatttaaatatatatacaaatattaatatattattttaatattagaagtaggttgaattttaatatttttaaatttaatatttattttatttaaaatttaaaactttaattagatttttttaaaaaaattaaaaaattaataaataattttttttaatttataaaattttaaaatacatataataaaataaaaattaaa

SEQ ID NO: 28953 - DNA, 1354 bp, Cannabis sativa
tttataggcatatccacaaggaccctagcaaatcgaatcatcgacccatccctagtaattttgtcaatcataatgggattaccaatggtacttacaagagcacttaaggtgttttttccccaatattgcaaagtgaggccattgaggcggatccaaacaggtacagattttactacgttcatcgaatcaatatcagtcgaccaaggtctgatgactaccggtttcttatcaaagtgcacaacccctgtctccaaaataatgcccctagtagcttcgtcttctgaaactaactagagtaaagcctgaatgtattctcactattcgatcaattcccaagtttccccatatccatttggcaaaaccttcaaatactcgaaatggcagattcgccccaagaaccacataaacaactgagcatttctagtgagaagcctcagattcaacttcatccatattaatttatgcaattaaatagtcaccctgttttaggggttcagtaaattcaagtttggtagagggagtccttacctggttagccttgaaattactccacgtctcctttgctgaagtttggaaatcagtaacctcagcctcatctgccaaagatttgaaaccaggctttgcatttggatcgatcatcaacacctcgacgttcagttggatcgaaagggctccttcacttgctccggcggcttcaactccagctccacaaaccctaaggtccgaatctcaagctcctgaaattccttctttttcctacccatggagagagagaaggaagtcacacgtttttataatggatattgaatgcaactcttcttggtggagcagcattaggcggtactaataaatattatctctcaaaatttagcacatttaggatatttattgtgttaggttagaatttcactctttttgagtttgaagcttcattataaattataatatataagaccatctcccattctaaaagttgagctatgttatcctctgtattctgaaacaaaaaaattgaaaaacttttttacaagctcatcgtatattccttcttgaacgtacaaacgaaaagttgccatgcaaacttctcctaagaaaacatataagatagaatatttaaaaatgttatgtgtacgaaaatgacactaataataatgttataccaaaaataatttttattagaaggatgaaagtagagcactataaatgtagtactactgcacaccttgttaaataagtttcccataagtttgctctcaaacaactcggccctatcagttatcttctggattttgaagtccaaaaagacaataatacaatttatctcactcaccaaaaatatatcaaagacttatta

SEQ ID NO: 28954 - DNA, 1835 bp, Cannabis sativa
gggttaagggttgggggtgggggagcgatccccgcacccgccccgccccgtttacatccctaaggcctttgctttctcaattctgaatgatcttggaaagacattcttggcaaagaagaaaaagaaaaggggaaagagggtccccttgtcttaatcctctttgtggatgaatctttttaagtggagatccatttaaaagcaatgaatacgctaaacttttaacagaacacatgatcaatctctgacttttactgttgaaactgttggcctctagaaccctttgaatgaagcaccattctattttaacatctgccttatgcatattcaatttgattgccataagacccccttaaaattactttataatgctaattatttaccgaagttgttctttcacttgtacatacaagaagaagagcgaaatggacattttcaagataaatttacaaaaagcctatgatctatattagattgggattttctcaaagaaattaatgctaaataaaattaggatttaaacaactcgtagcacatgcgtatttattttgagttttatgtaattgtgtaataaattattggagaatttttaaaattactctctttttatgttttatttacaatattacagcttaaaatttttaattacataaatgcgctagtaaaattttaaaattcaaaaatacactttgtttagcaaaaagtaaagaaataattaaaaaacaacgagaaatcaacctcatgacacttataaatcaattatcaataaactataaaacaactgaaaataactagaaaaacaatcatgacaactataataactacaaaaaatcttacttttagtcacaacaaaacttgtaactgaaagtaaaaaagttgtgactaattataaatcataacctttatgttgtgacacaaatcgagtaggacagagagagaaacaggtctagggttttattcgtttcaacccagctgcctggacgattgacgacgacaacggcggtgcatagtcgttccccttcgcaggcgacagtggagtaagtttcttccccatttgcgggcgccgacggtgctagaccttcccaatcgcaaacgacgacagagacagttcttccctctcgcagacgttaacgacggtggtgctagggcttcatccgtgttcttcaacgtggtggatgaatcgcagtcgttgttggtcaaagatattgtgtgattggtaaatcggttttcggccaggagcgtttgacagtgaatgtggacagcatgcaggttccgtccaggaggtttgacagtgaacgagtatagctttcggtttcgattggttattagttggtttttagatcttttgttttaaattattagctttcgtatcattgaaaaattactctttagtttaagtttttttgttcttttcattgtttattttatatttatattttagttagttccaattaatatttttatggggttagaatttttagttttatgtgttgaaactaattaggtttttctcattagtcttgtcttttgacattggttttttaagatagtttattgttttcgtcttgtcttttgacatggttctatagtttctctcattgggtttgggtttggtttattggtttttggggttagttactggttcttggttctaggttcgtttgagtgtccatggcatcgagtagttatcagcggatggaggcagcggagataatggtagggatttttatgccaaaattgcaggtgcaacctgaaatagatgaatttgttggcataaaagaagctttaagctggattgaccgtcatttgtggggacaattgattttggaaactgatag

SEQ ID NO: 28955 - DNA, 1757 bp, Cannabis sativa
gaacatgtaagatgttgtgcaaatgtaaaggaaaggaatgagtagaagggatagacaattgaccagtatgagaaatgattaattgcttaccatttcccacggcaagagtctcaatgccattatatggggtagcagagtccaaggttgtgttgccacagctgacatggttggtagccccgatatccacataccaaagatcatcatctcccatgtcagggagaatggttgtggttaaagcctgaggatcataaagagaatcaatttcagtgagaaaggcttgagaggaagaagagctaccatatttgggggtgatgaaattcttatcaaagcggtagtgacaaacagccgttgtgtgaccaaaccgaaggcacacttgacaaagcagtctcgagccatttccatgcccagaaaatctcccattaggacgccccatttcgttgttgtgaggacgagacgaaggaacatcatgcccatgattacccccatttcttgattgttgtgtactcaaattggcttgcatttttagagataattcaataacactgctgtggtgtttcagccgagtttcataagatagtaagagtgcctgaacttcctcaaaagagagatgatcacttcgagaggtgattccggagaccacgggatcaaactccggtccgagaccattcaagagttgtaggactaaatcttgagtggtaacgggggatccagcaatcgccaaaagaatcggcagtggcctgggctttttcaacatattcaactattgacaaattgcccttatgaagacgagagaaaacacctttcaattgcaggaggcgagcctttgtttggctggaaattctttgctcaagggccctccaaactgagaaagaagtggtgaacgatgcaaccgaagcaagaatcggttccgacattgatgagcgaagccaagaaaggagaagctggtctttctttttccattgcaggtattcaggatttggggcgccagtgatcagagtagggattggggtgacatcgggaagagaaatttatctaaatcatgaccaattacggtaggtacaacctgggatttccaagagagatagttgagtcggtcgagtctcacagtgagtgaggaagataaagaattggcaaacgggttccattgaaccggaggtggaagaggagcagaggtagcaggtgtggccggtggatcggtggaggaagattccattaacgtaagtcagagacgatgataccataaagaaggtaaaactagcatgaaaaaaagaaaggctaagagctttgtaaaagagaggctaagagcattgaaaaagaaccaataacaggacaaaagaattatgttaaaaagcttacccaaaacagggcagtagtgcctttatttatagtcaaagtattacaatacagtaaaggaaagaattacaaaatagtaatatccacctaatcaactaattaacagaaaagccagcaattaacagactaatagttatgtaataataagttggttaacaattagtaaacagttgattgcgaaatataggccgtggaagtaatcatgtgtatttgctcatttgcgtaactgatcacgcacaaaaataataatacatataatagaaatgtgggctatatttattaaaatggatataaatagttctcacacatagtacatacttatttttttgttaacaaaaagtagatattaatttaaaagaaacaaaaaatgatctgccagtatctcttaccagatgagttggcac

SEQ ID NO: 28956 - DNA, 2052 bp, Cannabis sativa
  modified_base (1558)..(1569): a, c, t, g, unknown or other
aaaagatatggatagagtcttccacaaccgaaccacagaaaggggagctcgagtcattcagtttaaacatggaattcaatttctctcttctaaggaggctgttggaaaggattttccacaataacatcttcaatctactgtgaatactagctccacaaatgattctccattttgtattgttgtcgtccctatcatctatattcttaaccaatctgtaggccgacttaataatataattaccattggttttagagagccaaatccaagagtcttcaggaggctgatttggcagagtaatgttgagaattctcttagcatcatctctataaaaccatcgtcgaaccatttcctcattctaaatgttgttgagtatgaagttactaaccagacttatccctaccgaggcatcaaactgaggttgtggttggaggttcccgttcggtaccaagggtggaaccaaattgaggtagattgcccattgcctatcttcttacaaaggcctcaaatgatgagacttctagtatgcattatggccttccatagaagagagtctcagttgttaatctcaatgtccatgaagcagcgattctttaagtacttggcttccaccacttaactccatagactatcattatccgttagaacttttcatacccacttcattaaaaaagccttgtttgttgcatcgattgatcagaatcccaatcctccacacacctttgggtgacatagctttcccaagcgaatgtatgcatggaccttctcccatcttaatcaccccaccaaaagtctctaagtgcgttatccacctcattagcaatagttatgggaatgacatctaaggacgctacgtagttagagatggtcgagccagtagactttatgaggcacgttttccctgcgcttatgagaattctagctttccacccttggaccctttgcaggactttatccaccaagtggcttctatcattagtacgcctttgcaatctgaagaggggtagtcccaggtatgatgcattggctggcatcttcctcattcccaaaaattgggatatagcttgcgacttcctttgtgtaactccattggtgaagatcaatgatttttagaagtttatcgactatcccgatcgaccaatcgcaatacttggtcaggcaatccatgagaaccttaacttctttcatcgtttcctggccgaataacatgatgtcatccacgaacacaaaatggctaatagatgtaccattttcccccagtttgaagccctttaggaagcccttagtctctttgtcaagaaggagccaagataaagattctgccaccaaaataaaaagggtcggagataggggatcaccttgtctcaatcctctctctggcttgaatttccctacgatggatccatttaaaagcaactttatctcctagaccgtgatacatgccttcacccaatccgtaaaaagaggggaaagtccaaggtgggagaaaaccatgataataaactctcaatccatcttgtcataggccttttccatgtccaattttatcatcatgaatccnnnnnnnnnnnntctcttcttcattgaatggactatttctctagcaatcatggtgttctccgcaatacttctgcctctaacaaaagttacttggtttggcgagataattttttggagaaggtcccagagtctagaggcaattaccttggaaataactttgcaagccttgttacaaagtgctataggtctgtagtcttttatataggcaggagtatctttttcttgggaaccagaacaatggttgtgtcgttgatatagtgtggcaattccacttgatggaagaagtgagtcaccatctcaacaagatcaccctttacagtctcccagtggtgagaataaaagctaaggggtaagccatctggcccaggtgccttatctttccccatctcattcaaggccgcagtcacttcctcttcagcgggcattgaattaagctcctcgatctcctgagtggataaaaccttattgaatagatcagcagggaggcctgttagg

SEQ ID NO: 28957 - DNA, 4638 bp, Cannabis sativa
tataaattttgattattataaggaacgagaacacagttattggaacgataaaaagttgagagcatgggaacctctagcacaaaaagcaacaaattcctgaaataagcaagaaagagataatcccttttcaatggtagaaacccacaaaaataccaaaataataatcattcaatatccctgagatttcagctgagcaatgatatagaaattccatttgttcctttccaaatttcaaccaggcaaccatagagaataaattaagtttgatagtaagctagtgtttgggcatttagttggaaaaaaaagtgtttccttgatagatttcaatatttttctaatctggaaatgtgaaatgcagttaaataggtcctttatttattttctcaacgataaaagagagatttttaggttttcatctgtgtactttatttcactgaacaaaacacttggtcataacttttttgtggttgatttatttctgaaatgaagaacccttaactgttaatttttgttttatacttatttcctttataataaaatctattcgttcaaatacataaatagacagtgtcacgtgccaacagttctctactatatacacattcaacaccatgattcaaataaatgagagaaatatcagaaaaataataaagccaagtaccttctttatcgaaagagagagccctgagggaaaatgccagctgaaagcatctcaccagcaccgtatgactagaggactatcacaaaacattatacataatcatatatgttagaagaaatcgagtagatacaagataattggtcatgaaaggttattgataacatcataacacacttgcaaagtctcactttggatcgggtgaacattaaagcaatgttataagtgtgggccattgcttcaaaatttgcaggagtattttcagcagatgttgcctgaacccaaatcgaagaaagcaatagattcacttggtgactgcttaaccgtagtgaggttaactcctgtaaattcaaaaaccaaatcactgtgtgaataacatgcagacatgtctgttgaaaatttttggtcgctaagtcaaattttgttgtatgtagggaaaatgactttgcttccaatacatagataagttataatcccaattttttatatgacaatgtcttttataattataacaaacctcccaccaattttcgagaaattaaaaataatttactgtgccaaaaacaccagtcaaacaacaatttgtatgcatgtttttgaatgttgtctgaacccagattcgggataggaaatattaacaatttctcaaaaacaagtggaaattttgctataagtaaaatctatatcatcatataaaaacatttagattatatcttatccaaatgctagaaacacgagagtccacgacccccctacattttataagaaaaagactaatgacttaaactgtaattttttaagatataagttcaaattacgtacagtttttcctccaaacaaataacccttgtagctgtaggatggtgcatgttgcttcatatggacatctgatacctgacttgcctcttccatcagtccatcaatgttctctgcagtgtctttactttcatcctgagaggataatcttccattaccaaaattcttcaacttaccgtcagataatccagaaacagccccggaaaatttcactttctgatccacacaagatgaaaagacggatggcataagaaccatagagaaaatgctatgtgctccaactcgtgtttcatggtctgggtgggtcattgccagcagtagttgatgaaacagagcatcaggaaatggctgtaaaaagcttagaagttcaaaataagagcctattgcacatatttacatatagtaacatgtacaggaaagctcactaaccatcttgtgataataaacattagggacagatgacacaagcttcgctgtttggtaaattgcagatatggttgttctagcaacaatggtactagttggtatattctcaagcaccacagccatcatatcaagtatgggaccaacatctccaacctatcaatagaaaaatatttatcacatcctgctaaatgagtaaatgtgaggaaaataaataaagaaataagaaataaataatcacctatctctaggtgcactttgctaaacaaaggaaaagtttcatttttaagaaaatattacagtgacactcccatactaatctctaaattacaaggacagccctctaaacaaaagatattacactaaaactcctgaaagagttacagacacgtccttcacaagtttttttttggaaaagagaaagagaccacgtccttcacgcattcattttgaccaaaatttggtcaatcaattttatttgaaacaaatgaatttttcttatttcatttttttggaaaaagagaggtcatacgtcatgacctcctccccaatttattagggagcctcacttgtaacagtccattttattttcactttctataactccgcacaagagactccacgactcccctacattttgtaagaaaagactaatgacctaaattgtaattcttgaagatataataagttataaaaaggtaaaaattaaatttaactgttactacaattatcttggttgagggggtgtcgatgtaattttgacaatcttcacattagtatccaccgagagagagagagagagagagagagagagagagagatcctatgctttcaacaagcatataaaggaattatgtcaacaaaccaagagaagcattatctttttatttgtatctaagatgatctcaatatatcctatcatctgctactgttgataatatcttatcatctcttgaaaatcttattgtaatccttcctttcctcgtttataaaaaaaattagtttgctataaaaactaaataataaaagactccaagaacccaaaacttaattggcgcatgtccacaccctttacatggaagataaacataaaacacaatcaaaaaggtcctatttaatcatacttttgtctttttctccaccacagacaatcaagtttagcaacaattctatgaaagcacacaccaaccttatcggagagttgtgagatgcatctttcaagggatatctgaacatcagaattacacttatctgaactcttcgggttggatgcttcagcttgattttgcaaacatctacgcaaatgcttcaccagatcagttagtgcaccaatgagtgtcactgaggcctgctgctttgcatttttagcaagttttgttgtaacattaagaatatttatctgtaaaagaggttgtttgacgacattcttatgatccaagtgcttgaccaatatggataacaacagatgggagttctctcctggtattttgagactacatatgtcaatcaataattatatttacactaaggcatggttgaaaaaacattttaaagaaaaaaattattaaggatctaactcttacctgattcctctaaaagtgattgtaaatacatcaaaacaggatatgcaagtcctttctctggggaccagtggttttcagaatcaaaattttggaaaagaggttctagtacacgacgaacagttgtagcttcctttgccaatttggccatattactcaagcatatcctagaccagtaagagggtctcttgctgttatccctataaaacatgacaagtcagccagaggatatcagaaagctatttcgtaagtaatgcataagaaacaaagtaaactatttatttagcgtagattcaacgaataatcacattgttggatccaattcagattttgtcacaagtgttggcactgaaacaaccatctgattcatttctgacgaagttgaatcatgaacatcagcaattgtgagaactccctgaacctcttgatcatgtgattgaatttttcctatcttctccttggcattatcagggttgacttgaaaatccacaaagttttccaaagtcactgatataatctacacaacaggataattttcaaaatcaagaataaaaactgtaatacacttaacaatcaaagatcaaattcaaaactttatacaaaagataaaaaaaaatattatgattattttgagggccgtaagaaaaacagaagtggtaaggagttgaatcgctcacactatcaaagtccattgagatgtgagactgctcacccatgaacagaatctgcatccaagatcaagaaatataagcaaaatacatgaaacgtgcgcaaaagaaacataaataagttctctagaaaagggaactataatcatcaccctcccctaacatttttttttccaaatgggaagttaacactatgtttggtagggaggaaagaaaataggaaggagaggaaaagaagaggctcatctttggtaaagtgagaggaaagaaaatttcctctttggtatttaagttaaaattgcaagaggaaaaataataatttagacacttctacccttaaattacttttgttatttatttttatacattaatattactcattatttaaaagttaaatttttattcttataaaataattattcacacccttctctattttttgtttctatctttcacattcttataaaaatacatttaaataatatacataaat

SEQ ID NO: 28958 - DNA, 3246 bp, Cannabis sativa
ttcttcatcaagaaattagtttcttcttcaagaaaattcttggtactttttccagggactatgccgatttcgatgacttttcagaagtttgctgtcggtattgaaaaaaccgtcgaagtagctgccagtgtcagaaaagtcgtcaaaattgactttgtcactggaaaaatcaccaagaaagtgatttttcatcaagaaaccagttttttagtgattttttcagtgattttttcggcgataataccaattccgacgaattttctggcgtcgacaacaactccaacgactttttccgacaccctccgcaaactccggcaactttttcggcactaatgacaaataaaactacctaaacaaataaaaacattaaatatgtgatttaaaaacttaatttacatatatatgacatatcaaataccatataaagaccttaaaataaaaaaaaaaaatactatataaattgatcaaatttaaaagtgttatatttaacataagaacttttaaaatttcacaataactgtaatttcctcttaataaaatcccctgtccgacatcctttactctagaaacatttttttaaatcagttgacttcctgtatttataaacccacgtttttctcattaatttccttcatcttatccaccacacttttccatattaagaccacaattattgtagctggcatttgcatcttcttccattaattcattaccgtcaaagtctgattcaaatactatattcaaacgttccatatttggtaaataactctcctgtgtcggccattgttctcttgttcccatcctcaaccactttgcaagtctgattcaaatactatattcattacaattttctctattggtaattattcaaataaacgagacataacttttcagcatgccctattaatccacaaatgtaacagaatattggaatgtgctcatatttaaaataaatccaaaaccaatcattgcctttctgttgtgtcttcatcctctgagacagagatttattgatatttaaagtgactcatactcgtatgaattccctccaaactcttataaggttcttatcatattcaacaaaatttcaagatgattaccaacatcattggctactcactttgacatgaaacctagtcgtaaatcaaatatcaaagtatcaataacaacagattgtgggttctctccttcttttaatcgtttcatgaacaactgtttacattaaaaattgacgacaatactaatctcgtggttaaattgaaatagatatttgttattctctaacatcttattgagaactcatttacttggttttcatagtgacgccaactgatgctgcttaatatcaaaatcaatcgcaccttcagtcaaaaacttaccaaccaaacactatctcgtgtccacccccttagatgcctccaaagtataataagctaccaaatcctcttcctcatcgtactacatacaaagtttagtacattgacagtcaaaatctgccatccctaggctactagaaaccataacaaccaaatcaagaaaaataagaaaaccaacaccaaaccacaaccacagtttaacaaagacaaaaagaccctatcaaaagacaagactatattttaattgtacgcttcttgagtgattattttgatttattgggttaggccatctacaatgctcgtatcctcaagaagcttaagtagccctaccatttaatttcaaccaaacagattttttaaaaaaataaaaaatgaattgacaagagtgttttatttatcccggacaacaacttccctctcttccacatcaccttcacttaggaccccacaagccacaatgttagctacccccactgttcatgccatttggataccaaggctagtggcctattccttgaaatgagaaacgagacaagttttggaatgatcaatcaggatggaaaaattttaaacttatgaaggatggaggtacgcagttagctacgtttaatgggtatacatatttttaaccattgcatttgaaaatttaaccaaatattgcatatattctgactacaaattcacattgaacgaaagccaattgtaaagattaatcactgccttcctattgctctctttaataacgtcatatctaagataccctcagacaatgctagaaagagcttttcttgtttacttccatctgaaaattcttcacatgctctttttgttatcatgctgagggttttggtcaattgactctagctggttccgaaggttttgattttcctctaacaagtgatcatattccataagcaatccttcagactgttttctaagtgcctcaactttagcttcagatgcctttgcctcccctgttttcgcctcacactcagactccagcttcttgatccttcccctcagtgtaaccatatcttgttccaatgtcttaagctcctctgcactactatttttcccgtcctcgtgacttcggttttgtttccttgcagcttccatagtcttcctcagtaatcgaagttctctaatgtaatgatgtagtctatcaatcatcaaagagaggaatagcatgaatcctgtagtacgcaataacattgagcaaacataagaatggttaaatcacaagaaaaaatgtcaatattactgcagcctcatgcattgcttatgattgatagtgaaagactttaatgagtaatatcaatataacaaatgccaatgaagggtgttctcgatcgtgattctcttgtgtcatatcaagaattcaacacagggatgaagttcctttttttaactagataacataaagtggtttctatggccatatgattgcttatatacatatattatataataagatcatacagcaaggtcaaagtgcataaagcacaaggtcctatgaaaatgaaaggcggcactactacaactactacatctccatgtaaaactttaatagaaacatataagtggatgcataagtgaaagtaacaacataattttcaatgaaagagctctcatagatcataaaatggtaaaatgtctctaaaatttcaatgcaatctattatatttagtaggagttgctggttcatggcgacgagatccatattttcgacctctagaaagtgttgatttggctaagaatagcaatcaggcatccactcttccatgaatgaaacaactatattgcaaatccacaagttgacacaaacacgtattttcatcacctccaaaacgaagatgaaacgcatttttaa

SEQ ID NO: 28959 - DNA, 3536 bp, Cannabis sativa
  modified_base (3497)..(3503): a, c, t, g, unknown or other
attttgggtcttcggtttggaaagggattctttgggaccgtgagcttctagcaaaggggtatagatggtgtgttggaaatggccgcaatattcgaatcaatgaagatccatggcttccccgaaaacttccttttcagctaagaaccaagatcccaatcccacaagatgtcactcttagcacgctgttgactgctaatggagagtggaaaattaatgaagtgaacagttggtttcacagagatgacattccatgggttctcggcattatcccttctattcatcaataggattggattacttgggacttaactaacaacgggaattactcggttgctagtggttataaattaagatttagtaatccggattgggcggcatgttcaaacaattccaaattaaaagcttggtggaagttcatttgggggtcaaaactaactccgaaaatgaaaaattttatttggaaagtgtttaaccattggatcccaactaaggtggaattgaggaagcgaggaatgtccctagatgccaattgtgatgggtgtttacaacaggaggaagatatttgtcatgcattatggtgctgtccaaaagttcaaaaactttggaaacaactaggctactccaaattcaaggatcaaagtatccataacgcttccaactttctgtggtggcagtgggaacatctcacaaaagaagagttcttccgattcgtgaggttttcttggttgatttggcaaagacgaaaccaatacacctttcaacacaaggtctcgaatagcaaatattagatcccttgggctatagagaccattgaacaacacttgggtatgcaacaacaacctacagctgcacatagttcctcggcctcaacatcctggcagcctcctccaaaggatctggtaataatcaatacggatgcatctcttgtccacggccaagagggctgtggtttaagtgcagtaatccgagataatgcaggtagtttaatagttgcagaaactatgtttatttctggttgtttatctgtcaaactggcagaggttgctgccattcacctggggcttcggctggctaagagatggtccatttcgaaggcttgggtagcttcagacatcaaagttctcatctcagcaattgagaatggtgtttcttttccaaccgattgggggcagttggtgcagaatattactcaaatgaagacccattttcaattgctgcattttttattctattccagaaattataataaagttgctaatagcttagctaagaggagtagtgtgactcaaaagtctaaaacttggactgattgtttaccttcttgtgctactgcttgtttaatagcagatgtgcctagagctgcttactaataaagttctctttcaaaaaaaaaaaaaaatagaattatagtagcaaaatacaaccctaaccaagctgttcctaaacccaattgcagaagtcggtgaacatatcgatgtctaattatttaccattttctaatacaatcttgtttaggagaccgtactgatagatatttttttaacaacaaaatctaggagcttctttgaagttatagtagctaacagttcacctttagtccattttgtaaaatagtcgatagcgactatgacatgttgtggtcctcctttccctctagggagttgcctgataattctactccccatatggcaaatgattataaagattgcatctgtatgagcttatttggtggagctcttgggatattggagaatctttagcactttttatatttcttgacatagtctattaaattctcaatcattgtaggccaaaaatatccttgtctgagtatttttttggacatactctggtaaagaatgagcaagagaactttctactcaaagaagcactaaacttcttagacaataatgagcaaaacataagtttcttgggcactattaaaagtgctctttagcattagttaattaaaatttcaaatgaatgaaattctggtttcgtctataagtgagagattacagttggactagagtgtttaaaaaatttatatgttattattattattattattattattttacaaagaatatattattaattaagtgcttcaaaacattgttgaaaattaaatgtgagctaatttctattttagtcattaaaaaaaactatatatataaaaaataattatggttggccgatggcaacaaatattctgctataataatacattgtttacttttatattttgtttaatggcccgtgcgcacatattctgctataattatttaagcctttagttatatatgtaatatattaatatatgtcactataaatatatgtacatagataattaaattaaaaaaaaaatcatctcatcatattcttcatcaagttttgtcctccattatatatattatatatattttttaattttcagctgataatctattatatacactaaaatttgtagtagttgatatactatatagagttgacttggtagactaaaaaagttccaaaacaactagagatagagagcgaacgtgataacttgatcaaaaaaaaaaaaaaactagagcgtaagtgaggctaaaatcaatgctagagtactcttctctttgtctctccctaataatattttggtatataattgttatacaatatgataatttgattaaattaataatcatatatgccaagtcatgtactataattaattacaataatatatatgattatgaaaatccatatttatctaaaccgccctttctgccaatcgattgacattcttattcccttcgtgacaatgtgctactaaattttttatattgtttttttacgagaaatatatttatttataaaaatcaaatccatccttgaaataattggttcataatcacaaattattatagaaggtgtgttgggttgggtattcttctttgcatgcaactatcatcaagaagctcaatcgagacttggtgatatcgtggcggctcggcaacttcgccggcagtgggttgctttctccacaagtggcagaagcgatgattattttagctggacttcaattgtattgtcgcggttgggttaccacaatatattgaggttgagtcatattactaagttgttgcgaagtttttgagtaagaaggatttttgtatggaaacttatagttcaattttgagtgatattagtttaatttgtagaagccttaatgtgtcttaaatttttattttgtactcgttctgtaaatattattgctcataaacgtgctaaattggctgcatttatgtaggtttttgacttattttttggcgttgacctaataataattacctttcattcaaaaaaaaaaatgaaatcgatcaattatatattgcaattaaatatattgcaaacttgtttaaactcatgtgtatatatacactaatttgaaatgatcatttatattttaaaatagtacaaaataaatccttaagggctcgtttggaacgccnnnnnnngtcgtattgtattgtattgtattacattgaatt

SEQ ID NO: 28960 - DNA, 2565 bp, Cannabis sativa
agtaaaatgaatttgaatcaagcaggaacagaaatggctaaaagagtcttaattctgttctaacaaagcaagcttcccatctggagcttgttgcacaactagtcatttatgacgtctgtaaagggaatttcatattgatgtcaagatagaaagaagcaaactctcttactcaagcctcatcacatgtgtgtgaatacaaaaaatggtgacttctaatattataaacgaaaatatattatcaaaacaagggcacaaagtaaccaaacctcgttggcaatcccctcatcatccttgtatccattcttatccagaatttcatgtatggcagtgagatccattctcacacaagcttcaccaaaaggggttaacgacaatggctgcactgaggatgcagtttcatgggcaatacccattaaaacatatgaagcaacctgctcaattacaattgaaagagaaattgcagttaattcattatttatttttagcagttaaggtgtagactgcttgatacaatccaacaataaaatccttttttttttcagtgtcataagagcatggagaggaacgaggcttatttatgatatggtgcacaacctaaaaatgaaaggatcaagcagagtgcatacctctgtttctttctgaagtgacacgagagaagtaacaagagactttgcatttggtctctcacgtgcctcatattgcaagcagcgtgaagctaaacgcacaagttcagttccatcatcatttgaaaaattaccctcaagagcagaatccatcagcatcagaaaattcttgccacgaattagatcaagcgcctgcaaacaacataaaccaacaatgttgatcccaattttattgtccagttaaaacaagagatatatgcttctgaactgaaaacgaagtgcaagtaagcccacatgactagggggtatatgctttccactcagaagatccagcaacaacgtcccaaagctgtaaaccacactttctgctgtcactctacctgtaagcaaatgattaaaatcgtcccatgtatgtatcatagtgtcaacaaattaaattctcacagcttcataatatatatgcatataatatatttacttgtcacccaaagatattaaggtaaaaatcacaggaataatttttcaatcatcataactcttggaatttccattactaaagtcagaagctaatgcctctgaagttgcaaatatttatcatagcggtgcctgttcaacgataatccacattaaaagatcatagcatttccacttattcaggccaacacaaataccagttctcaggtactccggaggtgtgaaggccaagtttgtactgtagctcttgccatccctgctattcttcataaggccaaagcaggatagtctgggattggcctcctgatcattgaccacagccactctatagtaaattattttaaataaaaaatgtgaacagaaagaacccactatattaaagatgccactgttacctgatcaaataaaaccctgtaggcattgagatcgtgatacagtgcacgtcctttgctgctacagtactccagagcttgtgccagatacaaagccactctcaatctcatggcccatttcattggttgagcatcccctacaacgattcaatcttaagaaacaaactatctaattacaaaacaatgccattcatagctgaatttaattcaattgagtagcacatggatattgctttccatcaatagcacttccaaaatgataaacaagcaagtacttgggcaataaaggcaattaaataccaatacttgccttttaagtcccatgaaaaatctgttaatgataagatcttgaatggaacataagtcttattcaatcttatatcattgtgaacaagtcaaacaacgaaatattttcatccaaacattaacaaatacgtcttcccagcttcactttcagttattttagctctagttaaaagaaataaaaattcacaatacccataaaaaggaaaccaaaagggagtaccatgtacacacatagatataaatggaaataaaggcactcacagtgaaaaagatgcttagcgagagtttcatgaggcataaactcggcaacgagcaatctctcatctccttcacagcaacacccaatcagattggctaatcgctcacttctgagactccccaccgacctagcttcttcctgtttacacatttttcactcttacttactcattagaaagagaaaaaaaccaaacattagagaaaaagagagaaagagagagagtgtgtgtgaactgacgagaaattggcgagaatcaggccaagcaaacttgttgaatctcttaacggcgatccaacgggtgttattatcaaggcttcctttgtaaacaatgttcggagctttctctccatgctccgaaactacgttatcagacgaaaacccattggttgcagctttcagttgctccaagctgaactcgctgaaactcggccataagttccgatcactcttttctccattctctgcaacaataaaaccgaagttacaaagcttgtaaaacaaaacaaaaaaa

SEQ ID NO: 28961 - DNA, 1271 bp, Cannabis sativa
ttcgagtcggggtccggggtcgtggtttggtgttcgggtctggagttcgagtatggggtttaggtccgggtcctagtctgagtttatagtctgacttcagggtctaggtccagtgtttgggtccaagtccaggtccaatcgacccatatatattattttttaaaaaatgttttttgttttttaaaattgaaaataatttttaagttatgaagccaaataaccctttgctttttgaatttgttgaaagaagatttagaagtaattgatacttcacatgcacattttcgtccaaacctaatgtctagataatgggtctacatgcatgtgtcctatttaagatactaacagagtctatattgacgaaatacagtttcactaaggccaactctaatgggggtatctaaagtttttaagcctatccagatctgatccaatccaatccgatctatttagtttcaatcatccaatcgatccaaaatctattgaatattggattggatcggttctatccattggatatttttcatatatatttattggtttaattcagatttatctaatattttaaacctaatattttttggatccaatcgaattcatctaatattttaaatccggtatgtattaaatttggattggatctatctaatccataaaaattagagtaaaattttaatacatatgtataccttatgtataataacataaaatttaattactcatcctaaattaaatgaaaatactaattagttcgattggatgttagaagtattgaatttttagacaccacatgcaacattcgatctaatttaattagatatttaaaaataacaatcaatccgatccaatcacaattggatatctaatgtttagtggtcgattataattgaatcaatcagttatcattggatcgatttatacactcctaagatctgtggcctatataattgaccaaaattaattagtggtccacattgtattaagagaacaataataataaggttccaaaaggggtaccgatatgccccttaatatttttaattaaaaaaaaattagaaaaaaaaaaagtaatttgctaagtgtatcaggtgggaacctatggcaactatttttattgacctgatttattgaagatgccctaatatcaagtatttataccgctataaaaaaaatcattaaattcggttacaaactgattaaaattgaatttaagatacttaggctgcaaatatatttttttttaatttgttcataacctacaaatgttaatg

SEQ ID NO: 28962 - DNA, 1573 bp, Cannabis sativa
cataggccatacacctacctacaaggcttagcaaatgaatcaagaatgttcttaacggaagtacgacctctataccatatgcaccaaatatctttctaatactcttgttggtagggtttcttcgtacgtcgagtacaagtgatcgttataccacatacactccatacttgtcccgtactagtgttggtaatatataaatcatataattcaacatgtatagcacatgcacacacacacacatatatatatattttatactaatcttatctcgtttccagatttaagtgtgtcggtgaaactgaatggaaatatcacttactgaatggaggccctatgtcacatttacgcaaaataggtaagtgttactctaaacactttcaggacttaaactcaaaattagaaatttttctattgataaatagcgtggaaataccctaagtattaagaaaatgtaaaaaatcaaggctcctaaaactgcccaaactgatgaatcaaatttctaaaacggtggattgttttctgggaatcctacttgggaaaatgattcaatgtttttggaaaaatagtggatcgtttatttgtaaaaatcgcaaagaattttgattctcaactcaattctgccacaaactttgtataactctccaaaacacctaataacatcctaacaaaacatatttcaagcaatcgcagcaactgaaacacaagaaatcaaaaaatcaccattgttgagcctctcaaactcaaacttgctcaacaccttctctagccaacacaaaccagccaaagcaagctcaaaaaactctaatctaactcaaaaagtaacccataaacatctggggttcgaattgaacctattctcaatgattgtatgctcaaactattattttctatccaaaatcaaagacaaaaaaagttctagggtttacctcaggtttagctttccaattttccttctattcatgctgaatttcaaagaaaattgatgttgaaatggtctgcttcttctggttttccttagggccaaaaagagagaggtttgggaaagagagaaagagaaaattgattttctatttttaatacaaaatgaataaactttaattaaaccttattctattcctttaattaaaccagctagaagatccaaaactaatcctttaggcaaaattctaattttactcttacttcatgcttaagctaacttaaggcttaagggtaaaattgtcaaataccacaaccccacctaaactcgatattccaaatatcaaatatacttgtcccaataaataaaaggttttaagccaaactcatgtgactttaatggccaaaccatcgcatttccatcgttatcgaacaataatcataaaaatattaatttctacatatatcacatataatacacctagagtttaataaaatttccaaaattaaaaaattataatcgtaatgcctatttctttaaaatagaacccacaatataaaataatcacatataatcatatagtttatctaacgtccccgcttcaagctccattgggcccttacacccacggaatatggctcttatacacgagta

SEQ ID NO: 28963 - DNA, 2844 bp, Cannabis sativa
aaaaaaaaaaaaaacagaaaaacgccgttgccggggatcgaacccgggtcacccgcgtgacaggcgggaatacttaccactatactacaacgactttgttgaaatgtttcagaaatttaagttaatatagatttaattttaatagacttaaatgaaaaatggattaaagggagcaaagcttccccaaaagaattgagaagaaagcaggcccaaagtcccgcctgaaaaaaacatcagcgaagggggcagttctcgcattttggcggtaacagctgtgacctttttctctatcttctccgtttgaactatggttgaagaagattgtgaatcagagcaaccaagtttgcccaatattacagatgaccccaccaaccaagaggaaccttaccagtggcctgtcattcgcttcgatgttcctccctacagaacccaccacttcttccaccagttcagaactggtccaaaccctaataacttcctcaagagcgtcaaatggtatttgtttttccacacacactctcattctctttttcaaacttttggattttttatttttattagttattattcgtttatggtttctgtgcaggtccccagatggttcatgttttctaaccaactcagaggacaatactttccgtacctttatgttgtatgtatcatatttacttatttttatgtattcatattcattattctacaacgacttatcttcaatgtttagtgatccattttggttttgttttgttctttggtacaatttctaattacagaccagaaaatgggaatgattatctcgacgactcttctgtaaatgatggagggggtaaggttaaatcaatgggtattcataaattttcttcaaattttagtaatggaagataatagtttgcttggtctgttgagtaagtgaattttattcatctaagctcgatatattgtatattactgactttctttgtcatatagatactaagagttgtctcttaagttgcagattcgtatgctgcaaaccttgttgtgaatgaaggagaatctgtgtatgacttttgttggtacccctacatgtctgcttcaggtgcttatgaagctttttcactaccaaagttttgttattattgtcctattagtataaaaaatgctaagcttaaaacttaagtcaggaaaagtaaatttcacttttactgcattaacaagtgatctttttcaaagtctgattttaaagatttgttaatatttcagacccagtgaccaatgtttttgccagtacaagtcgtgatcatcctattcatctttgggatgcttcttccggagaggttcttactcattgtctagtcttctcttcaaatttctctgtttggtatttatgtgatgtttttagtaataaaattgtattacgtctttctatttattacagcctagttaatgtatgatttagttgactggtctttgatgtaatgattagagcaattctaatgatgagtagtctcaaaataattatgtgaattctgcataattgcagctacgttgtacatatcgtgcttatgatgctatggatgaaataacagctgccttttcaattgcattcaatccctttggaacaaagtaagattttcttccttgtgcaggtgttgttggtcttttggaatttctttacttactttaccaataatgtttgtaggatatttgcaggatacaacaaatctgttcgggtgtttgacttacatcgccctggtagagaatttaaacaattttcaacacttcaaggaaacaaagagggccaaacaggttaaccttttttttttatttttttaaaagataaggtctgctatgctaagaattgtgttgataaagagaacacttatttttatctgcattgatttacaggcatattatctgcaatggctttctgtccaactcattctggaatgttagctatcggttcttacagccagaccactggaatatatagagaagacaatatggaactcttatatgtattgcacggccaagaaggtgggattacacatgtaagttggcatcccttcattcattcgtcgttaaaatagatagacatgaaggcaaccattatattgttttcctttcagattcaattttctaaggatggaaattatttatacactggaggacgtaaggtacctatattaattttttgtacgtgattcattatttttatgcaattaacattttaggcttttaaataccttgaaggatccttatattctgtgctgggatatgcgcaaagctgttgatgttgtgtacaagtaagtttttaggctttgaaaaatatatatgttttatttagttgggacagaccacgttttcattaatggtttctctttattaatagtattatattgcaaagttcattgaccttataagttgtaaatgctttcttgcacatgcataaatttctagtcttttgactacatctgtatactcttaaacacaagcaggattggaaatcttcaatcttatttcttggagttgcttttcatctttggatccgtaatttttcttctcagttataccagaaagggtgcatgggaaagtccgtgactattcctagttattagtgactttaccccttcaattttaagattattcttttcttgacaggacaaagattatacagtttgcgaaaccaagtatccacttttttgaagcggcttatggtgtcattgattgttacaacaccagaggaacttaattcatttataatatgtataattgaagttgcaagtactgaccattcattgtgtgaatgcatatcatgatttcttctaaacaaaatccatggcattctctcctaactgacatgct

SEQ ID NO: 28964 - DNA, 1832 bp, Cannabis sativa
  modified_base (46)..(74): a, c, t, g, unknown or other
acaaaagtggttataaaacgcattaaaaacaaaaattttactttcnnnnnnnnnnnnnnnnnnnnnnnnnnnnnagtgttaccaaacggcaccttattttatgcatgcataaaatatatattttaaaacaactcaattataatattttcagaaagttaaatttgtcataatttcttaaaaatttgttaaatgatcttcaattataattgtaactcattgatcatgttaagaatacgaaaataaattattttaaaatttatttttaaagcacggtaaattattcaaaattatttaaaaattaaaaaatatatataactgtaatataaactatcaggtaaaaaaattataatgtaatataaactatcagtaatttgaaatagtattataaattataatactctcttttgtttaaaggcatgcagtgagagacatagaaatgaaaatcttatagtatgaatatgtgtcccttccatactcctctttcaaatttttgaacgaagaaacaaaattattattattattattattgttagaataattgatgataaattttttttatgttttaatctgtatatatttaatttttaatttttttagaaacaaagtctcttaagtttatttattttttaataatttgaagcgtcagttaaatattttaattgaatgattattgtgtacacttatatatatatgtgaaagtaaaattttaaaattaatacagtaataatttagttagtatttagtagtgatgcccagttgatacctttaatttacaaagaaaaaaaaataaatataaaagagttttgccataaaaaaataaaaaatttaagttaaaaaaattaaaatataaagaaattttgttgcaaatagtttttttttttattattattatttgggtgaaggtggaaagaaaataattaataaaataaagaaaagaaaagaaaagagaaacgtgtgttgtatctcttcacacatttgtgagttatataagtggtgatgctgcctttgtcttggattctctccccctttcaagattcataattttgacttcattaaccaaattatgaacaaaaacaattactttatttattattatatataatatatcttcatcttacacaataataataataataataataataataaatcatatcatcaattatctactttttcataaacatccatcatcaattatgtactattacttttgagaaaaatcatgcatttgtcaattatgaaaaagttgagttttatatatgaacaaatgttacaactccctcttacacatatataagcttaaattaagttgtctaatttgtaagtattgtttgataatctagattaataatttggcaatcaatatttctatagttgaaacacacattatattttaagaggttaattatgatttttgcccctcgaattttgacatgtactaaattatgtttattgaacttttaaggttgttaaaatttcttcctaaactattaagattgttatatatattttaagatttttatctaattttagtaagaaaagtttaacatggatgaaagttcaaagaacatgatttggtaattggtacatgtcaaagttcgaaaagacataatttagtagatatcaaagtctgtggaacatgatttactgcataaataatcactgaattagtaaaattaaatataattggataaaagtctttaaatccaacaatttcaataatttaagaaaaaattttaacgactaaaaaaatacatgaagtatgatttatacatgtcaaaatttaagagacaaaaatcataatcagtcattttaaaatatagtataattac

SEQ ID NO: 28965 - DNA, 1608 bp, Cannabis sativa
ccacccaatctgttaattgggtggattgaaaataagtacaacccgcctaataaacctgatttaacccgactagtatttttttttttttaattttgtacttcttaattttaacttttattataacataaataataatacataatataaggataaaaaaattcaatgatatgatctctcagattcttttctaatattttatatgttgaaatttcatttattttgaaactaaaaaaaatttaagtcggtttggacgggctagttcgaccaaatcgttagttgggtagatctgaccaaacagtcggttgagttactgacttttttttttctaaaaattaagtggactgcacttaaaattttgcaaccagatatttacatcgaattaaaaaatatgtattataaatcaatcaaaccgaccgatgtataaccctatttactactacacaagataaatgaaaaaaaaaatgtgttagttttcattttataaattacacactttacacattataagcaattttctttatcttccataaatttgtttctttcctttattttctttctcattatcatatacttaggagcatagtaataatccctttcaaaagtaaaaataataaataattaataatatattaaaaattaaataattttaaataaataaatattatcactcggtctacacacggccaactcgttattttccattggaattttcttttcaaaaaatatttatttattttttccttttccttactccaaaaggaaaagactaatctttcttcacaatatcacaatccccaaaatacccctacccaaaaataaaaaacatacaacccaacaaaaaaacaccccggtaattagaaacactattttgtgttaattgagagcaactctgagaaaattatcaaaactctgaacgtgatctgttctgtctaaaatattgataaatataggctgcattgtaatagactttctaattattttttgagttgtaatttttaattttttttttttgtaattttacggtccataatgactaaatgagtttatgctcagaacttaactggtatggttaatgtgtcaactatttcaatagatattatctgtaatgatcgtgaggtttaagttttcttttagggttaatactattttggaccttgtattttgtagaattactgattgaactttctgttttgtaaaattacaaattaaaccttgtatttctaaaatgatacaaaataatacattgagctcaaatattgatattttttttaatataaccaacttgaagacaatttatagtacggaaagatacagaaaaatgaatataattttatcataacaactttaaattaagttattattaacttttattttataccattttgaaaaatacaaagtataatttatcatatagcaaaacagaaggtccaatcagtaacttttataaaagacatagtctaaaatagtattagaaaaattttcaatgcacccccttaatatgatgcaccgatgcacccttatctattttggtatccgaaataattttttagtcaaatttttttcttatggtgatgtacgttataattatttaacacatcctgtaaaatt

SEQ ID NO: 28966 - DNA, 2120 bp, Cannabis sativa
aggtgataatctaatctcataatctgcaaagaagcaagcagttgctacttgctcaagcaatgaaagtgaattccgtgctttagcaatcacagcaacggaactaattaattaaaatggattgtctccttgcttattgaactataagttgtcttatctccttgccatgttatttaggttgactaccagagtgcaaccgctctagcaaaacacattgagaatgatttgccttttgtcatggaccaaattttaaatttggaaaagaagttatcagttcattaggtttccagttttgatcaagtggctgacatgcttaccaaacccttggctaaggatcgttttagctaccttcaatctaaattgaaaatggctgaaacccctttttgtttgaggggggatattaacactattaactaatgctagttaagtttctgttagctttaatttagttgatggtgtaacagttagttaaggtagttaatgagttttttaagtaactaattgtactttgcatcaataactcatatataaataaatggtctttaattgattagaatagcttttcctaagatgattctatcagtctttttctcttcttgctctgttcaaggctttctttctctacaccctttccttgtacaattcagatctctctctccctttcacaaaagaacccagaccccttccctttccttttatgattcgaatctctctctctctctcttccattaattcctagccattttcccttctttctcaaaatcctagacccattgttaaattctaccttcttcaacaggcttaattaagagattctcaacactcttcttaatttgtagtctgttgagtcgagcttgctgccatgccatcgagctccattgtcgctacgttcatgggtctcctccacgtatagattctcactctcgttttcttacttggccgtctctatttttttctatatataaacgtattatgtgtatatatatggctaacttattgaggtagacttgtaatatattactcactgtttttatttttgaagaataaataaatataatttgagtgatgggttagatatatatataacgatatttagaggcagattggagcaaacccatgatagccatctctcacaaaggccaagacctgctagatgtcggtctgacgacgttccttgacctgtggttcattgtactctgcatatgatcttgggcactcttcaagtaagctctatccttctctaggttagccatggcctccacctaattcttgctcacagcatcctcgcactcagcccagaggctctcaagttccagggtcatgtctgctactaccctagagcattgttcaacaagaagagtactctaaaaaattcaaaagtgaaaatggcatgagatggtcaacaaaggcaataagaatcatgaatactattacgcaaatcagacaaggacacttaccccaacaaacttgtgaccgacatagttagcgagatagattgggtctttgctagcagttgaagcccatcggtccatgctcagctcaagcccattgtatatcgttacttcgacaaattttattgaattcgaaaagacgaaattacacttattataatattttaaaactttcttcgaaaaatatgatggttttatgtttgcatactttctatgggcttggttattttttatttttaattttatggtatttattatgccatttttttgttattattaatttaaaataccatattttattaagtgctctctcatcaagccgtaattttctaaattgtttatctctcttaatcgctctaactcccttccctttcgactgccaactgtggttttcagttcactcaccctccctcttcttctcacattttatttttctcaacctagtcctcttgaccgttgctagctccagcagagttatttttgccattaatatataagtgttcatgacatctcactatgacaaggacatttgattgcgattcgtagccatttcttgttcatccctttgttttgattttactgcaaaatacagtcaccaaaacattgtatattttgaaagggaaaatatttttttaggaccactggattgggaaggccaaaaacagatgctta

SEQ ID NO: 28967 - DNA, 2871 bp, Cannabis sativa
ccatggccatggcagccgctgctgctactgttgaggttgtcgtcgacgtcgggtccatgctggggtttgtgggttgtagtgttttaggggatgaagcgccgttttccgccatggctttcacctcaagacaattggaattactttattccggtgaacgatgatgattgtgatctcaactcataccggaatcgaaattgggtttttttttttcctgaattgagaatattttccactttcagaaagaggggaagaagaataaataagaggttaaatctgggccgtccacgtcagatccggcccacctaagctttgttcacagatataggaagactacttagtcaacaaatcattagtagaagatctggaccgttcatccgaaagactttctctttctattttttcttttgagttgtgttttgctccctcactctccaacatatgcttcatttattcgaagtttcgaactcaactcaacgaattcccgttaaaaaaaaaaaaaaaaaaaaaaaacttttaaaataatatcataattaaaaatttcactttttctttattatttgaaaaggatttcaataaaaagacaaaatggtttaacaaggtagacataaattaagtaggaacaacactcttcgatctcaaaaaaacaggaagctcttataaaatcataagccatatttttagtgaccctactcatacaaataatcaattgtctataatcatcaacaattaaactaaaagaagattgcatcattaaatgactacaagcctgtcactaaacaatccatctcaaaaacaaaaaccacgactaggcatcatttgtccttgatccaactaagaactttctcgatacccataacctaagctaactgaggtgtcacatcgccaaaacaacaaacaattcaagcttcaaaagagagcctaagtgatcatgagctaccaacttgaaataggattggtgagtctcagcaaacaatggagcatcaacatttattttaatttaattgtcttgaagtaaccaaagcattcacactaaaaattttcttattccaaacaaaatcattacgagcttgtcaaatcccccaacagatcactgttacttcactttgcttttccttacccacctaagcggccaactgatgaaaccaagcagaaaaatcatctcagacaacatccaaagactcgaccacaagacaaacaataaggctatgaacaatagtctcatctgaacgcaaataaaaagagaaatgtctttgtatgtaaaaatttcacttttttttatttacattacctatgagtttctttatttttttttattggatcatttaaataatatgtttataataagtgaaacaataaactattggcaatgtaagtctatttttcatatctcctcaaattatccctctcgttttaaaaactcacccagactctctctttctcttctctttccctctctctcgtcttctcacagtcccgacaaaaccaaaacccaaatcgcacccacttgcaaagccaacatcatcttcgtacccacaaccagtggaaaggcctgccacgatacaggacgaccactgaagaaggcaaagggaatcaagaaccacaaatcgcgactcttttcactactattgtttagatgttcgatctgtgggttatttttgtatttttttgcttattttttggtaaaaaaaattgagtttttggtgaaatctaaatttttgaattctgtgatttttttgtataggtacgagggagtacaatagggtacgatggtgggtatagtgtactttggaggttagggattaaagttcgatagggtacgatagttgataaagtacgaagtagtatgatggggtatgatacggtttaagttgttgcttaaaaacacctatcgtacccaattgtaccaccatcgtactatcgtacttttatcaaccattgtaccacgccatcgtaccctatcgaacatttatccctaacatttagattgcactactatcgtacccactatcgtatactatcgatcattcacaaaaaatacagcaaaaactttatcatgccataaattttgtcatggcattaattttaagcacctatcgtaccaccgtcgtactatcgtacgtttaccaaatatcgtatcaccattgtaccttattgaatcttcatccctaacctcaaaattacactactatcgtacccaccattgtaccttgtacaagaaaaatcacagagaacccaaaaactcaaatttcaccaaaactcgattttttaccgaaaaaatacgcaaaatacgtaaagaaaccacagatcgagcatctaaataacaatagcaaaaaagattgtgattctggctcgcaattcccttttctttctttagtggtcgacgtgcgtcgcagtaggccttctcgtcgatcatgggtacaaatttgatggtgactttggaagtcagtgcgatttaggtattggtttcgttgggaatgtcaaaagacgagaaagagggaaacaaaaaagaaagagagagtttgggtgagttgttttgaaatagaagggataatttggggagctatgaaaaataagtttaagttttttttttttatttaatataagcatatttgatatcacacctcttataacattgttgctaatgtaaaatgcttattcatgctcaaaatattacaaaagctaatttgaatttttgacttctgaactttgacttgtaccaaatcatgccccttaaacttttctagtcatttaaaacttcgctcaaattattgagattgttggatttaagaatttttctttaattttactaaagaaagtctgacataaatgaaaatttaagtaatacaattcgacacacgttaaaattcaaga

SEQ ID NO: 28968 - DNA, 2706 bp, Cannabis sativa
  modified_base (795)..(798): a, c, t, g, unknown or other
gagagagcttagaaagatttgtttccaagagcttctaaccccatctagggttaaagcttttcaacccatcagagaagaagagtcctttaatattgtaaaacttgttgcttcaaaagtaggctcacttatcaatcttagtgaaatgaccaggagatcgtcttataacatcatatatctagggctgcctttggcaacaaaagcaatgatcatgatgaatgcatatcaattatggaggaaattgttaaattgtctggagggtttgcatttggagatttgtttccatctttgagttatcttgattggtatactttaagtaaatttaatcattataaacaaagggcatcaagaatagtggaaagaatcatcaagttacatacagatcaagacaaggagatcaagtcatcaacaaataaaagtggagaagagaaagacttggatgatgcccttttgaaatttcataagagtgaagatcatcataagttcgacaatcttaaagcagtcatttttgtaagctctctctctctatatatatatcctcaacttaattgtttatacatagattttattatcaatttttgtgaaaattaattaagattcttaactggtgacaaaattttcagaacatatttgcagctgggagtgacacatcagcaacaactatagaatgggctatagcagaaatgatgagaaatccaagagcgatgaaaaaaactcaggatgaggttagacaagtctttggcgaaaaaggatcagtagatgaatcttcaatcaatgagatgaaatacttaaaatcannnnttaaagaaactctaaggttgcatcctccagttgccttattaattccaagagaaagtagagaaaagtgtgagattgatttctcttcttttttattgtgttcaactatgtaacatacacttttacatgttgactgaaataaagcaaaaagcatattggagatctagtaactttgtaatattaagtaaatgatctgtatcagttgaaataattatatcaataaatatttactaaataaaagaaatattgcatacttttttgaaatttttacatcaaaaataccaaataaattttttattatacatatacctgcgcgcacacgacctgagttactcttacactttaagttcttttacactgtcacactctcatgcaagagtagactatagatctggttgacacctatcatccaatctctccctctcttttttccttctttttttgttttctttcaattttatttaataaaaatttttccataactgatctccttccctcctcaagatcaaaacccacccctacccaaagatttttctgtcattttcttttctaacttcactacaaaaaatttcacttttgccagcacatttttatgctggcaaaagttcgtattgcgctggtaaaatagaatttacttgtgatgtgttcgcaaaagggggttggcaaatcaatatttgtattagaacttttgctagcataaaatgaaaagcgctggtaaaaatgatttttcttagcgcctaaatgcgatggtaaaagttagcttttagccactgtaaatgtacgcttgtaaattaaattttgacctctttgccagtgtagtttgcgaaatgcgctggtaaaaattacttttaccagcgcagtagcgaactgtgctggtaaaagtaacatttcttgtagtgcttcccttaaccgattgtcttctattttttttttttttgggtctaaacttatatatattcatggctatttacttgatcatcattgtccccttctccattgcaaaataaaatttgaaaataggtgttaaatctgtagcaaataagttcaaaggaaaatacctagttgtagaagatgatgactccgactttactgtgccagtattgaaataacgagatcgtggacctgcgaagaagaaatctaaagtgtctattcatcaaaaaattttcccaacttctgagaataggaaagggaaggttgaagttgatcattgcttggaggtttgtttttagtttcgttttagtttttccccaactttgtttttttttttcatttaattttattttttggtttgtgtatattgttttgatttctttttagggtttatattttttagttattttaatttttgttgtattaacctttttttgttgtgttttttgattgtaattattctgttcctttaaattggtttatgttttggttattatgttctttttttgatttttcagattttagtgttcttatatattttgttgtttatattagatttgtttccatatatgtttatgggtttgtctttttgttttatacatttgttttgtgtgactttatttttataattattttgtagtttttttttttttttttatagttttaaaagtataattttatagacattattgtttattcttgatcatattcctttttagattcttcacatattttctgcttatgttctccgtagaatccatgcatatctataatatcaaggactaaatataagaattaccttagaacttgatcttcaacgtcctgaattggccatatatttgtgtgtgtgggggggtctacttgttaggctaaaattagtctaagattcgggtcatatttcggttagttttcactctttgtttctagttttagggctatattacgcttgattcttttgtttcaggtcctcgggcatttaaa

SEQ ID NO: 28969 - DNA, 2623 bp, Cannabis sativa
ttttcttggctgagtgttctgttttaaatgattctgtatacatggtgttatttgattacatgcaggtattgttcattgtatatcttttccattaatttgcgtattagacaatttggtcatatggaaaactgttgaattttgtgctgagctgagataggaagtgagagaccaagattgaattattaggatagattgctgaaacagataagactttagaaaattagttgcaaaagagtataatttgagtggattattggtatcagttaaacaagaaggtattcctcgtcagaaacgtgaaagaattcctgttaaacattaacttattagatcatgtgatgtaaaagataaaactgagaggctttgaaattattttaaagactaggcactgtttttgttttgcatttttccttacgtgttcaagaatggtgtggctgacctgattgttgcagcaagagactatgttcatgtgttgatgaactttatctatttccttgctgaccttctatcccatattttttcatttctttaatcagtcaccttttccattcttggtgagaagaccacagtaatgtcacctgaagtattcattaaagaaggagttccatgctgcaggtaacaacctgtctaatttagttgaacagaatctgtcgaccagaaaatatattcatgagtcctaaatgtctgtcagctgagctttcttgtacagtgtcttttataaatggtgaggtaactagcttcttattggatatatgtgttcttacttcattaattgctttttaaccaggctagtgcaaaatgctggtgaatttgttgtcacttttccaagggcatatcatactggtttcagtcatggtgagagacctatttgttttagtttttctcctttctaaaatcatggttattgatgttatgattggactgacatagtgtagctaatttgtttgtttgttgtttgtgtaggatttaattgtgcggaagcagctaatattgcgacacctgaatggttaagagttgctaatgatgctgctattcgacgagcttcaattaactatcctccaatggtgtctcacttccagttactttatgatcttgctcttgcattatgctcaaggtgtgttaaatcagcattttgtaacattctttatggcttggtctaggaaaatttatctgaattttcttattatatatgtagaatacccttgagcatcggcagtgaaccacgaagttctagattaaaagacaagagaaagggtgaaggagaaacggttgtgaaagagctatttgtgcaggatgttttaaagaataatgacttacttcatgttcttgggaaagggtctcccattgtacttcttcctaggacttcttcagacattccactatgttccaaattgcgtgttggttctcatttaaggtcaaataccagtctttctatagaagaaatgaaatcttcaagaagtttgatttctgatgatctgatggtagacagaaagcaggaggttgatcaggtgaaagaattctatccagtgaaaggtaagcttgcctctttgtgtgagggaagctgggttccctctcgtggaaataaaagaacatctggttcaaattttaagactccagttaagagcgttgaagtgaagagtaatgttgacagtgataggttatcagagcagagattattttcttgtgttacttgtggaatcttgagctttgcttgtgttgccattgttcagccaaaagacccagcagccagatatctaatggcagccgattgtagtttttttaatgattgggttgttaatgctggagtagctagtaatgtgttccccatttccaatgtggatcagacagaatctaagcagaataactacacaggttggtttcatatgtatactatttttttttcttggcttgcttcaaatcagaaatctacattatcttgtactagatgttttattgtagaaactgatgaaatatttgtaacttatgctactgtttgccaaatacaattgaaaatggcccacatgtactttgggaaataattgcaatattttttttattcaactcaaatttctgttccttgtaattttttgataagaacagggtgacagaactgattcattttcccccaaaccattacatctgcaatttgtttatcttgtcttgcatatactagtatcgccttttaagaagtccctatattgaagtactttaattatactatgtctcaatacagcatgggcagacaattgtgctcctgattcatatgatggtcctgttccatccatttctaaccaagttcagatggaagaccaaaataatgaggtactttcaaacagtgaagcacatgaagctacttcggcacttggcttattagctttacattatggaaactcatcagactctgaggaagatcaggttcgagaagatgattcaatctatgaaaatgaaaccaacatggcaaattgttcaccagaaagcaaatatcgttgtgagagttctggtctctctttccaaaacagtctgagtgatgcagctggcgatgatggtcgctcaccacaagaacttgatttaggggaagaacgtgcatctcaaaatgctgattttcataaggaaaatggacacaaca

SEQ ID NO: 28970 - DNA, 8132 bp, Cannabis sativa
ggccggccagcctcctaaagaagtccctgtggccagccacacacctcaaaaagtccttatagctaggaagagatgagcactcccaccccaaggggagtaactcacgcaaagataaattttcaaccgacaaggatcgagagcaggtggaaacacctaaaacaaaaatttgagaagtggaattaatcacttctgatagttggatccagaaaattccagcaattagtgtgatataccccgtgtcatcacacaaactccactagccaggtagagaagtgtgggcagccaggccctgcccaacttagggctggccaaccatgtacaaatactagactcagggctggccaaccttaagttaccctctcctagggtgtggctggccaagctctggccagtccaagactccagcacaatcaaggaaggccaatcaacctggcccctaaagcaatagatccttctatgcaagcacagttggatcaaatacgagacatgctcaagggcctaactggtccaaaaccttcaaaacatgagctagacaggtcaagggatcaccattcttggcatacatcaatgccttgcccttgcccaaattcaagatgccgacttagaagatgtacatggggaaagaagatcctctagtacacctgaagtacattgagatccaaacagatatccaacaagtatctggatatgtgcgatggtgaatttttcagcaactctagctgaaatagcccaacaatggtattttaagctggccctaggaagatttaattcttagaaagagctttctcgagagttctatattcagttctctacttcaagaaaaatacgttcgtgactagaggatcttgtagaaataaatcaaagagaaaatgaatcagagttggcacagtatgaaataatatttcaacctcgtacagcagttaaaggacatgccttagcagacattgtggtggaatgtacatgcaaagaggaagataatacaaaggacaaccccgagctagtacaggagtccctaccagaagaaaacaaagacaaacttacttggaaattacatgtggacggattagctactgacctttggtgcaggaattgctctcatcacacctggggggcaacccctacacaaagcaattaaatttgggtacaaagccttcaacaacgaagtagagtatgaagcactccttgttgggctaaaagttgctcgagaggtacatgatgaatacattgaagtctgcagtgattcacaactagtggtaaatcaagtcttcagagagtacatggctcgtggagaaaagatgattgcttgtctaagtaagatccaagacctgctcgcacaattcaagggttacagcctcaagtaactctcaagggatgaaaatacaacttattaatgatgctttggcacggcttgtgagcagcacggtgaaagataaggccaacttactaccgatccaaatcttggaaaaaccaagcatcaactatgcagaagaagtcaaaatgatagatatagtgctaaactggatgacaccaataacaagttacctcaatactagagaacttccaaacaatagaaacgaggcttggaaaatgatgagaaaagttgcacattacatcatagttgaaggtgtaatgtatagaagaggcttatccatgccattgcttagatgtgtgatagaagaagaggttgcacgactcttgtctaaagtacatgaaagattatgtggtaatcatcaacaggacaaagattatcaaagaaaatactaaggcaaggatatttctggccgaccatggtagaagattcaaaggcctatgtaaagaaatgtgataaataccaaagattttcaaatactccctatgcacccaaaatgagctaattcaaattcaatgtccatagcccttcgccatatggggaatagacctgatcggagagttgcccaaaggcaagggagggtacaatatattgtagtcgcggtggattacttcacaaagtagatagaagccgagactctagcaaccataacatctaagaaagtgttgtattttgtagtaaaaaatatcatatgttggtttggacttctgcacaagattgtcttagacaatagcaagcagtttgatagcccaatgttcatagatttctatacgacacatggaatcatcaagagtttctccgcaatagcacaccatcaaacaaatgggcaagtcgaggcagtcagcaaaacactcaaagacaccatgaaaaagtagcttgaagaaggtaaagggaattggctggaggaactaccaaaagtattgtggttgtaacgaacaaaagaaaggacatcaaccggatagacaccatttaccatggcttatggttacgaagctatactgcccgttgagttagaacctccatcccaaagaagactgacttataaccaagaaaccaatcacaccctccaagtagaatcacttgatgaaattaaagaaataatagcctcagcaaacctaaagctagtagctcatcagtaaaaggtggctcggtacttcaacaagcaagtgagggcgagaaaattctttgtggggatatggtcctcagaagagtgttcttaaaaacaaaagataatgcggctggcgtacttgggcctaactaggaaggaccatatcaagtagcagatgtcactcacttgggagcatataaacttggtcagtataatgaaaacatggaacttgttctagtaccaaggtattgtaatgggaaatatttaagaaagtactactaataagtgtacaaggtctgatgacccccttaaggtgtacaatgcttgaacaactactcttaagtagatggccttctgagtggaccttgctcaaggcctcggataagacgactggcactcaggtcggatgaccatctctaaattacaatctagaaaaaaacaattgttcaatgatttaactagctaaagatcagttagatcatgtaatagcttttataattcaataaatgtaagttactacggtaactaaaacaatcagaccaataaatgaataaagatattaattatcattctaattgtttctattatttttctttagtaagttataaaattaccactaaaaatgtgtacaaagagttttctcgaacccaacaatcgaacaaacaaaatcaaacttgtgcaatgcaagtgaccaagagtcataagtctactcgatcacttgggggacaactatacttgtacagagcataggtaaataacaagctcgaaaaaacatttgcatgtgcaattacttaagcttaaggaaaaatattcattttaaaagataacaaagcatgataactccaggattaaaagcttcctagtcagctagttgtcttaaaataaaatgaagtattaccaagtttaaaagtcacttggttggccatatggtatggaaaaaggctcatgggccgaactaaaattaaaaaaaaaagaaaaggaaaaacttcacacggctagagtgcttggctctttgtacaggactgcggtatcctcaatggctgggtgttagtgctttagctggtcagagcatcggggttggctgcctcagattcctatttttctctttgggcctcgcaaaaactaagatatgcctctttgtttttctgaggtaatcaaattttgcttctggctttcccttcaaaaactcatagaaaacatccagggtggtcgtctccaagttgtccccctccttctgaagtacgtcatgctccgcctaccgacagctgagattctcctcgaaaaccttcttctcctcggttaagttggaaagaaaggtttcaaggctatccctctcatccttcagaccattaagatctttgatcaaatcctcattttatgcttcgagctgagtggtggatgacatatccttaatctcttgttgcagttcctcaacacatttattggaagccaaaagattcttatgaacctcgcccagcttcaaactcttctcctcaccctccttcttggtgtcctccacctcctttttcaagttggtggtggtcgttgtggctttcaaggctgaggacgtggctcaagagtaagtttaagccatcttcaagttgagctgcacaaagaagaaaagttaaaatttgcacaggtaaaagcatgaggaaaataccaaagaaaaagtacttactcgagtggtctccttcaatattcttctcataagcagctccacggacttgtcctccccccactagctaatagtttaccttgagaagcacttgctcctagtaaaactggagcatctccttacccttcttagtctcagggttcagcacatcaggagtggcaaaaggtttgtgtagtttgggcctatccgtactgacccctttggcgcctttagacgaagtagctgctgcctgagacatcaatttctttttggccagtgggttcacatccaacaccgtcccctccataactgtagttataggtccagccaaacccctctcggcaattcgttgaggtgttttgatgctcgggtttaggttcttgggcagaacgtcatctacctttgaccgccttgctggagacttctggccacacacatcacctgacctcttctttaaagcgcgcaacatcctttgcgacatgattgcacataaataaaataagaaggttagaacaagtataatctaagtaactgcaaataaacttaaaaacaatgtaaattaccctgcacgtgggcaggagcaccctcccaaacaagcatagaaggagcatcatcatcaaaagaatcctcctctacttgaccacaatggcctttccttttccagccactggggcgaaagatccagcaaccctctcagaaccatccctgagctttatggactgctcaataggtacttgaccacttcaaggagcctttttcttcttctccttgcttggagcctcttggccaggcacagcctccactgctgcctcctcagtctttggtacaaagttagctggatagagtttgtacttgacaaaattggtatcagtcgccaggatagaaatatttcgatcatttgaacggaattggaggattgcctgagctatgttctagcgtgaacggaggtcagcaataggacgaaatgtgccagaaaacggtatgcttagtgcccatccccttgaaaaaataatagtcctccatgaagccacctatctttgtcacctcggtatccgtggtgcccgtcagtcatgactccttaatctaagaaaagtaaaaataccccgaccagtttttcttggagcttgacttcaggtggaacagccagttggaattaagaggggatggctcactccatccttgcgaggcgtatagcaagaagaggatagatataaacttgacgcttttgggagtgaattgggtcgaactaatgtgataatagttggccatcttcttgaagtacagaagtaaggcaacattgcaccctgttttgtataggctcccgaccaagaacaataaccttctccatggtcggtgaacaattgatcggggaagggaaggaagcattcaatattcctcaagagaccatcctcaaaaatattggtcaatctttttgtggttaggatggatggtggagaaatccatcgatatcccttcagacctctccttctcatgggatgagcctctatgtactcctcctcgacgtagtcccggccagcttccaggacatcacctgcttcatacacacgttccacattcttctcaatatagatgctagaaggcagcaactgagctaccccctcttcctcatcgccttcagccttaaaaggagtagtgggacagacctcgccctggtcttccacttcctggatgtcaacgtccctaacaatttcttcatcctcaactataggacaggcttgttctgcgttggcaaaagcagctagatgggcaatatgagggttggcagatgaaggtttcctaacggtctattcggtttgtaccatcatcctatatttgacagagttttatcagaagtatgccttgcaatggtcacagcaaagttggcaataggttttcctcagcaactgggactgggcggcgctcaggcaaggtgtcaaccacactcggaaggaccctatttgtccagctagcaggaagataacatctccaacctttcttaagttcctcgatgaaatgtctgtatccctcaccacgaatttggtcgagataaaaatgatgttgcacctcaagctctggggaaggtgtatgcttgctacttacttcccaatctttgaagctagagtttgaaagattgtcactagacaaggatggactagcatggagatgggggttatcttcgtatatgagttgaagcaagtcctagtcaatatgatgcttacccccctaaaagactcactagggttaatctacaaaaggtgggagacaagagaataagagttggtctgagtaacgaatgaaaaacagattgtatatgccgaccaagcttgattgagattcaaaagcaaaggtttcacctagaaataaaattttcaatcccataattttgaaacctcatttggaatctgatttttgctaaaatcttatggacgagtggaaatgaacattttaaggttaaaatcgaagcacagtcagataattagttgttatggttagacatgaatgaaatttccaaatcctaaacctagtcattatacggttaacctagaacaatttaagaacaggaaaaattcgcagcaaaaatttagatatcatatatgtgtttcattgcaaatgtataaaagaaaggattgaggaacttactcactgatttgaagctttcttgctctactcagatggtgtcgtcaagaagtttcctataaattccttgaagaatttaagtgaaaactcaattgaaaaccttttgctctgggttttgagagttaaaatggctaaaaggttcatcaaaggttcctagtcctatttatatgcaatctgaaaaaagaattaatcatttcataattcaaaattttgggtttccccccaatagtagacgttaattactcattccagagagttcaaccatcaagtgtgctcaaatatcgatccatgattcgaggtgcaaccatcaataagcattaaatggtcagatattgaagagatccctagttagagtctcatcagatcaacatccatcatcgaagacacgcgccacccatctatacaagactccaagttgagtgaagtccacgtgcgactaggaaggcgccacagagacttgggggaaaatgttatcctatttcttgcaccttgatgtggcaataagaatggatgacacgtgtcccaaatttccgatgcttgagtagagggaagtattcctaccagcccattaatggctacttaacatctataacactcagatgttcgagcacgattgttgagaagatatccaaccaagatgcaaacatgcttataccgagcaaagcgtgtaagatagaaattgtagagatcaatctcgccatttccaagatatgaatgcaatccctataattgtgggactgagtcagagaatagaggtaacacacattagtttcctattcattatattgtaattatcgaattgatgtagattttgattttattcattatagaaaaagggaaaccattcatcatgtattaagccctataaatagtgtcgtaacgtcactatggagggggtcaaaaaaattaattcagaaaacacattcaagacaaaatagtgatctaagagagaaaatgactcagagatccattgtaagagctttcaagaggaagaacactttgttccttctctcaagtcaatacatatacaagtggagttgtctaatatcattctcacggggccgaacctcttcaaaatttggtgttcattttactttattattttttctttctgttatcccaatttctgcactctaacgtggcatcacttgatggtgacacgtggaatcgactccaggtatctgctcgcaagatacaggccgaataggacacttcaaacattcactcgaacgaagtcctctagaccgagcagtgagcaatccatacagaacgtcaacacttagcgaatttagctttcgcatcgtgagtcatcaaggaaattcctataactttgagatcaaattatagagatatgacaagctgtc

SEQ ID NO: 28971 - DNA, 1242 bp, Cannabis sativa
tgaaatgagttttatttagagcacgaaacccaacagatactactacgcagacctactccaagtgtccaatgagttacatgaaactcagcaaaagctagcatgccaggaagagtttactcaaaaaatggaaaaaatgatggctcgcctctaagctaaattcgatgatctggacaaagactctaaggaggatgcttcggaagaacttgttgacagagaaaatagagtgaaccctgccaacactgaaaccccaactaccgcaaaggacatgggaaatgggatggtaggtgagcgtcagaccaaaaatgccccgttacctctaaagaaaagtgtgaccgcgaccaatcagcaattaggaatgtagaaggccaccaacgcctctgggcttggatgcacttctgctccataaggcaaagttgtgctaaataaaaggccttgtatgaaagtatcaaagcctagggaaggaataaccgccctaacgattctcttagccaacatgatggggcggaggaagtttttactgacgatagctagtccactgtagacttccgaaggcatcttcacgccaagtatgagaaagccaaaggagaaaaggcgagacgtcaggatacgaattgttgatttatatggatccctactccgcctataatcagattaaaatggatgtcgcggaccaagaacacaccaacttccaaatggacaaaagagtgtactgttatgtggttatggcattcagattgaagaatgtcggggcaacctatttaaggttggtcgacaaaaagttcaaagatcaacttgggaggaacatggaagtgtacgtagacgatatgcttatgaaatgcaaaacttctagagagcataatgatgatttagaggaagcctttgtagttatccggaggtatggcgtgaagctcaacccaaagaaatggacctttggagtctcctttgagaaattcttggatttcattgttagcttctgggaataatctggaaaaaaatcaaagcattcatagacatgccttatcctaagaagcacaaagatgtacatagtttaactagaaggatcgcagccctcaacaggtttgtttccaagtctatggacaagtgtatcccattatttaacacattgtgcaaaaataaaaaatttgagtggactaaggagtgcgaggatgccttccaaaaactaaaggaatattttgttgggttttgttccctaaataaaacacatttcaatataattagatt

SEQ ID NO: 28972 - DNA, 1764 bp, Cannabis sativa
agcaaagaactatccaatcaacccaagttttaataaaaccaataaaatttaatgtaagcccaaataaaagtctaacatgctactatattgctgtaagtgcttatagaaagttcgaaaatgatatgttttcttggttcgaataatattcaagtgtttatatttgtaattgcttttgttttgttttttttttatttagtaaaaatttatgtcaattgtcttttttctttgtcaaactgttatattattgcttgatatattatttacaaattagttttttcattctttggtttgttatattttatcttttttcatgttagctaatgtgaattcttttcattttcatttgtatacgcaggaagaatttatttgtgtaaatcaaaagtgatatttatataaattaagttttattgaattgaaaattataaaataaaaacgtaaaaatagtttaaaaaaaatggtaaagtgccgttatgaataaattctcttgctataatgggtgaggcatcgaatttatttaagaatatttatataatgctttttttgtagatcacatccaccatggattgaaatttctcaactttaccaaatcagagatcacattaactcccaactttactttgaattggtatacaaaactaatcaaaactatgaagactactaactaaacatgaacataacaagtgttgttagtttcattcaaatgcaattaatttgtatttttgatttgtaataacaatctttatcaacctcacagctcattattgatgtaatgaagcattggatgagttggataattatggcttggtgatggcattgcaaccatgcttgtacttgtacatatatagcataggatcagtcccttgttcaatctgtctcattaaccaaataatcgggcctcaaaacttcagtgcccccccgcatcagtatctgcagaaagcattgccgcgactttggacattgatggacgagctgcaggtgatgcttgagtgcataagaaagctattctcttggttctcctcacttcttccctgttgaattcttctgatagttttgagtcaacaagttctatttcacaatcttcttcatagagatcccaagcctattgagctaaaaaacaatgataaaatgtatggagagataagaaagttgataatgtaaaatgatattatgagaaatgaaaaaataaaatagagaacaattgaagtcttaaaaagtctatgttcatttagtatgacattgttagatttggtgactaagtaatgtcattgtgttgtaatgagctgtcagacttaactacttcatgtcatttgtaataagctcattttaaaagagaataaaagcttagaaattcattcaattcttgtgtgtgtgtgtgttggtactgagttctgtgaaatgctttcgggtgtgttcattggagttttcttcctacagatatctctataaataattaaaagaatctagttttagtacccattcatgaagataggtcttttcgtcacccaagcttgagcatgaattcggtctgccagtaaggatttctaatgccacaactccaaaagcaaacacctgttttctctgtaaggtgaccaagcaacacaaatgaaaaagttcagtgaaaaaagaagcacaaaacaaagtcttatcttaaagaaagtcttacaaggttcccgcgagtcttgtacttacacgagtcctatcatcataaagttttgcaaaaccaaagtctgacattttggggacgagatcagagtcaagaagaat

SEQ ID NO: 28973 - DNA, 2105 bp, Cannabis sativa
gtcacactatagtacatcaccaaccgatcgaaaaaaaaaaacaacaaaaatgaataaacccatgaaacttacatacccagttgaagttactgatctatccgaaaactatgaagaaatcataggactgatatttgagaaaatggtttttctttcttcagtgacacaacaaaaaccagcgagcaatgagagtgggagattaagcacaatgtaaatatgtgtgtgtgatagtgtactgaagtggcttaattctagatataatcatgtgcttctatgatcataatgatgtgtagtgtgaattttttatcttaccacatcaaatgactttgtcaaataaaaagaaaccagtacactaaaatcaattcgagaacctaaggctggcagatcaagtggggcagaatccacctgaacagtaatcgtcaccagttgaacgaataggaccacaatggagaaaatagtcacaatggagagcaggatgaatgttaaccgatcggaacacaagtatctggtgaacactgcaagcacattatcgtgtacaccagaaatatcatcaatgtggaggctttgtctaaatacatggcgcctaaggtgcaagattttggggcaacaccgaccctcatgagtatgccttacattttgaacagaagacggcaatggcgtccattagacccggcaaagttgaagcagtgaattgaaaaatgttcacgcagagtctttgatggtcctgcacagtagcattatgatagttttatgttagaaatgttgtggtacttaggcactcaattacaactgaagttgatgtatgaatatgacaacctcaaataaagttgagtcaaaaaaattgataattgcataacaaggataacatatgataataatcttctcacttataattagagagaacactcatatcctaacaaataaaagactacaaacaaatgtttaggagaaacctcattcttttctcggcgacactctttcaatctctatgttgacctctacttctctcactcaaattactctacaaaattgaaataatatgatcaaatgagaaatgactatcatatatatagcggtgaccttacgaagtggaagcttatgcaatgcaagctgtaatattatagctttgttaccatttgtaaaaattcatcattcattaactttgtagaaaactctcacctcctttaactattccacatttgattgagaagcaatagtcatgtatggtttgactcaattttgaaagttcacaaaagtgactttatgtacaatatctctcccacttactcttttgtaattcttgttttatttttactttgttacttccatgctgcttatgtttccgctagatgaatggattatcgacacaaataaatttgtcattattaataggctttattaacatagctgcaaaactgtctctagagtagattattttgcaattccacatataatcctccaccttctcatgaacaaaaatgatattgatgtgtatgtgctttgtttaagtgaaatgccaaattatttgccatgtgcaaagtgctctcaatgtcacttgtttgtggtcgaactcttccagtaacataaacacatcctgagacaggcttacttttaccaagatcaccagcataatctgaatcaacatagcttctgacattaaagtttgattccccacaatataatgtggtatttgaggtacccttgacatatctcatatcctcctcacagtatttcaatattctctaccaatattttccatgtattgacgaatcgctcttgctctactgctaaggctcatacttgaggatagcttgaagttaaaagaaaacaagatagagattggctaacaatcttgcatgttgacgcgctgcaagattttcttgaagtagttcgtcttgtcaaatcttcttattatttctatctcggtataaaagttcagcaagacagaaatgtgaagattctcaaaagaagtactttcaaaaaatgcttcaacatgcaagatgtaagtcaatctctaccatacttcctattaattcaagttatcctcaagtatgagccctaacagtaaagagaataggttagtgggcaatttaatgtttgctatgata

SEQ ID NO: 28974 - DNA, 3329 bp, Cannabis sativa
  modified_base (702)..(702): a, c, t, g, unknown or other
  modified_base (3147)..(3152): a, c, t, g, unknown or other
tatattatatattatgtgttgtaatatttatttaatctctttgttggtccttgtattatattgcaatacagttgtaatatcttaattttcttccattgtattgtaataaaatctctaacagagaatgtactaggactgaacattttgagcgggttcgacccgaacccgagtaacccgcccgaacccgaaccggtgaacccgtaatttttttttttaaaaaaaaagttcaggcgggttgggttaacccggtacccttcgggcgggttcgcgggttgagtttttaggggtaccaagtttcgagttgagcccgccaacctgaaatttatatatattatatatttttttttattttttttattacagtttatgtatacatatattaaattattaattaaaaatgaaaaactcaccattgaacagatccttaactgtaaccatacatcataaacaaacaaaattattaccaatctaattattcccaatagtcatattataccaaacaaaactcaccattaataatattataggctctgcaaaaaaacgcatacgagcctcacaagtctgctttgcatgcatttgtcttgatacccaaaaaaaaaggatatcacatatgatataataacataaccatgacaacactactacatgcataagtacctgtaaatattttttatttttcttcacatcttagcattcaaacantacgaaaacaaacacaagggcatgagtgaagtaccttgatgatctcacaggatgatagttatgtacgttaatatggactttgaattttatgaactttaaagatataattatttgaataaaaaaataattttttttaaagagttgatcgggtcaacctgccaacccggtcaagccggccaatcgaaacctgccaacccatgacccgtcaacccgccaaccgccaaccgccaacccgtgccctattcaggtccgggttcggtttcttttttttgaacccgaaacccacgaccccgaaacccggtaaacccgtccgatgttcagccctagcatgtaccactacaccttcgaagaaactcttttgtcatattcccattaatctccctattatcggttaactaatctcgagagttagcagtgctaattttcggaattaacaatttgtaagagcaagatttaattcgagttctcaaggaaagtaccaaaatgttgaccttgcttttagtcaacaatactgaatctttaaagcgataaaattgaatgatcaattgataataaaataaagcaaattagaacacaggagatttatagaggtttgaccccatatatttgtaatagcataatccctttttagttgtaatacttagagaattaataaaatcacaaagtccgaccaggttagtttcttaataatcttggagaagcttacaaatatttttgcaaagtaattgctcttcaaagtgtaaaaaatctgtcccttcctcagtgaatggcctcattatttatagagaaaaggtaatacatttatgtcctagaaaaaaaagtacgtaattaaacttcctattttggtgggatcagttgaagatcgacttcaggctaacaatcccacgaatctcggtctagcaagttaatacgaatgagtagatattctagttgctaatttcgtagaaataatttaggaaagaatctaaagaagatctattttccatcatatttagttgtgtggacagttcattctgctcgacatgatcaattgcacgacatatcacgagctactcgctccgtctaaagaatagttgcaggatagttttacttagatgaatcagactttgagatagatttggtcgacgtatttgggaaatatgctctgaccagctcttaacatacatgccacgtgttaccttatgaagtgtcacattatcttgtgcaaaattttggacatcactttgggtaaacgaaaccatgtgccctaggttgaatatcaacctagacaattgtagctgtcatcaggtggtgtttaaggccaaacaactaccttgatgataaattctcttaattccaagtcccatatatatactattttgggagcaaaacaagacttattcccaagaaaaaattattatttgagtaacgaaaccatgtgcaacaaattaaatgtcaacttgggcactccctatagccatgggggtgtcaacctaggcgcctttcaagtgtttctcccaccagatggcttcatttttttttgtctaagagcatttatctccgtatttgatagaactaaaggagatgtctgagaaacatcttcacaaagtatgtcagaagcgatgcccagtctgaggatgaaatgtcttggaatttatttttttgatgttcaatcttctttttagtggaaagtgcacaaacaaatttggtttcgtctaatttacaggagttacttggtgaacttgagttggtgccctagtgcctaggtgatagcacactgtcaacttgggtgctcattagggaaatatgcacctttgggatatagtttgcaaaaaatcaagtcctcacatcgtttcttgtttaatttaaggaatcgaggtccaaagaagttcccaaaaacctaaaccccacctgtcgtgtgtgcccaggctaactagatgtcaaccttgggacccatgcctacctggtctcccaagtagggcttgttccatgattggttatggagcttggaacatggcagggtcatgtctctcatgtatacgagtgcaatggctaagttgattgcacatcaataatggcttaaaaccgaaacagatgcaacttaggacacaaaatttacttgggcaccccatcttgacctgggcacaggttgacttctgagatgcccatgtgacacccttagctttccaattatagctttttagggtcttgtgacttaattcttagactattgaagaacataacttatgagcgactttgtttacttgggtacccctttatgtcaacttgagtgctggaatactgctttgtaagtaagttgactgtcttgtcttgggatgtaagatcttaggattgttttcttcatgctacatgtcaaaaatatatataaatataattttttcgtaatttaaaaataagaagataatattaatatagtaaaaatgagaaaataataataataataannnnnntaataataataataataaagaatctaaatgccattctaaagtgaagatatatacttttaattttttcattcatcttccatattatatcagtagacaaagatctttcatctaaaatccactcaagccccacatatgatcttaggcaatctcttcaactactttaataaccgatctgca

SEQ ID NO: 28975 - DNA, 3708 bp, Cannabis sativa
gtgtagggaatacggagtagtatgaaactaatcaaggatttccttcctgatctgatcatttatcataatacaaactctatcctcatacttcaatagtcaacttagagttacagtgaaatcctttatagtactagtcgcaactttctttttaagttcatttaatttaggatcactctgtttgccaatctttttcctttctagtagatcagattgtagtgtaatattttccaatttcctgaccacaaactcaatctctgccgtagccatatcttcaaccagatttgtagaaattttcttcaattcatagatctacccttgccctttcagactaagccaatctgccactatatttgcttcactaggatgatagaggattttacaatcataatccttgaccaactcaaaccatcttcattgtctcatattcagatccttttgagtgaagaagtacttcaaacttttatgatcggtataaatctcacacttttcaccatataagtagtgacgctaaattttcatggcaaaaactactgctgtcagttctaggtcatgagtggggtagcattgctcaaaatctttcaactagttagaggcataggcaatgaccttccctcattgcattaacacgcaacacaagccttgtcttaaggcatcacagtatatcacaaacttcttgtcgctgattgacaaactcagaattggtgcggtaattaatctcttctgtaactcctggaagttgttttcacatttatcaatccacacaaacttacaattctcttaggtcatctctgtcaaaagagtagcaatcttggcaaaatattccacaaatcttcaataatacacagccaacccaaagaaacttttgacttcagttgttgtcttaggtcgtggccaatcctgaacagcttcaatctttacccaatctattaaaatctcttccttacttaccacatgtcctaagaaactcacttgggaccactagaattcaaacttcttaaactttgagtaaagcttgtgctctcagagatgtttaagtaccatgcaaaggtgttgctcatgcacttcctctgatttagaataaacaagaatatcattgataaacacaatcacaaagttattgagaaagtccttcaacactcaattcatcaagtccatgaatgttgttggtgcattaatcaagccaaaggacattactaaaaactcgtagtgaacatatcgagtataaaaagcagctttgggaacatcctcttcccgaatcctcaactagtgataactagatcgaaggtcaatcttggagaagatggtctttccatgtaactgatcaaacaaatcatctatcctcggcaaaggatatttgttctttattgtcaactttttcaactctcgacaattagtgcacatacacaatgatctttccttcttcttgataaataaaactagtgaaccctaaggagaagtactcggcctcgtaaaccacaaatcaagttatgtaattgaactttcaattacttcaattctactggtggcattctatacgaagccttagaaacttgttcaacctctggtacaaattcaatctcaaatcaatctctctcttgggtggtaattccagtaaatcttccagaaatacatccagaaattcacatactacctgaaccttctccggtccctctggtgtatcctctgtgatatctattacaataactaggtatcccatacatccttctcccaataattcccttgtcttgagtgccgatatcattggaattcgagatcccaaaatcttataaaaacaaaaggggtttaaccctctagttcaaatgtcaccatctttctcttacaatctatggtagcattgtacttggttaaccaatccattcccaggattgcatcaaaatcctctaaatctagttcaatcagatccactgaaaattctcttccttcaactaacactggaagagatcttacccacctcctggagattaccacttctccagtaggtaacaaggtaccaaatccactagacatgatattacaaggtctactcaatttctcaataattctactagaaatatacgaatatgtggcatccaaatctatcaaaatagtgaacataatacccccaatagaaatctcacctgtaacagtcgaaggaccagcctctggatctacctgggtcaaagcaaataccctaggaagaaccatatggctctctttcttcgtctcatgcttctataaccgtaggaaattatttctaaaatgacctactactccacattagaagtaggctatggaccaaaattcacaagtggcgtttcttgcactttggacattcagggtaggaaggccaagcttcatttttgccttgacaaaaaccttggttaacctaaaaccttctgtttgaaccataatcgatggcttatttggtttcctttttcgatcataagggttggagcccttgctcattctagtaccagacggtatcttcaatgcacccttcctctgattactctttttacaaattaagccctcaaccccctcagcagtgagagctaaatacataatctaaggataggtcttcacaatcgttgattgtttggctgtcataacaacatccctggaaatatactcttccaggcctctaataaacttggcttttcatgcagcttcaaaggccagttcattagaagtaaacttggccagcctgtcaaatttggtagcatattcagttatagtcatgctaccctaaactaaccatgcaaactcttttgcttgcatagcacaaataaaatcgttataatacttctcataaaatattacccaaaatgcatcccaagtcatggtattcaagttatgaacttgagaaacaatctcccaccatatccgagcatcatcacgtaacatgtaaatatcacatcgtacctagtcattatcctcgagtcatataaagtcaaagatagagggaatcatactcattcactgttctacctttagcgggtctggaccatcctcaaacataggaggattttgtttcctaaactgctcatatatcagttccatacgacctcccatatttggctgcactaccagaggtgccaatgtaggtgaaggatgagcttgttcctctctcaggtctcaaatctgctccctttgctacctaattgtctcatgcatggaagcaaatatttgtctccaattctaaggaggtggaggatgctctccctccccacctaccttgagccccaactcactgttcaaatgcctagatcgctgctgcatgatctaatgcacttgtgatctaaaacttccaaccattcaaaattcaactagatatcatatcaatatgcatatgtcacacaaatattcttatcacaatcttggttatattactttcccaacatgctttataatagtccaggtagctgatccaatatcaattaatataaacacttactataccatgagttgacctatcttcgtagaaaatgtacatattcgactagtctttaggacctttaaaactatggctgctctgatactaagttatagcaccctaatctatagggacgccatgtgtgtaattttataaactattatagtgataatagattaattaattattaaaccctagtaataaacaacacaacaacactaaaactttgttccggggattcctgttacaaaagttttacaaaaggactatataca

SEQ ID NO: 28976 - DNA, 1826 bp, Cannabis sativa
  modified_base (58)..(59): a, c, t, g, unknown or other
ttaaaccattagcatgtataattcatgcaaacataaatcacttcaaatttcttatatnnataactaatcagattgtaaaggattttatttagggcacaaaatccaacaccactgtacctggatgagaaactctaccaaagtaaatttgagatttcccaagattaatagacaaaccacaggttttactaaaatcttctacgacctccctgataacttgaacagactcctcaatccctttgcaaaaaactactagatcgtctacaaagcaaagattagttagtttcagctttttgcacatcagatggtacctaaatttcttctctttagcaactaattggaatctccgagacaaatattccattataagaacaaagagtaaaggagagataggatctccttgtctcagcccctgctctcctttaaaagaaccctgtaatcttccattcataacactacaagaaaaaatgggtattgacacgattaaattagtgccaacaaattcatttttttgcccatctgttgattggcacgatatgtcgtgcccttttggtcaggccaataggttcgtgccaatatgttacaaccgacaccacaaatggtatcgtgccaatagccaaaacaaatggcacgacaggtgtagtgcccattggtattcattttaaaaaaatataattttataattaaaaattaatttatatttatatttaaaatattcattaaaaactaataaaaattacaataatcaaaataataaaagcattcaaataattacatgcaactactaaattaagtgctcaaataaaaatacttatattgtcacattaaaataactaaaataagtgttcaaatataaaatacttatattatcaaattcattgttcaaatgatacttatattgcgataaatgacgacactataatcctaattatgtggactcctcctcgttcccatcatcatcatcatcgccattctctccaaactgttgttgtggaatatgtgacatttgtagatagtaaggttgctgcgacacttctggcatttgcgggtagtacggctgctgcatgtgtggaatttgctgcactgatgtcatcggtgatgactgctgcacatgagacaccggtggcatatgttgcatcgatggcatcaaaggcatctgctgcatatatggtgtttgttgcatagaaggcatctggtgcaaatgtgacacatgctgaatatgcgcaatctgctgcatcgaatgcatctagtgcacctgtggcctctgttgttgcatctgtgacgtttgctgcatggagagctgctgcatctgtggtgtgtactgcatggaaagttgttgctgcatctgtatgttttgcatcaaaggttgttgctgcatctgcgatgattgttgttgcatctgcgatgattgttgttgcatttgttgagtctgctgcatttacggtgtctgttgcatataatttacttgcagctgcgacattggcgaggacaaccaaggaaacaaggacatttgctgaggtgatgacgaagaatacataaatggaataggactctgctgtgcttgatgagattgagaagtcccaggctgtgaagatgaagcagacccacctcagacatttgaggtttgaacgtctgtgttggaggcattggcattgtgaacaactcctcttcagtaggtagacgaatatcaggtcccaacctttgagacatccacaacattgttcttgtcaatttttcaagttgacgctcaactctgggatccataggcatatcttgagtgggagtaggttgtgtgcgtcgggataaagattgtccctttagttttctcc

SEQ ID NO: 28977 - DNA, 5047 bp, Cannabis sativa
gcaacaacatcaacagcagcagcaacaacagcaacaacaacagcagcagcaacaacaacataacagtattaataatacctcacaaggacccaaggaccttggtttgcctcctatggtgtcccaagatgaaccacaacagaagcatactgaacaaactccccttcagactcctcaagctactgggatgcagatgtctggaaaaactcctgtcttgatgcaggaaccagacagaccacctcctccagaaaatgaatcacagtatgtgaaacttcaaaagatgagtaatcaacaggctacggtctccgatcagccgaccaatccaccacaagctcgtagtaaacaggtgccctttggcttgttattgcctgttttaatgaatcaacttgatagagataagggtatgcaacttcaagaattatttcttaaactcaaggtcagtgtaatatattttacataatcctcatttgtattattagttttcttttactatttcttattggtttttgtatgttcagagggaagaaatcaccaaagagtcatttgtccgtctcattagaggtgttgttggggagcagatgcttaaattagcagtacatgcagtgcaatcacaggtaaatccaaatgcattataagtttgagacatttaatactgttattaagcttagaactagcacgcacagaactttcaaccaagcctaaaatatcagctgcagccccaagcatcaatgcgtaaacagactcaagggatgccatctatcaatacagggacgacacattttactgatcctcgttcatttgcacaagtccatcagaagggcgccggctcttctgcagatgtctcacacatacctgcttcaatgggccaattacagactaatccaagccaccaaattatggacaaaaatgttcaaatgttaagagaggcagatcgtcagtcagactctcatggaaagcttgttaatcaaatgcctttgtcaactgtggtaacccccaatcaagagagagattctatgcagcatggatttaacaggcaacagcaacttcagcatcaacagcaacagttgcactttccacagacatccttttcctcctttggaaataccggtagtcgttctcacttgttttctggcacaagtgccaatacttcaacattgtctgtcaaatcgcaaccacatgatttacaaatgaggcaaatttctcaacatcaaggcatgggattgggatcagctcagtcaggtggagaaacacatggtgcgaatgtcttgggtgtatccaaattggggcaaaatcctagtctttctcattttgcaaataattcaatgtcttacgtaaaacctgaaccagttgagcaggctatcgagcttcagcgcaaaactccatcatcttcacaggcatcaccttcagtttctgccgcaaagtttgaacagggaaacgcattttctggaactttaaaagatgagtctttagagaagcagccatcaagaatgggttttccaacttctgctggggttgttccttcatcatccacaagcatggcacccccacattcactttcttcctccatggctatgcaaccagatcccagtgtcccagtaattccatctttatctttaatctctgctatgtatgctatttttatgcatttttttcttctttcatgtgatgtttagatagatgctgttacaattagatgtggttacttcttggtttctgttgtcttgtcagacaatcgatattgacatgtcacgtgcttaggaggaatggaaaagattaatacgttttactaattttataacttgatttttgctttccattttctatgacgtcttaaggagagtgcaatagttttattcttagcaatagaatttgctagttgatacttgatgtaattatgatctctacctgttattgattgcaagtttatttgttgcttatctatttcttcagttaggagctcgggcaccttcaggaatcactccagctggaattaataataagacacctccgaaaaaaccttctgttggccagaagaaaccgcttgaagcacttggttcttcaccaccaccagcagggtagcttacttaatgttatgtaatttgtaacagtcatatgatagttttactttaatcttttccgtaagcaacactatgcacattgctcattttcgtccacattgattgctgaatatcttgcagtaagaagcaaaaagtcactggcaacttttccgatcaaagcattgagcaactcaatgatgttactgccgttagtggagttaaccttagggtgcggatcttgccattttaaaatctacttgttgtagtctactagttaattatgcaatgatttgatcttatgatgtttcacacattataggaggaggaagaacagctcttttctgtacccaaggaggatagccgagtaaccgaagcttctcgaaaagctgtgcaggaagaagaagaaaggttgatcttgcagaagaatcccctgcagaaaaaattagcagaaatcagttaagagacactatatatatagatatacctacttgttcattgcttgttttggtttccagttgtgtgtgcactttttaaatttctccgaataggaattgagcttgaatatttatgcagtgaccaaatgtggtttgaaaaacataagcaatgatgttgagcggtgcttatcactggtgagacccaagatgcccaatttatctttctcaatatatataatttattatggtccgtgctaattgctaaatggaatggactatcagtctgtggaggaaaggatgcgcggactgattgaaaatctaatcagactgtcgaagcaggttaattttcgtttctttaccatctcttatcttcatgtttccttgaaagtttgagatatctcatttctttttgtttctgttgattgaacttcattagcgtgtcgattctgagaagtcaagacaccagactatcaccacatcagatatacggcttcaaattatgacgatgaatatgaaagctagggaagagtgggaaaaaaaacaggctgaggcagaaaaactccgtaaacaaaatgatgtgagtcccttgcatttgtatgttaaaacaaaaatgcacacttggttggtttaatacttgctttctcgagaacttgaaaactttatctccgtatgcagcctgacggtaacaatggagttgatggtgataaggagaaagatgactttcgttctaaatcgtttaaggtatcaatggtgcttttcttgtgagagttgttatgttatctttttatacaggtgaagagataattatctccttgctcttttttttcctccgaagggtcaacaacctaacaaagaggacgatgacaaaatgaggacaacggcggcaaatgtggctgcacgagctgctgttggaggagatgatatgctttcgaaatggcagcttatggctgaacaagctcgacaaaaacgtgaaggaggaacagatgctgcatctggctctcagccaggtaaagatgtgagccgaaaaacttcatcaacacctggaaaaactacaaaagaccatcatgatgctgagaaaagaagcggtacagcattttctgctgcttctggtacgtgataaatttctaaccaactcttgattggtataatgtcactgtatttgttgattgactgctgatatcttaacctgggcaatgtttttgcatcatgtgtgaaaactttacatatgcattagctctaaaatcttaaaaatagtccaatttgttatgccattattgctgtttgatttttcttctatattaccaggtggaagaaaatttggaagaaaccaaggcgtcttgcctcaaacaaaggtgccccgtagtaatataacaatcaaggatgtaattgctgtactcgaaagggaacctcatatgtctcggtctcctcttacatatcgtttgtatgagaaaattcgatctgacccgacttctgctgaatgatccgatgtgcctctacggttttgttgaattaggccaacaaggtgtgtggaagagttggaaaatcatgctcaatttggagtggtattggtaaagcttgctgagagattctagcttgtacaacaaagctgagtaatagttaattcaaatttgcttatatgtacatatacattgatataataaaacgacatgtcgttttacttgattaggaaaacgacattttgtttaatttactttgactacacttacttttattttattttaaataaaaagagaaatgtttttgcttcttaacttgtacttacaattaatagtataccaattttaatcattattatattcttattaacttcgtttgatttacatatttatttttataaggctaattagtcattttttttcctgaattttgacatgtactaaatcgtgtctcctgaacttttttggctgttaaaaattctctcgaattattaagattgttagggtgtaattatgtatttcgagtcatgtggtattacctattaggtgagtcccttatttgtttttatcataatgatatccttaactagttcgatattataaggctaatcttaataccaagaaagatttagaggagagattgaaaaatgaaaactcacacttaaacttttcattttatttttatttttcttgagggacacaatattacaacatttattaaactagttcaacaaattaaattaaccaataataataataataataataataatgtaataatacaaaagagacttaaaaaattaagaacaaaaaaaaaaacacaacaaaactgactaaaaaaagagccatagatcaccctatctttacaactctctatacaaaacaacaaaagcatttcacaaaacacactctttaataatcatattgatataacacaagactctcataaataaatgttcatcatatccataaccaaattatccatcatactcacagccgcagcttcagaacatcgcttattcattttgcttacactcgaagcaacaacatcatcagcaacatcaacattggtgacggatttgaacttgttgagaggacaaga

SEQ ID NO: 28978 - DNA, 1650 bp, Cannabis sativa
gaaactagtttatgttggaaaattggtggtgggatatcatttagaagtggttcggctccttggattcaaggccacacttcttttcttcctctttcttatgttgggcctatgaatggtgtgctagaaaacttgataacagaggagtgtcaatgtaattacaatgattacatatttaaatcatgagaattagcagattattaaagagtaaattattagattgtgattatatgttcttaataaaaaattagggcttgttgccagaatagaccttaagaaaataatttcttaattacggagatatatttgaattctaaatgtattatttatattatatataattaatattttcatattttatgcccgacaacagtataatacgacactttggccaattagagtcacttagatgcggttaagtatataagaattagttgggaaagatatatttatacatttagaatattggaattatttgagattattttatccctagattattagattggttagtagtgaagtaaagggaaagttagttatttggccttttattttattatttgaagataagtggattcttatgttaatccttcggttattcttcttaagtgattgctgaataaaacaaaatttaactaatgattttcctctttagcaaagaaaactcaaaaaaaaaaaaaaaaaccaactctcatccttctctcctcctaccttctgcccaagcaaaaaccaaaggaaatccaacaatttctacctattttaaaaccaaattcaaggggaattcaatttagaatccaaggattttgatagccaagctaaggtaagatttttcctctttgatgttcatagtagaaaattaggttttcatgcaattttgggatttaaattctgtatgaattggggatgattaggttttgtttctggagtaattttagagtaatttatgttgttattggctggtttgaataactatttcatgtttgagcaaattctgagcttttaagcttaaacttgggtcttccatggtaaaattgagatcatgggtttatgcttgctcttaactgttgggttatgtttgttttaactatttatgaagttctggacaatttggttaaggtttggttttgaaatgaggctttttgggaaacttacccaaaaaaatggcaaaccctttttacagaatcggtttactgttttttttttataggtataagcccagaaaaataatttaccatttttataaaaacgatttgttgtttctttcagggtatttttccagtctcattttttcgtattttctcaatatttagggtattgccacactatcaatcgataggaaagctttcagttttgagtttgaagcccctttcaatgatttagcgggttaattaactaattttacgtaaattgtgacttaggaccttaaatcgtcaagcagtagtttccactatgggttgtcggcataattgcattcagaatcgaggtaagactagtataattatatgcatgtttacatgttaaatgtacatgttttatagttttcagtttgataacatatcagttagagcaatattagtgtacatatatttgcactgaacattgacggatatatgttaggcaaattctaaagccattagtttggcatatcaataa

SEQ ID NO: 28979 - DNA, 1445 bp, Cannabis sativa
ttgaattttgtatattgtgttgtggattcgggtattttatggctgtttgggaaatgtgggagacattggatgttgaatttaattatttatttgattgtttagaggccctaacaattggtagactaggatgaatgattcagtttaatgcttcaagatttgagccttttgggaaaaatgcctctatatgtgtgtattgtctagaacactcacattccaatatggttagtgtgtttcaaagaataaaagaacacttgtgaccattattgtggtcattgtcaaagaaggttctgatcgtatagttgttggtgcatcaccatttttagtatgaaaaatgggttttatacatctatataaattcagtttgaaattttttgttcatgctctcacattgtatgtgcagctaaatgtagaagaactttgggaaagtgctgattctggtggttggagaccgtcttcagctccccgctccgagtggcttcgtatgttcatttcattttcttaaaaggtcttctaatttgtgaattaatgagcagtagaaagtaaagtaattattcatttttttactttgtggcagcaccgtcaattggaagcaatggtttcctacgagtgcgatgtaatggtggtctcaatcagcaacgaactgcagtttgtacctttctcttattctctttctcttttaaattaataaaactatttgcaatttgcacttctgttcttactaacatatatttctactcaattgttatcttggctattatagatttgtaatgcggttttagctgcaagaatcatgaatgcaacccttgtgctgccagagttggatgcaaactcattttggcatgatgacaggtataagtttgctgttctttaaccttattttacatgaactgatatttacagaccttgtttttataatgcccagttttacatgtatatgtgtgcttgtgtatataagaaactaagttttcttgaaaagaaaattatattttttgcagaattgtgaaagtaagaataagaaatgacatctttgaatggttgtggttgagtttagtgtttttgtctaatccctatttcagtttttgaatgaagaattgaaaaagttccaaaatgtgagtgagtaaatgaataacagtgcaaacaaagttccaattagttctcactagatcccattgagtctcgtgacatttaaaattaatgaaccgaatggcttctaattgtctttttggacttcaggggcagttctgctatctgtcctgaattggcatttaaaatgccagaacgttgatctttatatttcttctccacacttgatatttgttttaagatctagttttagggtcatagaaaattatatcagtgagtgaatacagtcttaacatatctttcatatgcagcggtttccatggtatctacgatgttgaacattttatcaaggcactgaaata

SEQ ID NO: 28980 - DNA, 4545 bp, Cannabis sativa
aaagcctcatacttggcttcattgttagatgcagaaaattcaaatctaagtgcaacatgtaccttaaaattactggggcttatgagtattataccacccctgagccttccctattggatgttcaatcaacatataaggtccatccttcattgctcggtatgtcaggatcaatccgctcttcgataatttccacttcgctacttggaaattcgagtatgaaatttgtaagggcttgtcccttaatcaggaatttaggtttatatttgatgtcgaactagcttagctccactgaccatttcaacaatctaccagaggcctctggtttcgctaaaacttacctcaaaagatagtttgttaaaactacaatggtatgggcctggaagtaaggtcgcaattttctcgacgctataccagtgcaaatgccaatttctccatctgtggataacgagtctcagtgtctaaaagatgcttgctgaaatagtacactaggtattgcctcccttggtcctcgcggattagtaccgaactaatcgcatattcagacaccgcgaggtagatggataagacttctctaggcatcggtttagaaagaattgaaggctgccccaaatgcgatttgagggcctgaaaagcttcttcgcacttctcagtccattgaaacttcttatttccttttaaaatttgaaaaaattctttgcatttgtcagaggaacgtgatataaagcgatttaaagctgcgactttccctttaaggctttggacctcttttggtttggtcagagatcgcatttccaccaaggctttgattttcgtagggttagcttcaatccctcgctagttcaccataaagctaaggaattttcctcatccaactccaaagactcatttgagagggttgagtcgcattttgaatcgtcgcagtatctggaacatttcttgtaggtgggtgacatggtccttcgcatgttgagactttacgagcatgtcgtcaacatatacttccatagtctcgccgattagatccgcgaacatcatgtttactagcctttgatacgtcactcctttatttatcaaatcgaaaggcattaccttgtaacaatacagacctcaatctgtaataaaagaggtatgttcttggtctggttcatacattggaatttggttatatcccgagtatgcgtccatgaaactgagaagttcatgaccagcggtagcatcgacaagttggtcaatgctaggtaggggaaaactatcctttggacaagctttatttaaatcagtgaaatcaacacatgtgcgccatgagccattaggcttgggcactagtacgggatttgctaaccagtttgggtagaatgactcccttatgaagccacatgccaaaaggtgatctacttcctctatcaacgcttggtacctcgcggggtccattttgcgacgtttttgtcggacacctcgcactttggggtcaatgttcaaacggtcacacatgacctgcggagatattctgaccatgtctgaatgtttccaggcgaaagcatccaggttttgtttgacaaaagtaacaagctttctcgcttttgaaaagttagtttagaaccaattttcaaaactgcgttattatctaaaggatcgattggtacctcaatggtatcttccacagcttgggcggtagtagtataatcgaggacccttggatccaggtcttgtttttcttcatggggtatctcctcgattctaaatacttcttgtcgaggaggcggtgcttctaacatgtatatcatgttaactgatttcttctctgcaagttttattgctgcattgtaacaatctcgcgagtccgactggactcctcgtacagatcccactccaacggaagtagggaactttatgataagatggtagatggatgtcacaatcttcatttccttttggataggacgaccaatcactgtgttatatgctaagtactggtccataagggtgaagtcgcccatcgacttggccacgacaggtgcagttcctaaagtgattgagagtttgatcattccctttaacgcaatggtgtccccggtaaaaccatagatactggaaaccactggtcacagatccttctcctgtagtcccatttgcttaaaagcttgaaagttaaggagattcacagatttctgttgtccactaatatgcggtggacattgtttcctccaatgttagcgacgatgaccagtgcatcggcatgtgggtggtgaacccatctggcgtcactttccatgaatgtgatgtgaggccctccaataattgttaagatgttgcgaggagttctcgaaccgcttgcgttgttactttcttccttatcatccgctcagggatgaccttcctcatctttcttgtacttgccaaatttccctcgtctgattagttcctcgatctcatcctgcaaaaaccaatattccagactcgtatggccaatatccttatgatacttacagaatttctttggttctctcttgtcgcgatttcctctgattgggggaggctttttgaagactccattcttctcctcaatcgcgtatatgtggtcccgcgggactgctaattctgtatagttcaaaaaatgtgggcctccttttctcttaggagacgactctttctttggaggggatttggccaactttggactccgctgtctttggggactgcgtcttctagggcttctccctttggaatttttccctctggaactgcgggatcttgatcgcagtatgggtgactcgcatttatcctttcctttctctagctcggctagagaattttgaatccttttatgcggctcaaccatagcgaagaactcgactaacaattcatgcctttgagcctgcaactccttccagaaatcggttcttggcaagacacctgttatcagcatacaaactaacgaagactcgggggccttctctactttagttacttcggcattaaaacatttaaaataatcttgtagtgactcaccaacgtcttgcttaatgttaggcagagtagtatagggtggcctatatgtcatcgttgcttggaactgtgtgaggaaaaggtcgacaatggtttcccacatcgatatagatgcttcaggcaattagttgaaccaatcgtgagcattatcctccagtgtagccgcaagaatgcgacattccgcaagctagggtacctggtccacttccataatagtattaaatttctctagataatctatagggttagtgatacctttatattttaatgattcagacagccggaatcccttaagcaaccgagcttgtcgcacttccgtggtaaaaggaaaagtcccatgcaatttatgcaatttgtaaatgttgtaaatggggtaaatgggctttatgggctttctctgctgctcgattatctttaaagcctgcaaaagaataccctggtcgataccccttggaagggaggtgtttccctgagtcatcgcgggtgcagttgctacaacggctatatttgatgggataaccatcccagtagtcgtagctgatgcagtaggtgggttggtgagattatttacgccctgatctcctaaccggggatcacgaggctcttcatcgttaaggtgatcacgaaggtcacccctatgaacctggtatcttcctcctcgtggtgtttccaccaaaccagacctagtgtacagactcggggtgtgactttgcgaagacgaagagccagactcagcgtcattctcctcattccgcgattggggtctactgcatggattacgtcattctgggtcctcttctagttgcacctcccggttgaggttccgtgcggtctgatccctcgaggttggctgattcaaatcgaacccttcttgacctgtccttcactccctgcgagtacggttagctcgttgtctagaagtagttacctgcggattattcgagtgggtggtgggtactcaaggaggacatcgagtcctgtttcgtccatcaatttcagcctgcaaggcccgcaattggtcctgtatcgctgtgtacagatcagtagtcaattgaacaatgccttcggacaccacgacgggcgtgataggtggaaattgtcccactgtggctgttggtgtggacgtttccccaacgtgagcagcagtatctgggaacaaattgagcagcgttatgtttgtccgccccactccgccattgatggtgtcgacgggaggtgtcttgtttcccgagagtgggacattcctcatcccaacattgattgatccattgttgatatctccattcgtctgatttccagccatagtaattttccttctaaatcaaaaaagtattgcgttcccacagacggcgccaaatgttcttgaaggaatttgtacaacaacaaaataaattataataataatagtaatagagaatatatgtgaatactcaacccagaaaggcgagcactcaattcaggaacacaaaatacttaacaaaaactggaaatacaaagaacacgagagaatatagtggttcagtcagatcacagtctgct

SEQ ID NO: 28981 - DNA, 3146 bp, Cannabis sativa
ataagtgatgaaaatacttctatctctttattgataattgaatgataaagattactttgaaatagagttttatttagagcacaaagcccaacagacatatgggactaggccctacacctaggttgacattttgtacacttgggttgcttccaattcagatcaacaaaaagtgctctaggcatcttctttgtcatcacaaataacaaagaatcaagtaaactcagagagaaaaccacaaacatgagtccctagaaacagggccagcgcctaggttgacctagtgctgggcccagcacccaagttaaaaatcaacctgggatgctaccttcaattgcttaaatatcaaatatgatccaaccattgaatctggcatggtcaaacttagggggatacaccccattctaagtttagaagccttggaagctttgaaagtatcgaaaatagaatcatgggagcttagttttaaggccctagcgcccaggtcaacatttggtctggttctcagggttttgcttatccgaatctgatgcaattttcaccatccgtcaagtttttcacaagtgcaatgatccatgaagtcaaattagctaaattcacaacttaattttggctcatttgaaagccgaaagtttcgagtcttccgtttctacaaaatagcaatatcaccgagaaggagtgaccaacttcaccaaaacatataaaaggactaagaggtgtcaaaccatcacttgggcatctcaaaggacttcccttggacatttctacacctttacaacgtccatgttaatgtcagatgttaacctgggcactggaatgtcaacctagggggtgctaaaaccttaactaccttcagtaaaatgaccataactcattcagtcttcattcaattaatgcgattcaacttgcattttgaagctatttaagccctctatgatgtcatgtctcatacatcaggaaaaattctgaagctatcattgccaaaatttcacccctaagggagttccaaaaataagcttcgagtatctcgtagtgggacctgctagacaccaaaaattaaatatctttaccagaagctatttttaccattagatcatcatcaacgatggaaaaagatttatttgtgtttttatctcctatttttgtgggtctccttcacctataaaaggagatttcccatagtttatttttcacattcacaaaactatccacaaggtgagagcatctctctctagactctctctctctctctctagagtttggagtttctaatacttagcctactgcagtaatcatcatctcgtgagaaataaaaactcgaagtagacgtagccccattactatcgcgacataggggtaaactactataaattttgtgtgcctctcttattaattacttgacaacttattcattctcatcaatctagcgagtagatgttgacacagtattctttgttctcaaatcaatacaatctaaggggagtatgctattaccgaactaaaggggccaaacctttttaaaatcttgtgttctttattgcttactgattttgctctgtcttaattacattttttattattaattaactcactgtcgttggctaaaagcgaggtcaaagtaggtacctggccgttaagtgtgtaatcattatctacgtgtcattttcttattggtatattaaaattaatttttaaataaaaacaattaatgacctggaccaatcaggactatcacgtggtcattgacttgacacttaatggacagatacctacaaaaattctagaaatataatttaagtatttaatagcaaccagaacagaagttaaatttaagtatttatgctggaaataactttttaattctttataaacttttggtaatcatattatatttttatatagatatagtacttttatcaatatctttataatttttatttttaagggtgcttttattggcttttatgttttttttttctttctatcattgtcccttttctaattacatatcgttagaaaggtagtattatttcttaaaaaaaaaaacttcatcccttttgtaattacatgttcttagaaaactaaccatgatattcatgcaactatacaataaaagtagtgaaaagtagaataatttgtattttctcttcctaaattatttttttaacactctcaaattgtctcttaaaagatattttttgttaataattcattcgaaaatataacaattacattagaagtgggtaatatttaaatcaatttaattatattaaaccaacctaaattctaatccaattacaaaaaattgaatatttaattataattgaattgaatgtaaattacaaaataaataaataaataagatttaccgaagtatcagcggggaagaaattcatgaagctagtaaattaatgaaaaatacttataagtatcaatacataagagaaatatttcaaagaagaaaaatatataaaataactaactaagtataaagtatatataacaataaagtaacacatattagaaaaaaaaaaaaaaagaattatttcatatattattttttaatatatttttttatttttacagtttaggttccccgtgatttttatgtagatttaggttgtgatttaagttgctttattaattgtttaataatttactatatagattttcgtaaaaaatatatataaaaaattattttaaagtataaaaaaaaaataactgtatatagagacactttttatgactggacataagcatcacatcatcaatgtttttatgactgcatataaaaacattttttatgactgtatgtagagtcattgtttttttagaaagagtgactttctttacacaatgtttcctaaaaaatattttttttttggtaaataaattttttttatggttataatttggtgagaaaatctattaaccgaaattggatcttgcactaaagtttcaccttatttatcatattttcttaaatgccaattaaattttagaatattggcggttaaattatctgaactttacgttttgtaacacttaaacacaaaaaccataattttggcggcacaactacctaaaccctagtttcgttttgttctgcacacctccgtccaaaaatcacagttaagtgccacggtgga

SEQ ID NO: 28982 - DNA, 1350 bp, Cannabis sativa
cctaaatataaatttagtcattttgcaaaatcccctatttgttgggataatgagacattgttatgtacaacaagcatcttagtgcatttcagttgtgttgattgttaatctttttcatatgacaaaaactgagactttttgaaattcaaaagatgttactaaagcaatttaagctaaaattccatgttttatctgtttcatggctatctcaaaaattgtccaggaaagttttgctgataagtacctttttttcactatatttactagaggtgtttgatactagttttccatacatgtcttccttttggaagctaatcatgattttatgttgtcaagtgtttttgccacagagcattttgatacttgtagaaggtaatgtcttaaccaaatcaagatacatgaagaaaatgactgaaaactagttcttactattgtaagcatgtcagattagttattacgttatagttaggaagaacatcgaaagagtccttttctcgttatgaaactataatcacatgtcaaagaactaaactctgctacattgcctttcctttctgtttctcatcaaacaggttgatgctgtagtttacctagttgatgcctatgacaaagagcggttcgctgagtcaaagaaagagctcgatgcactcctttcagatgagtccctcgccactgtaccatttctgattttgggcaacaagattgacatcccatatgcagcttcagaagacgagctccgataccatctggggctgaccaatttcacaaccgggaaggggaaggtcaatctcaccgagtccaatgtcaggcctcttgaagttttcatgtgcagcattgttcgcaagatgggatatggagatggcttcaaatggctatctcaatacatcaaatagggaagaaagaaagaagagttagggggagataagcaaatcatcatcattattattgttattagcttttctgtatttgcgtgggaaatttttttctgctgttaggttgcagtgactcaccacgattcatatcccaacagagattttataattttttcttttcataattttttttttttttgctttccattttattgggttggaggaggtaacaatatttgattcattgctaatgttgggactgaaagtttgtgctttaaactcttgtgactttttgtttagcatcattattattgttcttggcttacattgtatggaatctcaataaatattattttcttgctttcattttacttaaataaaaaagtctacttaaattttgatcaactttatagtttatagtatagttgctttcttttccttcaaatttaaattcaattttaattatatggtaagtatt

SEQ ID NO: 28983 - DNA, 2414 bp, Cannabis sativa
  modified_base (966)..(972): a, c, t, g, unknown or other
aacacagtcctttttaaagaataaaacaaagtataatactattttataattataaagactgaaggaagaattcaacaaaactttctagattacaaaaagaattcaacaaaactaactggattttgtgtctttttgattgaaacaaatctattaactgctccaaattgtgcatagaatttcttagctgattacactagagagtttgccttttccccccacccgtaagaagatatggattctgtcatatttttttttcaaaaagtataattagcaattttttttattaaattttcgacaatatttattttgacccgtaaaatatatagcttgttaagaatctgctcaactattacatttataaaaatttagtctttctgttaggttccgtcccattattctatttaaatgatgatgtgtctttgtcaattagcaattttagcccctaaactttgacaactattaaatcgtacactctcaaaataaaaaccttaaagattcattttttttttattaaaacttaaaaattaatttagatcttaagaaaaattattttaaatgattacaagaataaattaaaattttaaaattaaatacgcgatataaaaatttatttatttattattgaaaaatttatttagatattaaaaaaatattattaattaaaagtttaatttataaaaatatattataaactaaattttacaagaaaaaatttaaatatattttgtttttatcaaaaaaataaaaaaaaaatagtttaatttttagcttttttcaaaataattttatatttttattgaatttttattttatttttttatttgttaaggtatgagtttataaagtaagcggaattataccatatattttcttttatttttttttaaaaaaaattacagtttgagtttctaaagtggttacaacgctggttgtaatatggatgtctatacgattttttgttgcaannnnnnntgcagcgctagttgcaatatgggtttctatgtagaattccgtaaaaaaaaaaatgttttgaagtgtaaaaatgaaaaagcccctaaatataattacgtttaattttttcttcaaaaaatcttagttcatttaaattatttattagattctcaataaataaaataaagtttgaaaatatttttttaagtaaaattaatatttttatctaattttttaatatttttttaattagtaaaatattataattgctttaaaaaagatagaatataataaattttaaatttaatttatttttttttttttttgataaaatggggtaaaatctttttaacaaaatttttttaacaagttgtatattttatgaggtaaaatcagatagtaccgaaagttcaaggtaaaaatactaatcattttttttttcaaaatgataaaaactcgtgtaaattgatcaaattttaatttatatacatccatacaagggtcttggaatttcctattacttttgggagtggttgaataaagttttgttcttgtgttgaaacgtatcgacatgtatttacaaggatacttagtcttgatctacaacaatataagacattttggtaataaagaaaggtagtaaacatcatatgactcaatttttcttgctcggtaactcctcactttctatcttactggaacaaagaacaatctttatatctatttatgaacatgatcgaacaaatgttaagctcaaagttttaaacttgacataaaacaaaatgaattctagtaccattggaaactagttctaacgtgagagacaaaatcgattatagtcattatcatcatcaacatcccccgttatgtagtaagattagaccaagtgagtacttatctgttcaactggggcacttccacagactttattttctaccaatcaggttgcactcaacaaccattatccttctcactcatgtctccctattttctttattaattattatatatcattaaagtataggaatatgatttttttttttttttcttttggtggaaattatttttctactgagtttgtttctgtaaaagaagatccacatccgtcacatgttatgtcatgtgttcaaattgaatcatatcctcacaactcaaaaacatatccacataaaaaacacaaccaccatggacggctgagatttttaaccagtaaatgacatcatccatttctacacacctgttggggtccatccaccctcataatacacttccattctaaaaagagtacaattacgttaatgtggttagtgaaattttaaaatgtatgttactaataaaaatgtatcacatcaaatgttaggcatagcctttctcaaaaaaaaaatgttaggcataacaaaattcttctaaaacccatttcttcacaacataaattactctatcaccaataatatatatatata

SEQ ID NO: 28984 - DNA, 2009 bp, Cannabis sativa
  modified_base (827)..(834): a, c, t, g, unknown or other
gattcggtttgtgaattattctcatatgacaaatcattaattaggggcctctgctgttgtgctgctactgatggtgtcactaattatgaatttgttgggatattagaagttggggcaagtacaacaatgtcgatcgatgccgattgatcaccaaagttatttgaggttggtgcaagtttaagcttcttcatctcttttcgtattccccatagcaccaaatataatccacacacgatcagaactcctcctaatacactgggatcatgtttctcttactgttaataacaaacttatatatacatatatataatgaaacatataagggcacttaataaatagaaaaaaaaaaagtacccccaccaccatatagaagtattaaatcactcccatccatcaaatgaactaaaatagctactaatgtaaaatttaattatctttcatctatcttttgaaatacattactaaagatttatttttttattattttaccttataaattgcgacctcaacagccaactcaatacttgaattagaagatagttaagttagttatgtaaaggatcaatcattttattagaaaacagagtgagttgtgagctttgtgagctccaagaactatggtggcgtttgattggagataataaaatggaatggaatggaaaggaaacaatttttcttccattcttttgtttagttgcattttaaagtattagaataacattctaatggaatgcccttttcaccattttggtggaatgactattccattttaaaaaagaaagaaatatcattctaatataataagagaaaaaatttaatgatttttnnnnnnnnttttttatgcattttaaatttgatgccatttcattcttattctcattctcattcccattcttattcctatattttgatttctcccaacaaaacgccacctaagtgttttgattataatgttcttttttattacagagatttaataaagattttcaaagcctatgtggctttcataactgtttttacagtgaaccaaatcatggttgaaaagcctgcagtgcaaccacttaaaatccttggtgtgttacttagttttttattcagtttttaattaactttggtttattggttcatgttgtgtttgtttatggtaattgagtattgatgtttggtgatggtatttcaccagataaagatttattgctcagatctaataaatgatcttgagcctttcctctttgtaaattcactctctcacaccacgctcttatagacaagattagttatttgattgatcatatcaacttattgagaattgatcaaagtagatgattacctccctaggtgtaacttctcatcgaggataagagacccagccatagctactaggacaagaagaagaggattgaaaatagagacgaagactggacctcttaagctcacacaccaagaaatcagtgtcaccattagtcctgaagctacagtgccctattaatagcatcaaaccatcattaattagtatacatatttattattattacaactattactattaatattatattaactactctgaaatcataatttacgtacattaattgataaatatatatagttttaaccacaaaaaaaatgaaaaaaaaaaaaatgactctgtttaccagttttacacttacatataagagacccatatatttaaggttattttatgtagctaccgatcaagcaaatagatacatgaatataggtgtaaattttagcacttcaaatcttgattcttttttttatttatttatttctattatgtttactctcaaaatataaaataaataacatatatcgcttacaaaatattattaaataacatgttagagtatcaattcaattgattgttgcatggatgatcatttagcttaaatagtatacaactatagaaatgtaatatttgcatgtatattgatgataatggtactagaaaaagaactaaaataatataccgagtaagtggcagtgag

SEQ ID NO: 28985 - DNA, 3264 bp, Cannabis sativa
  modified_base (2533)..(2534): a, c, t, g, unknown or other
attattaattcattccaacaaaatgtcatgcatatactgcaatagatatgatattttccgacaaagatatcccctacaaatatacgtgtatatattttaggtttggtgtgatattttgtgttctgttttgtatatttaaaattataacttaattactttataaatgctattaattcttgcaaattattatatatcttgcatgaatactagagtggttgctcttgcctatttatattttaaaaaccattttcctatttcataataattattaattacaagacttaataattaattataagaataataatatttttgaaagagttgctactaatgttgatgtgttatatatgtttgcaggtaataaaaatctctgtggacctcctctaggctcatgcatagacccatcttcatcatcgaccatggataacgtcactttgtcacctcctcacactactgatatctacaaaaagaattcacaccttctaaaattcgtgctaattatactcatcatagtcctcatattggttatttttatttcggctatcatcatagcttgctccaataatcgaagaagatcaccaatgttactagataggactagctcaacgatgagcatatctcattgtcaccgcaactcagttgttatgagatccctagaaaacaaccaaatggattcaaaactggacgctgtagcggcggccaaagcgaataatggccacgccaccaagagatcatcggtagtggccggagaagggagattgacgtttttgaaggataccagggaaagattcgatttgcctgatttgctaaaagcgtcggctgagatattggggagcggtacttttggtgcttcgtacaaggcaaccattcattgtgatgccatggttgtgaaaaggtataggcaaatgaacagtttaggaagagatgagtttcatgagcacatgaggaggcttgggagattggcccatccaaacttgcttcctcttgtggcttattactatagaaaagaagagaagctcttggtttatgactttgtggagaatgggagcttggcttttcatcttcatggtaagttcattaattaaataattgctctatatatatgtgagtcaatcacattaccttatattgttttacatatgttaatttaaaatagactagctaattattaatcagtataaagtaaagttagacactataaatatagaaagtacaacaacaatacttatgacaatcaatatattaagagatataattatatatgaatgtacatatccatggtatacaatttcttatatgtaagatttgtttatttaaaatgacaactttatactaaccatgcagcagttttgaccaacatgatatgttaatataaatttgtataggaaatcatcgtaattcaaagcaatcagcgctggattggccaacgaggcttagaatcataaaaggcacagtcaaaggcttgcaatacctctacaaaaccctaccaaacctggtggtacctcatggccatcttaagtcctccaacgtggtcttaggtgagaacttcgagcccttaatgacagactacggcttactcccggccataaacctagaccacgcggaatacctcatgatggcttacaagtccccggagtacgccaagctgcggcgcatcaccaagaagaccgacgtgtggagtctaggaatactaatactggaaatactaacgggaaagttcccggagaactacctgacacagcgatacgaccccgaggctgacctcgcgagttgggtgaacaagatgatcaaggagaagaggacgagccaagttttcgatgaggagatgaaaggtatcaagaacagtaaggctgagcttctgaagctcttgaagattggtgtgagttgttgtgaggaggatctggacatgagaatggatttgaatgaggcttttgagaagattgaggaactcaatcatcatgattgtcttgatgatgatgatcatgataatcataataatgcaggagatcatcatcatcatctgttttctcccattgttgttagtggaagaaaattgtcatcagatcaagaagatagttacatttccagagctatgtaatgatgatgagaaatatttgagatgagatgatgatctgtctagctagctttctatatccaatgatgttttaatttgaagtttttctcatatatgtataatacattggattaaagtacttttgaagatatagatgacttctcggtttgtagggtatatatattaaaatatatatagaagtgatgagttctctgactacaaattcatgttttcttatgtcaatgtatgtgcagtgcttgttttgtagagagaaaaattaatttatcaacaccgttatattgttgactctcttttgtatcaaaatattatcaattttattttcaattattatttatatatatatatattttaattaacaatattgttattgagtattagtggtgcttagcatgttctatagaggtgtgacgctctacgattaattagtgatattttttnnaaattattttttaaaattatataggatattaggattgttagtcattctgttcagttcatgattcaagaatcaaagcaataacaatggagaaaaagaaaagagaggaagaagaataaagatcaaaaagagagagagtgaaaggaatattctgttattgtattattgttattttgttcaaagtacaagagaaagtctttatatagagaatacacaccagaacacactggacgaaaacagactaaaccaacaaataacaaccacttaatagtatttaactaactttaactaactctgaacaaagatcccttaatacctccccgcaaactcaaaattggtagaactgtcaattctgagtttggatcgaaaaccaggaaagcactagcttgaaacagatttggtaagaccatctgcaagctagtctgtggcaggaacatgtttcactttcacctgctgcctaagaaccttctctcgaacaaaataaagatcaagctcaatatgttttgttcgagcatgtaaaacagggtttgcagcaagaagaacagtgctgagattgtcacaccagacaactggggcttcggactaagtaatctgaagttcagtgaatagagagtggagccaagtgagttcagaaaccacatttgccaagcttcgatactcagcttcaatactcgatcgacttatggtttgttgcttcttgcatttccaggtaattaagttgcctcctaaaaag

SEQ ID NO: 28986 - DNA, 5031 bp, Cannabis sativa
attttatataaaataaaaattatcaaaatagggttagaactttttgaggtgtaaataaaatttccctttttaaaaaatttcgagacatggctacccttgaatatatggtagcttcgtcctcgaaacatcattctctttctttagcataggttttgaacaaagagttcactctatcaaaatgtaataatatcttttctgatattaaaactctattatttaatttttttttagggcacatctctctaattatgtgtgttgtatactttttggctagacaataaattttgttagcgggtgtatattcttcctcttatatatctatattccaattccatttcactcgaaatagcaattgttgtgtcctgaaaaaaattagattatatttagggatgctcattagaccatagctaatatttttaggtctatccagatttgatacaattatatattgaatgttaaattttaccatccgtttgatgttaaattggatcggttatatccgtttgatgtattttatatatatatatatatatttattgatttaatttatgtttattcaatactttagacctaatattttttggatcagatggatccttttaatattttaggtccagtatgtattggattagattggatccatccaattcaagaaaaaaagagtaaaattttaatgttaatttttgtatatacatatatattttacttataacaatgtaaaatctataattactcatctaaactaaatgaaattctaattagtttgattgaatttttggacaccccatccaacatccgatccgatccaactggatattaaaaaataatatccaattcgatacgatcacagttggatttttaatatttggcggtcgattataattggatcgatcgattgttattggattagatgatttatgcccacctcttatttatatagtgtttaaagtccaataaaatccagataataattttttatatatattagaaaaacgcgcgagtaaattaatgaaaataaaaagattagagctggtttctatatattaggctaacactatatagtagtggttactttaacaaatattaattaaatttaaacactaagtacttttagctaattttttatatttggtactcagtaagttttagttatattctttttactagaagatatataatgtaattatatgagacttcttattaattttcaagaaattcagaaatgatttaggatgttaattaaatttatgagtctcctataattaactatattacacattgtcacaatgcaaaaaaaaaaaaaatagaattaaaattatctactaaaaatactattactatgtatatgtacatatagatatgatccttgtaaaactttgctgcttattttttttttttaatgtgtcaaatagtattcttaaattttatatggcattaaaaattctcccatcaaattattaaaattattcgatttaaaaattttcgttcaatatttataacagaggacacaatttagtacattttaaagttcagaggataccatttaatacatgttaaagttcaataaatacaattcagtacatatatgagcaatcgatgtgttagacatttattagtaaaattaaatggaactagacaaaagtcatccaataatttcaatagcatgtggggatttttggatggtctgaaaaattcaaaaaataatattcacctcagttagggaaaagaattttaattaacttttttttataacaattttcttatgtgttaaagatatagttagaagaagttaacttttttattgataaaatatttaattaaaactagccaaaatctaatctattgatattaaatatacaaataatattatactgcaaaattcttcattaaactactatatatttatacatattttttttaattgaactcttgaattacactttaacgccacaatagtataatatagtatttatattacatcaagtttttttttcttaaaaaaaaaaaaaaaacaaaataatgaaggagacatttacaacgctattctataattcaatttttttcaaaaagaaaaatcaaagataaaactcgagaaggatggttatagtataaataattgtagatatatatttattctttcttattactattgtatatatatatattatattataaatttgcttataattaatagtatacgtagtgatagtgtttatgatcgcgataataaattactactgagattaatttaattaaggtcacaacgtaactaaagttgaatgaagtaattaataaattattcaaatataatatatagatacacataaattaactttgtttcacataaatatttttctataaaatatatatacgtatcaatgaataaataaataataaaaacaccaataattattcttaaacatacatatatataacacattaattacatgaattgtaagaagtgacattttgtgccgacattcatgcatgtaggcactatgaatgaatcatttgcaattaattgctcattcaactggcttgtcacttgtcacaaataatattcactagtaagcctatatagtgtatatatatatacatattacaaatatatatcacaataataattatcattatatatatatctaacacagaaaaagactaaaactaaggtcaattgtgtattaatatataaatatatatatagtccatttccaaattcaattttggctatattacattacactattagctagttgctgaaatacattatttggattagatttcaaaggtggaacagagtttcgctattcactaattgaactgttcaatcatgcacacggggagagagagaattattgataccatacacatttatatataatttggttatataaatatggctaattagaatttttacctatcccgaattttgacatgtactataaattatgttcattgaacttttaaagttgttaaaaatatccactgaactattaagattgttgaatttaaggatttttattcaattttagtaaaaaaaacaattaacatggataaaaatttaaggggcatgatttagtagttatcagaatctggagaacatggtttagtatataaataatcactgaaatagtaaaattgaatgaaattttataaaagtccttaaatctaactaccaatctcaatagctcaggaaaatttttaacagtcaaaaaaattcaagaagcatgatttggtacatgttaaagtttagggagtaaatatcctaattaatctataaatatttatatatatatatatagggacacttcaccatgttgcatgatgagtacttaataagtttgtttggatgagaatgtcaatgctgaaaaagtgaacactgccgtgtgcatattttgtatatatcgacagttgaagtctttttctttgtggtgggaacaaacttaattaataccaaaacaaaacaaaaaacagcctagcctagataaagataggtgatcatcatcatcatcatcatcgagataaatattattatataagctttttgccttattatatattcatattcatgaaacacacatatatattgatagggttgtgattttacttttatgattttattggtaagagtgtcttttttgggttcttggagaaattataatttaaattcttttaattatataattgttttagttatttaaatttttacactaatttttcatgaatttttttaataatttatggtactgaaataattgtttcaaaacaatttatttttcaattgtatatgtaagctaaggagtgtcggttaccatctaattttatattgatatattattgtttattttgagcctaaactctcacgaatttatttttggacggtacttttacaaaaaggcctcaaacaaatgattcttttgtctttctttagacgattacaaatctaaacttgagtaacactctagatcctcctaagtaagctagatgaatccttttactagcaagattcaaaatctcttcaaactaatgatattatttacttttggcttaagctctcagaatttatttttgggtacatttttaaaagatctcattctaataaagatagtattcatttttatagaaatccaaaatttttcccatttcatttctaactaatatgggattttagttgtatacccaataatataaaacaagcttaagacaacttattttcatattttcaatatttttaagtaattttcttaaaaattagtgccgaatttcaaaataaatttatttcatgatattgttaattacttttaagttttctaaaaacaaactgtaggagattctaaatatctacattgctcttcattatatatttaaaaaaaattgcatggtaattaagaatatcgatgtgccaaaaatctgaaaacaggtagtttaataattaagcacgtaaaacatatataaattatttgtaaggtctattttttttattttctttttttgaaatgtttgtaaggtctattcaacaatgtaacttattcaaaattatattacaattttttaaataactgcaatattatcataaatggaattattttgtttaaggtgtaatttaatgcctcacacgtgcatatagatagatacatttattttcatggacatgggcaagacatttctttttccttttttctttttcatctatctattggtgaattaattaatgtgtttagtacaaaagttgatatatacatttatatatgaatgtatacacatatgtgtatgtagtgtgtggagtggtcaaatttttagggctgaaatttctcagtcagtcactctttttcttggccataacattattgtcccggcttattggaccgaaccatgtgtatataaataaatactatatacctatatatgtgtaggtaggcatgtcgactcttatttatttataaaataaaatgtttattattatagtcgtgtacatgagtcactaggccacgtatgctgactcatatattattcgtatataaaatatcatat

SEQ ID NO: 28987 - DNA, 1648 bp, Cannabis sativa
  modified_base (45)..(65): a, c, t, g, unknown or other
aaaatcttaaatgaaactagcaatacgtggctcggcacgtacatnnnnnnnnnnnnnnnnnnnnnatatatatatttttttattttaagtaatctcgtagactctaagtgccataaatacgatgaacttgattttttgttcttcttatatgtgactaatgtagataccatcaattttatcatcttcttatttttttctcacagagactgaattacaattgccatgatctataaagttgaacaactcatgaacttttcacacacacatatatatatatatatattactaaaccaaactgtatagctcgatcttttttgtatttgattttgtgatagctattttttttttaaaaaggataggttcatttatgggttaaaatcaaagtaaactaaactacatatatatatttatatacatgtgatacaatattaggttaaacattctctcccgcaaagaaggtagctcgtctgagtatagtacagtaaaattaatctgattctttttatctatgaagatagcatgtcatactaaattgtttgcgcagtcccattcaagtgaaatttaggcaatatagaatgagtgttttgttttgagttttgtacacttgttgatggaactattttcagatttggtgtagtgcttaatggctccaactggaaaaatcttgggtgaacaagtgaaacgaaagtgtagtttcttattctccagagaaagaggtaggaaattcaactaagaacaagcaatgcggttgatttcttgcttgcaatctttgtgtatagaaggaaaaactataagataagttgggatcttagtggaccaaggtagagtttgagcttttttatgatgcttattggaagtatggaaaatagtagaccaaagtgtgccatatcttatttcttgatacaacttccacttttggaattattttcttttttttttttaaataaattagaggagataaactagagcttgttctctatgatatgaaattattgtctgcttggcaaagatatattgaggcatttccactatttctcttcttatgcacatcagagtgtgttctctactttgtaatcaactcttcatttctttacaaggcgtgttttcaaaattttaagaaaataaatataatgataattgtcaaattttaaagtctatatatagttttactattattattgccattttatttatagttgtggttatccagctataaatgcttcactctatgatttaagttttcatctaattagtttcaacaaggattgcaaactctacaagagttctagacaagtgaagtgctacaactgttcttacaagaaagtacatccttatttgcatcctacttgttttaccaatacatctttcttttttaatctttttataaaggttttgatatattttcttacataaatttcatcttctcaatgcccaacgagttaagttgtcctctgtcctttattttttgagtcctctccctctcttgctttttttggtttttattattataaatttatcatgttgttaatgtgtttcaaagaaagttggaatactttaaaagaaggaatggaatatcattatgaagctattgtggacattgttccacatagaataaatggtagagaattgagccatatataagaacatg

SEQ ID NO: 28988 - DNA, 1251 bp, Cannabis sativa
atttcccttcccttaatttctctagctttgtagattaacgtcttataaacactactgcattggatttttgttaaaaaaaatatgggatttaaatatttaatatttgaagcataaaattaagagaaatgttagagagcaccagccatgtttagtaccactacaatttgttgtgtcactatttgtgtaattaagtatcacatattatatactttaatttaatcattattatagaaaacaattatcacctaatgggcatcaataatattctatttattggaagaatcgttgttacaactgaaaaataaattattagatatttaagtaaaacccgaacacttaagttttttaccattgtagtcacaaacataatttaccgattcataactatcacaaaagggagtgttaatttgaatcgctctcttccaataccaaaagaaaaaaaaaagttaatttatacagtcaatgactcaatatatgatataatgataggcactaggtcagtattaaacgtgttcaaactaatcttttgaacaatagactattattttcttaattagtggtatgaaagtgggtctactaagtttgaatgagaacgagcaacacgggctattatctattcttctattgacttttttacaatattaaaattaggtacatgttatccacacactaattccgcttagtctatacaacaatttctttgtatacgtgattataattagtggtgaaatttatgaaatgaagacttttttttttgatagaattaaaatgaagaaatttaatttgcaggatatatatagcagtgggggtaaaaaatttggatttataaacttgccagaatttggttgtttaccgggcttgagagtaactaaccaagatggtaactataagtgcatagaagaagcttcatctttagcaaacttacataacaaagctctttcaaagcttctcaataaactatcaaagcagttgaagggcttcaaatattcactctatgacctcaacaccaatctcagaaagagaatgattactccatcttactacggtatgtacactactaccagaaaatatcactcatttttataatatatataaattagaaaataaacagtgtagctagctataatttaatttgttggtataaaaatggatccggcctagcatgatccattatagactttattatgttagactatatatatagtgtatgtaatatagcatatacaatgatatgaaatgcggaaaataaac

SEQ ID NO: 28989 - DNA, 2832 bp, Cannabis sativa
  modified_base (601)..(612): a, c, t, g, unknown or other
caagttttaataaaaccaataaaacttaatgtaagcccaaataaaaagtctaacaagaaacactaaatattttcataataaggcttcggtaaggaagaaaaagaatagtattactgagcttgtgactgagaatggacagaaattgaatgatgaagcgaacaatgttgttgagattgagcgctatttttctaatatcttccagtcatctagacgtatagtgcaacatattcatttgggtatcgaggtagttgggccgcgtgtttctgatgacgagaatgttcgattcctgaccctttcacaaatgatgatattttgagtcgaacattctcgtcatcagaaacacgcgacccaaatttaggataagaattggacataatttgcgtatcgaggtagttaaagcgattagttctaaagtagcaaatttaggataagaattggacataattttctttgttttagttagagtaaatcattactttttatttcttatataacataaagcaaattgttaaataggtaagaggaggttggaaaaggtgtgttgtgacatttttcttattctttctttcttttttcttttcttttattattattattattnnnnnnnnnnnnattattattattattttaaataacgtggggtagtttgttttaagaaaactgctaagctaaaccaacaacataaaataaagtaaatgatcaactaattaattattctaataagagccaaacaaaatataacaactaaaacttcataatttctataacgaaatcccaagagccaaaaaaactttatttctagtcaagaatcctacattaatctttaacatgcatacaaatgaaatttgggggcatcaatcaagtcacaataaaagcactaaaagcctaaaatctctcattccaatcccataagggggctactcttatatagctaccaaccaaattgaggacattatatatatttatatttatatatgaaagaacaaaccaacaaattaaagaagttaaacttatagtgagatttactatatagctgctttttctctagtcacttatacctttcttttagggacatatatttggctatgtttggtaggaataggaaaaaggatatatgaagggtggtgaatttaaaatagatgaaacttgtaatgaatggaaattaattaaggatactataattcacatccatattatttagaaagatatatcttttcatgcattttctgttaatcaatcacatagattatgaactatccaaacacacattaaacattattgctcataatcattaaatgcaaaatcaatactttatttagagcatcacaaacttatgaaaacacatacctcccatgctggcattttccatttaagctatgacaccaaaaccttcaatgtgaatgtgtctccatgatggtagaagaggaagtataagaggaagtagaagaggagcttatgaaagcaagcccttttcttatcaccacacacactttctcatcatcatactaacacatattaaccctttatatatatccaacacctaaccctaaggggttttattaggcttattgggttaatgagtataattagtggtagactataatttaatgggccaattatagttttagggtgctctcatgtgcctctaatacatttattaattattaaccatcccattatggtagtgaataaatattaggcacatagttaataattgtgtttatggtattaagctcatgattatatcaacacagacaatgttgttgtaaactcccatgtaaatctctctacctaatgccagcaactcatttcacttctcagccaacaatttagtcaagcacatcctcgtgatgatccaaacactgccactgcaacatccaacatggatggtaacaaatcttttttttaaactttttcttggatcattgacagtggagccacacaccatatgtgttccaccaagtcttgcttttcttcatttcctactgatgcttttccacaatatgtgagtttacctaatggcacaaattccagttaagagtattggtactgttaagataaacaagcacatcactctcaataatgtgctctttgttcccacattcaacatcaacttttttccattactgcttttcttgacagcaccactaatttggttttttttcaacatgattcttgtgtcatacaggttcattctccaaatgtggtgatttggacagctaaaagacttggaaaactttacattctttttcaagagtctcctcctatagctagttctagttgctctttattttctcaaaataatgtagactaatggcataaacgccttggccatcccttaatatacatttcaaatacatttaataaaaaaattagattttgtcatgtttgctatcttgccaaacaaaaaaaaataccattcatatccaacgataactttgctgaaaatgtatttgatataatccatatggacatttggggacctttcaatgtcataagcatcaaagaatataaatatttctttacaattatcaatgacaagtctcgatttacttggactttcatgcttaaaaacaaagcagaagtccagacagtcattcccatgttttacagcctggtatgcacacaatactctaagcctattaaggccattcgatctgacaatattgccaaagaactaagcatgcaatctttttatgcatctaagggcattgtcctctaccatttttgtgtagaatgcccacaacaaaactcagttctgaaaaggaaacatcaacatctactcaacatagcaagatcattggttttcaatctcacttacctcttgtttac

SEQ ID NO: 28990 - DNA, 6233 bp, Cannabis sativa
  modified_base (64)..(69): a, c, t, g, unknown or other
taatttagttttagtcacaacaattattgtgactaaaaaacatatttagtcacaacaaattgtnnnnnntgtgactaatatctttagtcacaacatagagatgatattttataattagttataacttttttatttttagtcacaaattttgttgtgactaaaagtgagatttttataaaatagagcttttgtggcatatcatgaagttaagacccttgtagtgctattactttcatgaagcaaataattttaaatagaatatatataggagttttaaagaagacaaaagataggaatatgaaagatacataagattgatatagtataatatgtagagatataagcaataacttataattttctttgaaagtgcatttagttgacttatttaccaaaaaaaaattatcacacttaagagtaggtttttttttcatatagagtaaagtatagtactatgctaaaatctcaccataaatttagaattgttgcaatatactacaaaaaatcttactttagtcaccacaaaatttatgattaaaaataaaaaagttgtgattagctaattttaaataatcattcttatgttgtggttaaaatatttgtggctaaaggtattattagtcacaaaaatcacaatttgttgtgactacatgtgtttttagtcataatacttgttgtgactaaaattaaattagtgacttgtatttaaatacaatgttttagtcacaagtaactttttgttgtgactaattaatttatatttagtcacaaaaatttatgttgtgactaaaaaattattatttataaaggtatacttttttttatagtgaaagtagtttatgttgtagtgacaattaagaatatatatacacaataaatgttaattataaacatttcaataagcttcaaatcaaagagagttctttattaataataatttttgttgaagacaacaattattaagcataatacaagtacagaaaaaggctcatagcacaaaaattattagggaacaaaagaaaggcaaacataacaaacataactttggtaacacaacaattaagagaaataaattaaaggaacatgaaaaagttagactaattaattatgaagaagaacaacacaattaattagaccatttttagatcgagatgctattggggattcccttagccgtaatccctggttcgctcgtaggaaagagcaaagtgtatgggaattggattggaccacatcgatttttctcatgattttgattcttagtcataatgtcatcttcaatggcacgaagttgtgtttgaaattttttgaaagcgtccaaagcttttttatccgaagtccaatcaacatcttcattcttaccaagataaacctcatctgattcatggcttgacaattgcgcaataaggtaaatcatctcaaggctttgcttttttgaagtaaatgtggacaagaaataactttcttcgtcgtcagcgccaagtgtagtgccccccataggcatgaactgtcgacttaatgtggggcgattcggatagaatgctgcaaaagagtactgtccaaagttaacagctgcatgaagagcggaagaaatccaaatgattatggtgcatgattcgacaagttcatcaaaagttttcatttctggccacccatcatattctttcttatcaccatgaccaacttctttgatttctttccaccaattctgaatctctttgtcattttgcaccttcttatcttcacccttgtagtagatatcacaatactctttaacccatttattgatagcattccatatctctaacccatccacagcataaggatagttctttactagctcacaaggttttttagtcttttcatctactaatcccctatgtagattcatagaatagtaatatataatgttagtaaaatacatcttgtaatttaagctaattaatcattatagataatggactagctatctactacttgcctttgaataagatctgctgggagtccttgcttattaaatgcccaattattcttatagactgctgatgatgattccattgcatactttccttgaaaaaacacgctctctatcgttccatcggcattcacaagaatggttctagctcgtgcgtttatgctcatagtaccacgaaaatggggatgcaatagtttgtagattggatggattacacttagttgtctgtttgttgctatcacaaatggctcaatcactgcatgtgtcttcaacctgtaaatcaattgatcgtgtgggattatggttggcatgttacgtttagctgtttcataataattattaaattaaaatatgtgttacattaccaatgactgtagagctgatggtagcctgaatcgtttacagcaacataacctttagcgagttgccaagtggcatatttatgaggatcattattgtcacatggtggggtaaatactgtgctatctgcaccgttttcatcaggaccatcctttggcaaacttaattcaatggcgacaggcatcaatttctcttcttttgtcaaaaacaagattgttcgagttgcataagcctttgtcgaagttttatttattctcttcaagtatggcataaatgtatcgtggtgatccaatataaataatctcttttgctcgatcgcctatatatatatttaatcaaagaaacattaagcaccttaaagtaccaaataacaatcctcatttacttaactccaggatgaataatacaatagacatgattaatgtataccttatctacactactgaaatcttccaacatttttataatatcgtcctcactaattctgctatcttgatcaccatactttcttctgtctagcttgctctttggtgggaatttctgaattaaatcatcaaaatttaaaaattattatgtaatgtgtagtaaataattaattactatatgtaatgtaaataaaataaatggtattactttgagaagacgaatgtggacagggtggacaccagcaatcatttctcttccaaattcttcatcatctctccatgcattttcatcacctataaatatgcaaattctcaaaatcattattgaaaacttgaaattaaaaataattaataaatatatatttatataaatacatacatgaatacgttcatgcatgtatattatattattaagtacgtatgtacgtacgtacgtacctgcttcaattacaccagggacaggtaaacctgtaccctgaaacaacgcaagtacttctctgaagctacgatagtagttatcatcaagtacagtatcatcttcagacaatgttgtaattattttagcaacggcgtctgatgatggtggtggttccgtcttcaagtgattgatttgttcatcacgtggaatgtatatgacttggtttttatcaggcctgctctcatgaccatctaaagaataaaaaagtataagtatggatcactacttataattacttttagtattttaaaatttagatacatgaaaaaataattattcgatggttctttttctttctttttttacatatacaatattgtataatattatagttaattacaaggttgagatctcctatagatataaaaaattataaataataatataagatgtcgaaattaaataatttaaacatattgtatttaattatttctaattttgtaaaaataaaaaaaatcatgattaatttgttaattgtatttaattaatatataagaagatatatacatatataattggtcttaattatttaatttattataagtaccatgagtgagtggtcttccagttcttcctctgcgagggtaaggtaaatctttccctccaaggattggacgattattgcccaaatcattgtacgtcgcataatcatacactctgtcccattctttgagctcgcctatattattttccgatctcaaatgtctaagctcaccttctcttaacctatgtagtttgtgacgttccgaattatctggaagatatggctataaaaaggaaaaaaccaattaatcaaccataatcactttattatatatattattatttgcgtaattaagtaacaaatatcactatatgttatttatttacgttcataacataccttgtttgtgaagaaaacacgagggtatgtgtatctttcttgtgggtaaacccaagagttgcacaagaactttaccgaatcttctgcaccgggaacattatcgagggtaatatacttgatgaagaactcatccttattattgttggtgattttcaatgctggagggactcccattttaatttcgttccaattggtaaaacttaatttaaatttcgagtactctttatgattaggatcatcatcacgatcactacatttctccaattttgatgagtatccgcccaagagcgtagcatcctctgcatgcatgcaacaaaattaaatatgtgtaattaattttaaaaaaaattatcacgtcattatgtgtaatattatttaattatgcgtaatgatgatgataatgatagtgatagtgatgataatacatacgactgtagagctcgacggtcactagatctctagaaataggggaaagaggcgcagtcatatccttaaacttgtccttttccactaacaccactattccctttaccgttgtggtttccgcaaacaaaccacgagttaatcgatgcaacaacactttcattttcgttactattatcatttcggaaaacagaccaccagtcagtatgtgtagcacttgccctaacaacaccagcattttccttaacaataatagtaacgtcatttttgtatataaatagattaatgtctagttatgaatatgatatgatatgatataatctttcaacaatggctcttatttatagggattagggtgtacttacatgcatactacataagtgatgagtagattaattaatagtacgtaatataatatttgggattattaattaattaatccatatattaatatatttacaatcaatacctgtacagatccgttattatttgagatctcatcagctaattaacgaattaattaatgatcattaattatgcatggtaggaatgatatataaagtcattattaattgttatcagcattaatttcgatacaaaacaatactaattaaggattaagattattgccttaattattacatcaattgaaatagacatgcatgcatacatattttataatattatatatgataattttacaaagtggagaatacgtgcatcatatcaatattattgtttaattatttttatgataattaattaaaataatgttaatatttaatttcactacatatacataaaatgtgtgacgtcatatgtcaagtgtctacatacgtcgtttgctgatctgtaacttattagtaggtatgaaaagtcaatgcatgtttccatcctaaaaaaaaagataattaggatatttgctttttatattttgacatgtaccttaaattttttaactattaaaattttttttttgaactatatgaaattattagatgtaaggacttttgtccaatttcattaaattttactaatttagtaattttttatgtactaaatcatgcttttcagactttgatatctaccaagtcatatccctaaaactttgacatgtaccaaatcatgtttcctaaactttccacgttagacttttcttactaaaattggacaaaatttcttaaatctaataatctcaattgttcaaaagagatttttaacgacattaaatgttcagaggacatgatttggtacatgtcaaagtttggaacagaaaaaattctaattagcttaaaaaaaagggaatcatgcatattagttaatgagtgattcaataatgcaccccatttaaatgtttacttgtacaacccctatctgtttcaacatctaaaaaaaaaaattagtccagtttttatatagtggtatacgcaatatttatttaagacattttgtaaaattttgagaagttcaaaataattaacaatatatagtttaatgttcaaaccgtctacttcgcacgcgtataaaataaaaaactcactcatgcaaaaaattctttaaatcctatttttggcttgttaattttttctgaatttatcaaaattttactagatatcttaaataactacaaggtatacgaccataaaaaaaattagactaattttctttctagataccgaaaaagattag

SEQ ID NO: 28991 - DNA, 1388 bp, Cannabis sativa
aagtaaaacaagctcagtagattaaatgtgatttttgtggagatccccaatagttatgagcgatgccaatttgttgatgttgatgacctacccatggagcaagctcaagctattaactatccccaaaattaaaattttgctcaagggaatcattagcaacaagggttttatcagcaaggatacatgcaacaacaatcatagcaaccccaacaaactcaacaacccactcaacaaatttttttttttggtggaaattccagttttaagtctgactttctactctaatttattatggttgacactagggcttccatcagaaatctggaaactcaaatgaggcaattggctgctcaaatggccaaccgcacccaaggtaattttcctagtactacgaaggtaaacctaaaagagactcgtaaggcaataacattgagaagtgggaagaaatatgaggggttaagggaagagtagcaagtggttgaagaggatcaggatcaataggtacatgcaaaggcacaagtggagaagaatgctagaggtgagcatgttactgaagatctaccagaggaatacaaggcaccaccagtgagcatagaccaccacataaaaattctttaaccacaaaggctccgcaaaaataagttggacaagcagaattttcataattccttaaaatattcaagaaactgcacattaatattccctttgcagaggcacttgagtagatgtcaacttactttaaatttatgaaggaaattttagcaaagaagaggacgttggaggaatatgagacattggcacttactgaggagtgtagtgcaatcttacagaagaaactaccatccaagcttaaagaactgggtagttttaatatccttgctcgatagggggttcggtggaaactaaagctctatgtgatttgggagcaaacattaacttaatgccttgtctgtttttaaaagactaagattgggagaagccaagcctacaacaatgacattgcaactgcaagatcgttctttgactcatcctcgtgggataatatataaaagatgtattagtaaaggttagtaagtttatctttcctactgatttcttaatacatgatatggaggaagattcaaccatattctcatttttttggaagactattcttggccacggacatcgcccactagttggcaacatgtcgtctagagcattttgtcacattgcaaattacgtaaatgcatgccccatgtagtgtgttctaagagacatgtcgcctagccatgacgatatgtcacttgggtacacaataattgtgcaaatatcctcttcgacatctctaaatgattctaaacttcttggataattaaactcatatgaacatgttattttctggtttg

SEQ ID NO: 28992 - DNA, 2373 bp, Cannabis sativa
taccgtctggcagtatttttataaaaaaatgacaaaagttagtataccatgtaaattttccattaaaaaagtcgaggaagaaggcccatgcaaacaattggcattacttggcacgcctggcaaggagccaccattcggcccagttaagacattaagagagagggataaaagattgttctttgggcccccaataccgatccattaccctcacaaaccaaagggcccacattctccactaaagggcacgggttgaccgagtcaacccaattcctcacatctttctctccctccaacggtaatatctttctccaataaattgcttctctttaggcaaagaagcaggagcctttctcgcctgcagagaacccgaaagagaaacttcactagaaaaggcttgtccccagctgcccagctacgcctattgatcgcaccctgtctcccatacattgaggcacaacaccatcagccaaaataatggcgaacagggcccaacatcaaagatcaattctgaatcaggcccaactaacttgacatccaccatctttgtagtaacatcttctgagtatcctttttgatttgctgaaactttccattatttccttattcctgcaaaatgtcctccttgtctcccactgtatcaatgtccatatgtaatttgtatcaccaaaatgtactcagctcagctgccaatttgtatttatttatactctgttaccagtttagataactctagaacacgtacaaaatttcaattaatgtaagctattggtctaaatagatcaataaaattttattacaaccaaaaacaccttatagtagagctttgaaaatcaaaatgtttgtttttttaacagaggaaagctttagcttattcctcatccttggaattaattgtaattatattagcaataggatgagcttaattatatagtcctttctggtcagctttttcagattggaggtctgaactgaccattcccttattcatgcaaactttttgtttcccacactatcaactccatgcactgcactttgtatcacccaaaatggctccactacactgtatacgcatgctatcatttataaccaaataaatgagaaaaaaaaaagaaacaaataacaaaaaaagtggttaacaatattaagtagcaaaaggtattttgcatttctcattttgaaatgagctatacaaagaaaacccttctcttttctctcttcttagtagcagaaggtattttgcatttctcattttgaactgagctatacaaagaaaacccttctcttttctctcttcttagtagcagaaggtatctctttttcttctcaactttctatttttcatcttaaacttaatatatatatatatatgtatgtttgtgtgtttattgtgttctaactttatataccaataaattggagctactttggtaataggattagcttaatggacaaaggaaggcgcatgaatgaaaaaatgggactaaaccttctcccatttgaaggtaagtttatataatatgttagatgtaactttcttagtcaaaatctgtgtttataagaatactattatgaaattgacttaagttttctttttttaactcaaatatctcattattgtgttcttgttaatgaaaaggagtaacagaagttacctgtgatatgtttaatccacttaaaatcaccagtggttgggaaaagtacttagccatggaagttggcaaaaacaatctccacagaaatttggaaaatagatccatcttgattatagacaaagtaagtaatcttcttgacccatcaaagcgtctgttatatgttttggtgtagttcttccggacctagatatatcttctcccctgtatcatcccaatgaatgggagatctaaactttctgccatataacagttcatagggagccattcctatcgtactttggtagctgttattgtacaaaaactctatcaacggtaggtatttactccaggagccttcgaaatccataacacaggctcgtagcatatcttccaatatctgaatcgtccttttggactgaccatcagtctgagaatggaaagctatactaaatttcagtttggtacccatagcccgttgcaaactttgccaaaattttgaaatgaaccctatctgaaactatggactttggcacaccatgcaatctcacaatctccttaacgtataaatccgcatattgatccactaaaaaggttgtcttaactggtagaatctgtgcagacttcatgaattggtctaccacaaccagatagaagcaaacaaacccgtggttctaggtaatccaaccacaaagtccatcgtgatgtcttcccatttccattcaggtagggttaaaggctgcaa

SEQ ID NO: 28993 - DNA, 3022 bp, Cannabis sativa
ttgtcatttaacaaaacacagggtccaatcggtaacttttgtaaaacagagggtccaaattggtatttacccttagttttgagtagtttattttatttcgtggaatcgcaatacttgtattttttaaaaaaatatttttatgatttttcatgtgaataatttgattagagagcacttaaagtaagattattatttgataatgggagaaaaatctcgaagagggaccaacgaattttttattttgtttgtaacatgtaagtaagtctgtcttttgttgttttgtggatgctgatttgtgtaatatttgttctgttttgattaataaaattttctcttttaataataatataattaaaattatgtggataaatcaaaacataacaagtgtataattgtatacaaagacttattatcttagcacttaactttagaaatttaacacaatggtaaaaccacaacaaaatataagttagaaagattttatcacaaaaaaaattagtttgtgagattaaatgttacaaattgtataattcaagtaattttaccgctaatatttattttttatatataaaatgttgatattaaataggcttaatgtacaaatctccattttaaaaaaaaactaaataaataaataataataataataataataataccacaaatcagtggcctaaacaatccattaaaaacaaaaccaatgaattgtggctagttggttgaatttatttatttattgataaaacagttgtttgaaatttgaagttagctaaccaatgttctagtcatttttttgttttgtttttattatgttatttatttgtttaattattagtttgactgaaaaaaaaaatcaaatgaaaatcatgcattcaaaagactcaaattatatattcaatcaaactattcaacatgtgttggatacactttattcccaaataagcattactacaaactacacacacttaaatttaataataataatagtaattaattaattaggtgttttgatgtaacccacatgggtggagttgtcaactttggttaaagtcatcaaatcatatgcaatccaacatcttgaggcttgtttgtgataaaagtaacccaaacacttgcaatccatagtgcacttattgccacaatcactttccttgattgcactacctttagtgtacttactcatgaaatgatcaactccctcaattttgtagtagtgaaactcacttgatttacaagactttacttttttaggctcacaattcttgctccaacccaaaagtccattctccgaagggcaggcaacacattgatcatcttcgcaaactccaaaagtcccacatcgtccaggcaattgacactcagtctcccaaccccgactttgttgtctatcgaaaagagtgaaagtttcttcccatgctctccaatccactttgtcatagtatgtatagagtctaacatttccatctattccaagccttaagaatgacaatgtgctgttgtagttgggtcttgtaaataagtaacccccaccatttaagggtgaaaacaacatgtcgtaagcaaaaccatcataagggtcagaatcagcttgtaacgtcaagttcattggagggttttgaaatgtgctgcgagcaaatgatgagaagtcatagtaaagcaaaggcctttgagagttcttacttgtgtaatagagagcaagtgttttgggctccaataccatgctataaggcccatttttgttctccttttcagagagacgacttacaagcttgtatttagctccagctcgtaaagcttggcccactaatatagtatcagttgggtaatcaaaactttgccaaacaaaatgaccttttgagtcatacaaaaccatgttaccatttggaagtagttcaaggccaacaacacctttattggttgtgttggtttgccaagccactctaccatcaccatcagctagaacaaggtttccatcaactccaagagtgagtgtagcgttttcgccaacgggattgtctcggttggcctcccaaacaaatcgacgaagcgcttcagctcgttgagtgcccatccgaatggcaagggtaaaggcattaggggtagtgttatagaaaaatacttgaaatggtgagttgttaatgcctataggacgataatctgcaccatattcaacaatgtatggaccaaattcgccttcattaacaaattgaaaagtagcattttgaggaacttgagcttgtgtaatggaaagactaattaggaaaagatgtaagaataatgagagagccattaaggctctattgttgttgggtgaggaagacatgaatgaatgataatttgtgtgttgtttgagcttttggtaatggttcttatatatatataacaacaaaagtactatttaattaggcaaagttgccaactttgacaaatgaaagttggatatgtattggatagcatttattcatatccaagttgtctattgtactcaaaactttagttaatgataataataataatataactaaatgtcataatcttctttggcggcttcttttaacagatagatagtagatgtactcatcatctcttatttcacttcatttattaagtccaaaccattttttttgttaatgctattttatatcttttgattttgtaaaagttattagttgaactttcttttttgttaaatgataaaattgactttacattttctaaatagtacaaataagacattgagctcattttttgacatttttttttaatataatcaatttgaagataattttaacaagaacagatgtaaaaaaatgtaattaaatttgtcataacacttctatattaggttattattaaattttatttaaaaaaattaatttaggggtcctatttagtaccattttagaaaatacatagtgtatttttctatttaacaaaatagaagattcaattaataacttttacaaaatacaagatctaaaatggtattaactatttttttttatttaatttgattttaata

SEQ ID NO: 28994 - DNA, 4036 bp, Cannabis sativa
  modified_base (2465)..(2466): a, c, t, g, unknown or other
  modified_base (3986)..(4010): a, c, t, g, unknown or other
ttaacaaaatacagggtccagtctataacttttgcaaaacacagggtccaaaatagtattcaccctatttcttttattttatttttcttttttttttctgaaaaatgtatctgcaatcatagttcagtgcatgctacaataacattgttagaatatttgttgggatttataccctaaaaataagtaattaataaataatattttaaaaaatatatgaaatacaattataagataaatgatatattaattatggaagtataattattaaatatttgaaaatttcttattcatatagagaatgtataatcttgtaaggatgtacaaaaaaattatattaggttttatttggcccagtacatcaacccattgggcttttgcttattgtatacatatatatatatacattattctttgtaataactcaataagagccaagtcactttccagccagagttattttcctctctaaaatctaaaatggtatcagatgtcatcttcttcaaccaccaaaatccctagccatctctttccaattctaagcctaacatcaaagtctctgccccatggcatctagaaccagaaactcaaccatacccgctgcctctgttagtgagtctccctctcttttgttgccatctctgactgtcgcccatggccaagcttcatcttccatcgctgctaccacttctgacatcattgctctgtttagttccttgcagcttgaaaactctatctcatacacaattggtgcacatcactccatgtttgatccttccactaccggtgtgcttggctccgattttgttacaaatatccccatttctagatcgattgaacaacactacacaacaccattcgtctcttgcttcgctttgacgtcggtatccatagcatcacagactcaattaaaccacactgcttccgcctttctcttcttcaaccccggcattggtttagacggttccctcgctaacttccatctttttcagcaccaccacggctttcactccaacatacatcgttccacctgtccaaaactcctcttcgttctttacggtaataatccctttcttggacattaaggccatatggctttcaatgatagctctagttttcttgcaaatcaacgcctatctcgtgccttttcgatcgaccttctcaagatgatcgttatcacttgggaattagagatcaaccaaacatcatttcttcatttctcttgactggtcaagataacttgcagtcttggaagcgagtggcatcaatcaatatcgctacaaaaaataaaagttcgttcattgatggcactttaccccatccatcattgaatgatccctctcaatccgcttaggatcaatgcaacaacaccgtgatgtcatggattcttcagtctgtatctcatgaaattggtgctaccatcatgttcaaaactactgcccgtgaaatgtggaccaacctccatgatcgcttcaatcaaagtaatggccatcgtattctccaacttaagacctctattaataatgttaaacaaggtgataattcagtcactacttatttcacccagttataagccctctaggatgaactcaacgagtataaaccaaacactccttgcacttgtggtgctatgcaaaaagttcaagattactacagcggagaccagatccttcagttcttgactggtctcaataaatcttactggggcattcgggctcagatcatcctccttgatcctcttctgccattatcgaaggttttctctgtattcgttcaacaagagtgccaacgttgtcttggtaacattattattgttgctcctgctcctgctcctgctaaaccaaaaccaaaccatccttctcaaagcaagaagcctcacctaacaactatcttaaaccaggtcacctggttgagaagtgctatttcatccatggttttccaccaggatatggtgacaaaaagaagaatccttctaccgctcgggtgaatcaagttttcgctagtctagaggcttttgtcattggctcttctcagctacaaccaaccaataactgattttccttctcagtcaacaaatccaaggcgctccatccactagtgaaagtctacctgtggtttctaacgtctttggtatggataaactttttccactttttctatggatttcatatagtggagccactcaccatatatgtcattctcattctctcattgctttatatctctaaataaaaatcatgttgctaatatagttactttacctaatggccatcagatacacatcaaaaaatctagcattgtgaaaatatctaataaactaatattaaccgatgtattatatattctcgaatttaagttcaatttattttctattaatgctaatcttgaacattgtcctaataaactcacattcacttctaatcaatgtttgattcaggatccctccctgacttctacgattgggacanntaagaaagttggacaactgtttttttacaggagcgacactttctcacatcaaatatttctattttgcaaacacctcttgtactttggtggaccccttgcatctttgccttggtcatccttccatgaacattactactatattaaataaatttttgtaattttgtgcgaaacctctggattatatgtgctctatatgtcattttgctaaacaaaagcggtctccctttatttctaacaataattttgctactactgctttcgatttaatacaccttgatatatggggacatttttgtattattagtattgaaggttatcgatattttttaactattgttgatgatttttcttgatactcctaggtttacatgctaacctctaaatccaatgtttcttttattattccccttttttttgcttattgcaacacaatttttagtttccattaaagctgagcgttttgacaatgctaaagaactgagtttaatgactttctacactacaaaaggaatcacaaagcacaattcttgtgttggtcgccctcaaaaaaaaattttgttgagcgaaagcatcaacacatcataaattttagtagagctttattattcaggtctcatttatctttaccttattggagttatgccataaatattgttgtttatcttataaattgcactccatttatgttacttaacgaaaatacttcctttgaagtcctctatcagaaaactcctaaagctcctacttatgaccaccttaaattttttagttgtccttcttttgcttccactttagaaaccaaattacataaactttctccaagatctcgtccttatatctttattggtatcctcctagtatggtagcttacactgtcttaaacattgaaactcaagagattattcactctagagatgtttactttcatgagggtatgtttttggtttcacatacttactctcctacttcaataaaataaattacgctcaccttctttactgccctctacaggaccatctcataattcacctgaggagaatgcactagttcccgaccatgatggaacttcatctcatcaaaagggcattcctcaaaatgtgattgacaccaacacacatgccccagatctttatgaagtaccatccacacccaaggactcaacaactaattctctcgttacttcaataataggaagaatattatccaaacataaatttctttctgattacatttgcaataccaatgcataacctattaataaatatttgtcttataatgggttaacacaacaatttcgatcaacgatcctcactacccattcactcgtcgaaccctccagctacaaaatggcaatcaaagaccccatattgaataaaagccatggacattgaaatcgatgcccttgaagccaacgacacttggattcttctcactcttcctgacggacaccatgccattagttgtaagtcggtatacagaatcaaatacaatgatgatggtgttgggctttgtgccctaannnnnnnnnnnnnnnnnnnnnnnnntttccattcaattatcaataaagaaa

SEQ ID NO: 28995 - DNA, 5177 bp, Cannabis sativa
attttctttattaagtattgtctatttagtaataacattagtttaaatacttcttaatgcattttattctattattctttatgtaatgtcataatattttttttaagaatattgttattttcaacaaactatataaaaatatataatataataatgtatattaaaataggatgcgagtatatataacaaaaatatttgctccatcacttagaccatacaaatatgtgctatatatttaaataaaaaaaattaatatgtgatattaacataatatttatcattatactagtccaatgtaatgttcatttaatatttattaaaaatatataaaagaaataataatgtttttcttcttatatatttaatttaggggaatcacttatatactatttttagaatttttttttatctttattgtttgagttgtttcagtaatttctatataggttattatataaatttgagttgcgatttaaattgccctgttagttactacgtggattgttatgtgaatttccgtaaaaataaaaaaaaaattgtaaatataaaaatagaaaaatcttttaattaataaaagataattttaaaataataacaagtgacaaaaaaaagtaagttgataatgttggtatatggtattttgtgtgtccaatttaatataatttttagcatgtttaaaataaacacaaattttattacaccattttttttttttttttgaaacggaatgtgttcattccaaactaacaattacataggaaaaggtttatcaaaccaaagagtttgatgaatacaaggggtgacacccctagagtcaagattttctgttaaaagattgtattttatagtgtattaaactaatttcattgtgacatatcaattaatttgagcattttaaggggaaaaaactgtatatataggtggttaattttttattaaatgaaaaattagttgacgtgtcaaatttagattagtttaacacagtatgacacacaactttttaacaggagatcttgattcacatagcactagctttagataacaaaacttgattggctaaattgtgatccatttaattggcttttctaaaaacaaaagataaatcacatactaggatgttgcaccaaacttccttttagtacaccattaaaacaagttttttttagaaagtgagcattattttaataatacatcaatttaacataccaatagaaatgttcttaaagaataaaaagctaagattatgcaaaatcaagaaagaaaaacaaaagagcatctttcattcccattcaattgccagatcatatggtaaacataagtaatatatttgaaaataatcaaaattagtaatcaccctacagtacacaaattacgatcttttacacaaaaacacacaaaattctcaactggagtcaattgaaattagtatttgctatctcaaagaaaaaaaaaacacaatcaatcagttggttcttattttcccttctaaatcctaatgtaacacaataatgataataatagacgataccataaatagttgacaacccttttgaacacctaaataaattaacatttagcgcacccaatcccaagtgtggaggtagaattttctgttctatggaaaatcattgtgagtcttttaaacatgaatatccttcttagataatcaaagattggttcatttgaaactggaatggacttcacaaaccaaccaattggccaactgacagccgctattgcaatgcaacccaaccattgccaccaattgagatttgtggtgtcagcaaacttctttaaaaactccaccatcaccacttgaagtacaatagtaaacccaataattcccaagaaaagtttgttcctatgaacacctttgaacacattcttcttctccatactccttgaattgaactcgttaaagacttgacaaagcacaaaagtattgaatatcaaggtgtcatttacttccttagagacatttaagatggactcaccattgaattgcaacaacaaaagaatggcaatttggtagagagattgagccaacaggtttctccacatgatgtttgttattaaaggcgctgttctacccaccggccttttcttcatgagctcgttgctcggcctttcagtggctagagccagagctccaagtgtgtccataatcaaattcacccacaagagttgaactgccgtgagaggaacttctccagcagaaactgctgctatgaagtttataacaagtgctgcaacattgacagttagctgaaactgaataaatttttgtatgttgttataaacacatcttccccaccttaagactgtgaccactgaagcgaagttgtcatctaagatgacaatgtctgagctctccttagccacttcagtaccttggatccccatagaaagtcctatatcggcttctttcaaagccggtgcatcatttgttccatctccagttactgcaaccacatggcctagctctttcaggcattgaaccatcaagagcttgtcaaatggggatgaccttgccattactcggatgttgttgattttcttcattctgtcttctggcgtgtagtttcgaaattcaatgccttccaccacttgtccctcgctagcttcatcaccactggctacctctagaattccacactctgcagctatagctttggccgtgaaaacgttatcccctgtgatcatcttaatagccacccctgcatttttgcaagcttccacagctttcttaacacccggtctacacgggtctttaagtccaactattccaagcaaggtcaaatcatcttctttgagccttctatgtgtcttctcttcatcgtcaacatactcaatctcatcttctgaaacttcacattgagcaaaggcaatgcatctgaggctgctagccgccattccttcaattattttctcaaatttttgtttcacttcttcatctaatggcttcttattaccattactttcatagtaactcgagcacattgctaaaaccatctccgcagctcctttccagtggacattgatctttagattgtcgtttgtgattttttttaacataaccccacttcgttttttatctgagttaaacgtttcaacatgtaatatctcataatcatgctttaacgtttcaatattcatacccaaattcaaaacagcccaagataatatagctttctcagttgggctacctgaaaactcaagttgaacattgctagattgatcataatgatcaggtttgtaaacagtacccgtggtgttcaaaccaacaccttgatagaatagttcacaaacacttgttgaaattgaatttgaataatctttttcattgatttgttcttgaccaagccaaaatttagtaactttcatttggtttaacgttaaagtaccggttttatcagtacaaataatagttgctgatcccatagtttcacaagctgatagctttctaaccatagcttgatcagccatcattctcttcatagagtaagccagagttaaagtcacggctagtggcaatccttctgggattgccaccaccacaattgtgaccgcggctgccactatacgaacaaccgcgtttaaaacatcatccacatctgtcctaccactgatgtactctttttttccaaattcatctttagtattacccgtaaaataacgaactaacatgactacaagaactaaaaaggcaactgtaagtcctacctttccaattgaagaggtcagtttgtcgagtctagcttgtagtggtgtcctctcgtttgtatctcgggttatggagctcatcatctccccccaagccgtgttcatcccaacagaggtcaccagcatggtcccatagccatcagccactttggaaccagagaacaagaaaggatgcttcactgaatcaatctcaatgtgatcgctttcgcctgtcatgcttgactcatcaactagcaatgagtgtccatttaagaacaatccatcagctggaatttgatctcctatgttaagcaaaacaacatctccaaccacaatatggaagatagaaatttcttgtcgcctgccacctcttaccacatcaatcttgatgttgtcgcttattttagaaagcttatcaaattgagtctcttgtctatagttgctaagagctgagccaacaataacaagcagcacagctataaagatacttccaccttcataccaaccttcctttccaccatgttctttaattccaaagcctaaagccagagcagcacagaccataagaatcaaaatagtggtgtccttcaaagcatccaccacaaagtaaaacaaccctttgggaggaggcttgtgataagtattagaaccaaagactcgacgtcgtttgtcaatgtcttcctcgttttcttggattccattctcagggtgagtcccaagagtggtggcaatagcttcagcccctccatgtatgcgtagagatgtcaagtctttttccttgacaatctccatgatgagtttatgatcaaaggctttattgacttcatgattttttgaagtagaagctttagtagtagtagaggtgttgtttggagttttggaaggtgagagcaaggtctcggaatagcttcttatttctgacacaacaacatgtttgggaagcgatagcatgatccggacaaaataaatagctttgtaagccatgcgccatcgtttttgggctttagtgaattcatacagcaatttcccacaattaataggtgatctgtttatactcgacatggtttattaattatacaaaggtaagagctgataccaagaaagaagttcattcatagtatgcaaagcccagtccttatatagatacgaaaaagaaaaaggaaaatctaactgtgattggtcagcagccattttgtgatgcttacacacacagaatttcgtcgaaaagtcatcctttgggaaacaacaaagcagtttcgtgcctcaatatggcggtttatgtgcataatacaattaatcttattttttgaaaaataaataaataaataaaaatattgtgcttctccttgctaaattcaatgtaaatggtaaaactaaaagttcattctagctcaaatctgggtgagagccagagagggttttcttgtataagatgacatattttctgatttctttaatggttgacgaatttatta

SEQ ID NO: 28996 - DNA, 1409 bp, Cannabis sativa
atatattataaacaagttaactttctgtcctaaaaagtattataaatctaattttattgcaattatagatttttaaacttagtgatgttattaacggtgtaactatgattaaaaaggacaaatagtaccttataaattatgacataactttacaagttatacaaagtagtttttcttagattgggctgagcaccttaatttgaaaagtgataataggtgagattagaatttagaaccctataatatacatttcatcaactatattatatacaagtcataaaacatggcgtgtttgattatcatttttatgtgtgaaaaatagattgctctctaacttaaaataaattttgatttctgtttcagaaaaaataaaaaaattgatttgaaaaaatgatactaaaataatattaaatacactttaaatttataatgtaagcccagttaaacatggtgtgtttaaatcaataaaaatgttaagatttgtttaaatttatattttaatagtggattatatttttattgtgattttgcatacataagctacttttacaacacaccatttaaaaggggtctagtgatcctcctatatgtttcaacatatgagagaaacttttagtaaaattttatttcatggtcatttatgctataattatttaagatattttttaaaatttttgagagatttaaaaaaattcaacacatcgaaaataagattcaaataatcgattgtacgtgagattcttttattttatacacgtgtaaaatagactgtttaaatcttattttcaatatgttaatgtttttttttagtttcttaaaattttacaagatatcttaaataactattaaacaataaaaaatgaattaaaatattttttcaaataccgacataaataggagtgcataaataaactttttaaaggtactaatttttttataccatataagtttcaaatttaaaatttgtatatgggatttgggaaacattaattttaaacacccatagaaataggaaatacaataattgttacgtgattatatgatgctcatctttgctcaatattttaatcaaccttatgaataaagctagttctctgtccctaattggatcactcaaacaactttgcttgcttgacctaaactgtaccaatttatcacgcaaagatttctattaaacaaacataaaaagaaggctaaaatatctatttattaattctccttctttcattctaatcttcataaatgccaagtgttttttttctcttgggaagagatgtggtccaagctaaaaggcatagaattgaaacttgagattggtgatgaaacatataaaggctgcaagaacacgaatataggaaatggtgaatgcccttattattattactaactttttgttgaaataactataa

SEQ ID NO: 28997 - DNA, 3686 bp, Cannabis sativa
agtttaaaatcatcagctataacactatagcatatggtttaaaacggtcaattataatatacttaaaattcaagttgatctatatcattgtgatatgacaaacttttttcatggtaaacaacaagtttgataaaaaatatttattacatatcggtccagtcatgcataatctaattatacacagtatatttattacatgttcatctacatatgtgatccgactcaaaatcacacacactagaagtatagtgtatagtgaaccatacttagtagtttcatattaaagatttttaatactttaatacactaccaagttattttattcatatcatataatcataattctcttgtacatccttattagattatacattctccatatgaataaattttttttaaatatttaataattatattcttataatttatatatcatttattttataattatatttcatatatactctaatatattatccattattactttcttttagggcataaatcccatcatgtctgccttggggttgtgtcgactgtgagcgacaacttgactttgccatatatggtgggatgctagcttcattgaaaccatacatgagttattcgcatggttccaggtcttttaaagttaagcccatgtagagtaggacttttttgaataggatgtttgatgatgctccgtcatcgatcattatcctgtccatcattatattagctatttggacctcaacaacaagaggattattgtgaggatagttgacatgataagagcctgattctatgatggtgattcgttcacttctgtagcactaagactttggaggatgttctactacctcaaggatttcggctcttggttcatgtctgagtgctcttgcatacctttctaaggccttccttaaattcctagctaactgagggccttcaatcataatctccaacctgcctacaattggcgcacgttgtagtggaacattgcccccagttggagtttcaggtcgtacatatcgctaacgagcagcatgtttttatcttatgagaaattctatctcgtcccgcaagtggttacactcgttggtataatgatcgtagttgttgtggtaacgacagaacttattcatgtccctcttttttgactctttgaaaggaagaggtttgcgatacgacactattgactgagtggccgtatatatctcctctcttggggcaagagaatcgagtacctggtgaagtgaggctcatagtctctgaagggcttgcccccggttttaggctttttttcctctagaggagtttccttgtttgccactattgttggatctatttcctccattcgaacctccctttttcccattgccctgcaccttagtagtaggggcttcagtgtttggcgacttcttcttgccaccttttgagccctttgctcaggtgacgacttcttcaagtttgataaagccatatgctctatctatgaagtcattcatggtgtatactgccttgagacaaaggtcagaccacaaaagactcatcttcttgagcccagttacgagtgccatagcccttgcatcctcgctgagacttttggtcttagcggctgcctctaagaactgttggatgtagtccttgagcggctcatcttcctattgcttaacgtccaccaaatcattggcctcgatttggcgttgtcggaaaggagcacattagttaccaaaagcatccactagatctttccatgagttgattgattcaggagagagctttaggtaccaccgttaagctaggctagcagggaagattctacacctgacatcatctatcacaccgtgcagatcggtttgcactttaaaagtagtagatgtgagataatggatcttccttcctagtgtattgatgctaggaagggttattgaacttctaagtaatgggaagggatttgattctttcggagagtgttgagcgccattcttagtcaatctcaaatttagacaacttaagtgtaatgaccctcttcactaaagcgactaaggtgtcgaactctgctcgattaactccgtgaatggtggtctgcgtcccaaatggagcttctgttactcagatagggtcttttctagaagttcccaagtccatcattcttcttttgttcaagaggtcacacaggtctttttgtcatccaggtcgatcttgaactccgatcaacctgggtcttgtagttgtctcctgaccatgaggttgtgaaggaaactctggtgaggctttcagaatgaactcaagatcgtctcagaacgacccgttgtgagagtgttcattcaaagcattgaagtggctacttcctaatgaaaacaccaaaatattgacttacaaatttggactggacttctaagccacaaccacaactcgctaaatcggcgagaatatgaaaagttgtagagtaattaatgagagatgcaacaatttgtaatggggccacgtctacttcgagtttttattctcacgtgatggtatttacagcaactgtttaagtattagaaacttcacactctagagagagaaactctaaccttgtgggtagttttctgaatgttgactagtatctgagacatgacttgatagagggcttaaatagcttcaaaacgcaagttgaattgtgtcaactgaatgaaaattgagtgagttatgatcgttttactgaaggcagtttaggttctagcactcaggttgacattcagctcccaaggttacatttcagcgcacaggttaacatgtgacgtcaacctggacactgtaaatgtgcaaaaatatctaagagaagtcatttgagatgcccaagtgatggtttgacactcgtttgtccttttatatattttggtgaagctggtcacacattcttagagatgttgttgttttacagaaacggaagaatcgaaacttatggctttcagatgagccaaaatttaagttgtgaatttgattgatctgacatcatgaatcattgcacttgtggaaaacttgacgaatggtcgaaatgacatcagatttggataagaagaacccagtgactcagaccaaatgttgacctgggcgctggggcctttaaatcgaacccttgggattctctttttgatactttcaaggcttccaaggcttctgaacttgaggacgaggtccccccatttgtgatcatgctagattcaatggtcgcatcgaatttggaattcgagcaattaaaggcagcatcccaagttgattgtcaacctgggcactaggcccagcactaggtcaatcagggccctgcgccgtgtttccttgttatttttgatgagggtcaagatgcccaaagcacttttgttaatctgaattagaaacagccaaggttgacaaaatgtcaacctgggcggagggcccagtcccaagtgttaacctgggcattgggtccctcttttgctccttcgaaagttccgtttggtccccataaatagttgaatctcaatattttctgaagatggagatgattctcgaaagaattttaggaatactacattttttgtggcccaagttaacaaattgtcaacctgggtgcaaggccaaccccaagtgtcaacctgggctctgggccctattatttgtgcccataacttgttgattttcctctggaaggaccaattttccagtttttgatgaagaca

SEQ ID NO: 28998 - DNA, 1488 bp, Cannabis sativa
aaatgtagtaataggcgtgtgagggtaattttgtaataaagtgtctaaaaaggatttttcatgtaaaaatttctatttatttttgaaatcgtatatttatttactttcgtcgtgaagaatattttcatttgtatttaaaaagaaaagctaaaaaaaaaaaaaattaaatagtaacaatgtaatatcctctttatcaaaaaataaaataaaatgactttatacatttttgttgagaaaaaaattaccttatacttgctatagattcaaattcgacaaataaaaagtcatactaattagacaaataatagtttgacatatatttatatgctatattactttaattaattatttttatttaaaaaaattactaaaaaatattattgatacctattgcagtcaccaactgttagttttgttgtaacagttaactgttttcagttaaccttttctttaccttgtatccttgtaatctcacatctgtaaataaatgcttttcactctttagtctacagctttatagacttttgagtttgttgtattcatcactctgttttaagtttatattgataagtttatacatggtatcaaaaagtcattgacgaaagttatctatggatcctccaagcatcgaaaatccaccacgtacagatgctccagctcgcaaacaacgaccgcgaatcgttcctcaacctcctctgattgctcctcaacaatcttggaatccctttcagaactctcttagttcttctcttattgtgaaactcgattgatccaacttcttggcttggagatctcaagtgattcctatagttattggccatggtctcgacgagatcttactcaccagagttgctccactggctcaactcgtcaatggtgatgtcaatccagaatctgtcacctagaaaagaaaggaccaactcttgctcagttggctccaatcatcaatgtctgaaactgtattgggctccttggcttagtacaatacatcttacacggcatggaaggccctggaacaaagatttgcatctcaatctaaggcacagatcttgcaaatcaaatctcaactctccacaattcagaaaggtaatctttctatctccgattactatgataaagtaaagattttaaatcatgattttggaagaatgtggtcaaaattaatgacattttgagagaaggagcttgtaaagtggtgaatgatggcagggatactaatatttgggaggattcatgggtggctcatggtaaatctttttaccctaagtctagtgggcacctagagtttggtatgagaaaggtggctgacctcctgactgccacaggagactgggacattcagaaactgaattgcctctttgatagagatactatttttgctatcctgaaagggggaagaccattgggtcaaggaaaagataaatggatttggacaaaagagcgtaatggaattttctcatgcaagtcagtgttgggttttgtgcccta

SEQ ID NO: 28999 - DNA, 2060 bp, Cannabis sativa
gttttgtttttcagcaaaaaaaaattaacagctttattttggttttgttttcttcacatttagatgaacttgtagggcttttaaaaataatgatgagatataattagaccttactaattgtgtttatgattatgcatgaatagtagattgggtacactagttgaccatataagtcactcaggcctagaacaaattttgagagctaagccatttatcattaaaaaatatatattgtcacaataatatgtcttttgtgtataatacacatgtagttgatggaattcaaactttgacctttcctatatgtaaatgggtgataacttttcattaaattcatatgaactaataataatccacttggtatttttgcttaattaggtaatgctgatagagaaggtggcatacctcttgaaataactttggaaaatttcaacattaatggtttcactggaatgagtgatcctggttttaatcaattttttgcaccatttgttttctataattctaggccacttaatctaaatcaagataatgatgatgagactaatgaggtaattaattaataatccatattgtaatgatgatgaatatatttgttttttttttatattttttttggcaattaattgtaaaatatttttatttaattgtttttttttttttttgtgtgtgttttgaaggggtttcaaaataataatcaaacaatggtattagtatttatatgtgttccaattagtcctggtaagagcagattgataatgagtggatcaagacaaagatttccaagaagattttatgattggtttggtgaaatatatccaagatggatgcttcatgttttcttaaatgttattttggattcagatgcatatctcctacatcttgaggtaatattacttttttatatatagttgtatatatgattagaatatataatacttccacaactaatgaaaaaattattaatataagaaaataattaaaaaaattgctaataaactagagaaagtttcataatgcaatttttattattcatgtgctactagtaacttgccatgtatgacatgtcacatgatacaggagtagtgtaatactttagaagttaagaattgtaatctcaacatcatcattttttatacaagggcttcaatttttatttttgactaaggtccaaaatcatatagggtcggcattgagtggatccataaattttgtttaggaggctgaaaaattttaaaaataaatttttagatgggtataaatgtcaaaaaatacaggactagcaaatatatactaaaaaaacatgtgtttgccaacatatgaaatgataataaggaaaacagaaacgttccagtaaaagaaaaatattggagaaaaaagaaatcgataatttgtttgttgttaaatgtaatgtaggagcgtaaaataatggaagttggagttgggaaatggaataaagcatgttttgtgccaacaaaatcagatgttcatgtggttgcttttagaaaatggcttaacaagtatgggggtggccaagttgattggggtggcaaattctctggtgctcttcctccaacccctcctagagaacaactcatggacaggttctatacataatgcaacaaaatcatcacaatatttcaatattaattttcaagacccttttggacatattatgtaataatgttaatgtatatattttaggtattggagtcatgtagtgaattgtagtagctgcagtgctgcacacaagggtttaaaagtgttagaagtaatgctacaagtgatgtccatagctcttattggatatgttggtgtaaccaataaacaaagccaaacattgaagattggtatggtttctatggcattgctttgctttgtagcttcaaagtggttgtctcatttcatccacaagatcttccattttcatgattatgaccattcttttcgttaaaacatctatctagctctcacatctatcaaggcattatatatatgatgagtgagtcaatatgattatttgcatggttgaaaactatactttatatatatatatatat

SEQ ID NO: 29000 - DNA, 977 bp, Cannabis sativa
aatgataaatttaatgaattcctccaccgccagaagtctagtacaacttcaggaaatgaccattgagaagtgtaaagaaatgagacaagtaattgtggatgaggaagaagctggtgagaatatgatggtcttctccaaattagagactttagcgctttatggtttacccaatctgaaaagcttcaacagcggaaatagtgagatacagtttcctaatttagaaaaagtaattgtgattgaatgccctcacatggagaatttctcttctggaaatgtaatcacttctaagttggctaaaataattacaagggtttcagaggatgaatacttcttcgatatgatgcatgcagagggcatagaatattattggaagggtgatctcaaaacaaccgtaacaatgatttgggaggaaaacaatgtatgtatatatatataacccaatataattattcttgtttttattttaaatcgatgggtatcaattatgaattattcctcttttctggacattatttttatgtatatattccttgattgattgttgtttcagaacgagcaacccatgaagagtgatcaagactatgattcttgttctacttcttcttcccaataattaagttggttcaaaataaaacggtaagaatattttaaaatattttatatcttatttataaattgtttattgtttaccttttgggtttttgataggggatgaaattgtgctatcactttggtccatttattagaatttattaggagctttgaataattatataattttattattattatgagtttttgacctatttttttcttgggaattatgacaaaaatctagagtttggaattttacaaaattagaattactttcttttttgaaatcaattagaattactttcctataataaataaattattgttttattaaaaacttaagtctttgagagaaaaacttaggaaaacttgacaattctggt

SEQ ID NO: 29001 - DNA, 1595 bp, Cannabis sativa
tatatgaaatgagttttatttagggcataaaacccaatagaataatcatctatgaagaagatggagtattttttgtccatgtgaatgcatgtctagactacatatattagtatgtataatttttaatatttcagaactcctatggacaccaatttcgatagacttggaggttttttctcttaatgcaacccacacaagtatcaaaatcagtaaaatctaaggtgttgagaataacccatctttcactaacctttcaattctatcaatggagataagtctcactctcatgtgccataatgtacaggaatcctcattcataatacatctttttgtaccaccgtgaacatccataacactattagtggtattatttaataaattgatgcagtaaagaccatcaggcaaaatatcgattccaacacattcagatttattatataaattgaaagatttgtctgatgaaaatgtaaaagaaaaacaaaaaggtacaagtcttgaaaactgaaatagaaacttgttatatgaaaggtcttttctaactttaaaataaaaccactacttaaaactaaattgcatgctccaatagcttccacacgtgagcccatcttgtttccagataagattctttgctcacttcctactagcttccttaggttttgaataccctgcaaagaatttgttatgtgaatttttgaaccaaaatcaatccacaatgtgttaagtttaatattagccatattagattcttaacatactaaggaaattggattacctttgtcgtccatccatttcttgaactgattgtattccttttttacgtgtcctttttgtctacaaaagaaacatttaatggaatccttctctatgatagcctggggagccattcgatttttttccttgttcttgaatggtttgcgtttctttccttgagtgatcatgtgagcactttctccttactcctataggagccttgcttcttcttgagcacacatgttcataatttcattgatactctattttttcttatgtgtgttgtaggaaattttgaaaggcccatattgaagaggaagattgtgaaggatgtaatgaaccaagaaagtttttggaatattaacattgagcttcttcagatgagcactaatatcccttatctttaagatgtgttctcaaactcctttgacaccggtgaattttgtggatgagaactcttggatgagattttcaaactactcttccataagattgatcaagtctttgaccttttcaagtggctctactggcctatgcattcccataagaatttcggacatgatcatgaacatgatgcaaagacgattaaattgctcccacttttcacgtaatgcaatctcaatagaaatgttggttcagtgatagcaacaggtttgtccttccttattgcacagtccatgtcatcgcaaaataagtggagaagaactcattccttccaaattttgaaattgtcactcctaaagctcagggatttcactagtgatttcatcgtattttgaggtgaatgaagtagctgcaagagtaggattacaattttgccactttatttcaaccacttattcttc

SEQ ID NO: 29002 - DNA, 3427 bp, Cannabis sativa
  modified_base (2099)..(2101): a, c, t, g, unknown or other
tcaatctccctattgcatgtaattaaggcgaaatgctcaataattaaatcttttacttaagtagtaaattcacaaagcatgcaatttattgaacttagataaattttttagtttaaatggagataaattaatctaggcaataaattaatgaagcatataattcatttaacctagattctattcctcatcacaattaaaaatacctttgacaatattagaaattgtaatttatcacaaacacttagaatcttagactatcaggtgaatagtaatcttgaaacagcaattgattaaagttaaatttaatttagtgatcatctaaatgagattaaaataataatcatggcattgaatataaaagaatagaaataattcgatataatagaaactaaaaattaacattcattattgaaattaaaaattcatgtcttgggctttgaaataatcattaactaaaaagaaactactctaaattagatattataataaatattataataaaaagtaagagtttaaggagaagaaaaagaacaatgatgtagaacaattgatgtcgcaatctccgtcttcttcttactctctctctaaatttctctctcaaattcgttgttcaaaggtactaaaattcgaaccctaaaagcctatatataacccctaaaaatatctcagtttaaaaaaagaagataaattcaaaatttggcaaaattcccgtcctcaccgcggccacaacttcatgctgaaaaaattctattgcgtgttcagattagtattttggtcacaacttcatcaatacaacttggaattggacgattcaagatgttccagaaatctgagaacgaaatctacaactttcatgtttagctccaagtccagttctacttccaaagtcgttaaacatttacgttcagttttatcaaactaagctcgccgacttctactattttttaccaaaatgtgcaaaaatccctccaaaagactacaaatgcatgattagcctttaaaatagcctaacaaattataatcacactaatcaataatttaaagaatcaatttaagaatattaatacataaattggtcatatttataagacaaatattgacttattaaattcccacacacttgactcttgatcatcctcgagtaagttaatgatatcatgaatgatgcttaaacaaattggtctttatgaaaaataattttagtttcaaaaattgtacatccacttataattctaaaaaaaaaaactcaactcttcaattattagaatttcaactcaagataattatttttcaaacttttttttttgtgtgtgtgtgttcaatcaactcatcatattactaacattcatattaattcatgcatgccaataatcaatgtttatcttaaaataaatgtgtatttcaacaaaaatctactccataagcttaattatcaaactatcctccactaatgcaattacacacaatctaaagatcgattagactttataggcttataatgtaaagctaaagtgaaaggtaaataagaatgttaatttaggctcaaatcacaccataatatatatatatatatatatatatatgcaacattctcttaaataattcctatttatactatactccccaattacttccatataattcaaccttatatttcttttctagcatactattccccaacacttagattgttgtaagtattcatatatttctcatcgaattttttattttcttttagttttttaattcaataaaatacttgcaacttacaaacatttattctaaagagatagaattttttttttcacaacttatacataaccatcaatatttttcccctaacaaaactctcacatttttacaaatacataggacatcaatatactatggtgtgaaaaaggatgaacaataaatttttttaaggctcaaaaggttcatgtataaggttaaaaagaaaaaacaagatttaaacatttaggctcaaattgggtaaaactaggaaattcacaaataggataggcttgaaaagctcaatcgatccaaaaaattacctatatcatatctcaaaatcatatgtaatttatcaattttgcctcaannnattatcaaacaagttctagagtggttgagatcaaatattaaaagtcaaacatgtatttatctttctaaacattgacaaatgtgataattcaactgatgtgcaaaagtttaaaaaaaaaaaaatcaagcttggacagtaattaatcatgagttaggcacacaaatcatgagaatctatcattttcctagaattataactatcacacaatcaaatattttatcatcaagaccatgcataagacatcaaagtaaatacacacatcaaacacaagcaattattgtcaatagaattccactcaaaccatgctcactaatttttttaaaagctagaaaaactaatataaattaaaaaaaaaacaataataaaataaataactaaacaactaaggaaaaaaaaaaactggatagacacgatagttattcttcccccacacttaatataagcattgtcctcaaggctcaatcaaataaaatcaatgtaaaataaaaagaaaagggtaaaaaaactcctgtaattttgctttgtttaatgtcgtttgctcgactgcatgttgtgctcgtgtgatcttcatattgggtcatagtatggatcatattgatgcacttatggcgagacataatgtggatcacagaattgttgattgtacatcaccatgtttccaaagaatgatctgaaaattaaaaccacaactaggagaacaagttagtaacaagaaaaaaattaataacaaattgaataaaatagtccccggtaatagagctaaaaatttaatgtgtgtcgtttaccacaacaaatttactagttttgtttctatattaccaattacttcagtataacaataaatacaggtcgattccacgaggactattatcaatttattattcaaaaattagtaacaagaattaaaaagggggttttaattatgaagattaaataacgtaaacaaaaaaaaaaatagaatgagatacaacgatattcaagaaatagttaaaggttaatctccactgtcaacaatcatccttaattcctaataatgaatgttatttcagattttcaatcaaactattgattctacaaataacgctgaagcattcaattatctcaatctccctatggcatgtaatcaaggcaaaacgctcaataagtaactctcttacctaagcattaaatccacgaagcatgtaatttatttatcttagataaagctttaagtttaatggagattaatccaagcaataaattaatgaaacatataatttatttaacctaggttctattcttcatcacaattaaaaatacatttgacaatattagaaattacaattt

SEQ ID NO: 29003 - DNA, 951 bp, Cannabis sativa
cgaaacagacaaaggtcaatgagaatatacctttaatgagatgtattatagaagtttcagaaaatacatcctccctcccaaattgtgaagaggttcgaccattttccctttctaaggttgtaccaaacatgaagtgacaacattgcaagatcataatcaaacttaaggagttgtacaatataaccaacaatactttctatgatatgtatcaggttatagacttatgttgtaattagaattgagttctacatgcattgattacaacatgtttcaaaaagttgagttttggtatacaaaattgttattattaaaattaatatatatatatgtttgtaaataaaataagaatggatgcaaggtgtgtaatttttattgccatgcatttaatatgtgcattttttttttcaagtctacaagacaacaacactagcctatgtatactaaatgaaagaccccaaaaggaggggttatttcccaaatttcccattagaaatggggcataagaggatttgtgatgtgttgacatttaaagtaagtgtgatatgaacatttttttaaacaaaaataaaataaaaatgaagtgatggaaaccgatgtaacactaacttaacatgttagtcatgagtcataacttagtaacgtaagtagctagaattgaattgcttattaacctttgttatcacttattagtagtagtagttgtggtctctaacgatttcaagagaatttgttatcgataagttttattcactaatagctaatacctagcttgtatggtcactagagcttacttcagatgaagaaaatctcaatctcatcaatgaaacatcaaatccaagaattgaaagtgtactattcttggtaagtgggacttagacaacgtgtaacatgtcccatgctgtaaacttaggtaattaactacttaagattagtagactctcttattagtgt

SEQ ID NO: 29004 - DNA, 2238 bp, Cannabis sativa
  modified_base (1233)..(1238): a, c, t, g, unknown or other
tctctctctctctctctcttacggagatccatcgtcgttggtagcagctcaggcaaagttcactatcactaaagtgtacgttttttccctcttcggttgtgcattttgatttggttgtcatatcagggttaaattacaaacttacaatctcctttttcactttttgtttcataatcctcataggtttgacttgaatttatatttatactaaagtaattggtaataatttaaaaaaaaattattaaatttattgtgacttatgacaggtgaatctatctttttattttattttataatacaataaaagaacaaacaaacttccatatacaattttcgttaggaattcaaacaaagtaccacatggattagtaaattaagataaatgagattaataactatataaacatctccatttgcatgattttttatcaagtaaaatcattgggatattaacaaaataaaatgaattttattaataaagtagtacttagagagtttaatcctgttattaatatttgacaataatgtaaaataaacaaaatacattcctcctaaacccaagttagtgtcatcaacatcacttttagtagactccacattgtcataccacaccacatcttattcttatagttgactcttaatgcaattaaaaagatgcataagatgaaatagtgagtgactatatacaatcaattcttgtaaacttagaacaaaggcccctcctttgaatgaaatcatatatataatggttatgtatatcaccttttttttctttaaaagaatttctcttctttttcttctttgctccacattacaagtgtcacattatgggtagtgtgttttatttattacatatatgatgcatgataagtattttttcttcattttaagccatagaaggcaattgggtattttatttatggtctttgcattgtccttatcaaataattatatattcttttatataagtctagtctagggccagtccagctatgtcacagtgtcaaaatatgagaataacatgaatttagtcctttattattgcattgttgtttaattaatacattgcaacatgataatgatgatgtaagtggtcatattctacaacacttacacataacactacttttcattctaaagatggtattttagtagaactttttctttttgcctctaataaattttcaatatgactttttgaattgatgatattattacttattattattattnnnnnnattattattattattattgtcaaaagctcgagtcatttgaaggtggatcaaaataatgttagaaattatatattttatgtaggggtaataatttgtggtcacaaaatcgtgacgagatttaaatattataagtatatgtcaaatacgaatttgtgacctatttattaaaaatatcgataactgaaacctaaatacgatgtgtatataaacaaattaaaccaatcaaattaaatatctcaaaaatgatccatttaattagttagttgtgtcaatcaagaaattaacccaattccattttaaaaaaacttgcatgattatttcatgcgaattttgagttgtattatcgtgtctcatacattttcctattctaatttcatgatcatttctacctaatgtgtgagagagttggcatttgtatataagaagactgcaactagcttagtgcactatagttagcttctccttcttattattgtatcctttgttagatattagtcactgtttattagtatgtgaacttattttttgttttaattttataacgcaatagaggaacaaacagacatccatatagacttttttgttaggaataaagcatggtcggctcaagcatatcacagtttgagccactacataagttcccttatattaaaagatttattttttattcatccatttatatataatataataaatattttttttatataatgtataatatacataataaatgttaataagagtaaatatgcacttagaatttacaagaaataaagatgttgattgtaattttattttggacaatctcacttccaaacttcaaggatagaaagttaagttgaaactctctaaagctgggcgtgcgtgctaccttaatcaaatatgttggattatctatgccaatgtactccatgcagtctacaaagttgtctaacaagatggtatatccagtatggatggcatggcgcgagacttctagtggggttttgagaagggcaac

SEQ ID NO: 29005 - DNA, 2250 bp, Cannabis sativa
aaaattcacatgagttaaaaccacctcaaatttcaaatacttatttataatccaaaaacttctatacctaattagaaatgaccacatacatcataaatatgtaaaaaaaaaaatttactatacagtaacttgattttcatttttcaatcaattatatttattcaaatagagaattatcattttaaaaagtgatacatattttgttccacatattattatgttcattgttaaaaaaaaacattaaaaattacaaataattatatattatgtaccttggataatcttcctccataattagtttgggggctttaacgttgttgaactcaagccacatattggttttcaacatcttcaacacaaagtaccacaaaacaccaaatgaagtaagcacaacactcaaaaagtaaacagctggagtagctgcacacaacacaaacaatagaaaaatacaaggaattgaacacattcctatcaacccattaagctctattggaatcttgaaaggcctaacagctttgggaaatttcactctcaagtaaataaaggcaccaaattccatcaatgtccccaaactataaaagaaattcacacaaaccctcatgttctcaaacctaaaagccgcaaccataagggatatgattgtagacaccataatcccaacccacggggtatcaaatgtgccagagcgggccccgaaaaacttcggtaaaagccctagctctgccatcccgtggagctggtaggagcagctacttagctgggcttggtagagaccgagcccagataagactgcacctgatttgatcagacgtttgagccatgggcccgcgagctcttcccctatggcggcgtagtagccgtctttccaatcatcagggtcgggtttcatggcaccggtagtggctagaagtgggactaagtaagctagtgaagttagccccatggatgataatagagcttttggtagggtttcttcaggtgtttttatctcaccaactaaagtactaacactatcccaacaatttaggttccaaaaaagggcatgaaagtaatttttccactctttattccttccaagtgtgttactctcattccaaatgacaatccatctacccggatcaatttggggaattgctacaaatgacaatactaaaaatggtaaaagggataggccagctagtggtattgagatgtgggcaacaacatgtaagccagtgaaatttattaaagagagaattgttgttgagaagaaaacaacagagtatcgagttagggttttggttaggtttagagaaggagcaatggagtctacatagtctacacaaagacccgggaacaaagctaggtttacaactccactaaggaatttccatgaccccattaggtaaccccaaaagggaccaaaggctgtgtgggaccacacaacaaaaccgccattgttgggaaaggcggtggccagctctgcagtgatgagtgcctctgggatagaccatagggcggggaataagatgaaaccggctatagcacagagtggccccgccgctcccacgatagattcttggccatatggccctccggagacttggaagtagatgagaaaaatgagagggagtaaaggaagtcttttgcttattttttttttcttcacattttgatcatgagtaggctcttcacgatatttttgtgtttgtttctcaagaaaatcttgtgagtttggagatgaaaaaagagggtcttgcatgattggtaggtttgattgatttgattattgtgtttttttggctaactttttttataattgtttactaaagtttacactatataaggctatttctataggtatgagagctattgttttagtctccaaataatgtcttgagttttgtcttgttattatttcttttgagtttaatggtctttctaggaagttgcttgttgattgaaactattttgtcgtttgataaatgattttgttctctattaattagtcataaattatacatatttcgtacaaatgtatagtaaataacaattattggtgtagaggaggttcattcatttattttaataaaaaataataattacatgtaaattaatttatcatttggtcttatactaattaatctatttttttcttttctatttaagcgtttaaaaaatgaaaaatacccctcttgtataattgatattttgaattttaacttattattaaaaaattatttgggtcccttaacatagtgtacttaagtg

SEQ ID NO: 29006 - DNA, 2995 bp, Cannabis sativa
gtaacatgagaaaaagtttgatgatttttatcaattttttatgcattttaaatgttatattattttcattcctattcccattcctctgaaccctgaaccctgaaccctaaccccaacacctaacaccctgaaccctaacccctgaacacagacccttaggtggcatttggttagaggtaatgaaatggaatggaaaagaaataattttcattacattcttttgtttagttttattttaaagtatcagaatgccattccaatagaatgccctttccaccattttggtggaatgaatattctatttcgaaatggaaggaacgacaattatcatgtaacatgagaaaaaaattaatgatttttatcaaattttttatgtattttaaattttattttattcaattctcattcccattcccctaaactagggctgagcatgggttgagttggcccggttgagggtattttaatgacccaacccaatgacattggcctcgaaatttttaacctattcacattctgaatattttataacccaacccattttaccagagataataccactcagatcacaagggttgtggattcagaagtggctctttaaaaattacaatatgagaatcgataggcaaatctcaagtgaaagtgatgaaagagacttagtctcttctacaaagcctagggcatgtagaagagagggagagagagagagaattagggtttcagacttagggcttgagagcttagagagcttgagacttagagaaattagggttaggttagtggtctttatataggagagcttacataagaataataacctaatatccttcaaaaataggaactataaagtagttgttacataattaaataattaaataataaataggttaaatatcccccaagaataggtgaatagctgatatttctcccctattttcatgggttgttgaaggcagaattgtagctttgatttttgtcccgaatgaaggctgcacatcaagcaccttctaggttgcaagctagctggccaagtgcttgctagggtacaagctggctgacccttcatttgttagaggttggttgacctatgctggacatagggtcagctaggggggtttggccgaacccctcaaggtggtcacttcattgtctttttgtcccgcttaagcacccgaacttctcgtcaactaatgtgttgtgtagatgacttgtcttttttgttgataagttgtactccacatggcattgatcttggccacatggacatgccatgtcatgtgggaaaaattgggataaaaggtacaactacctaagtcttgttcttctagagtaaatccatctcctcatccatggtctgaagccatttagacttgtttccactttaaattgcctctttatagcttctgggttgttcaattctagtttgttgaactgttgccaatgcaaatgctattaaatctgcttccacaaaccttgccagagggtgaatctctctctgggttctatcgcatgccaattaataaccttccagacctatctgttcgaacccttccggaacctctatttggtcttctttatcttccaactcagcatcaacttctatctgtgcaataccttctggttccaagctggcttccgtctgtgagccttcttttaggagcttcattccatactccatttccacacttgtagtgtctttatttcctatttttcctacatcacacagggacacactacctttcccggatgacaagtgaggataatctaactcattgaaaacaacatttctagcactcataatctttggtctacccttcttggaaatgtaaattctataccccttgattcctaagacatatcctaggaaagttcccttaatggatctaggttccaacttatcaatagattggtgtacatatgttgtacacccaaatgttctttagtgcattaggttttgggttctgtagtaccacatttcataaggggttttcaagcctatgactcggtttgggcttctatttataaggtaggttgcagttgctagaccttcccccaaaatagtttttctaatctaaaactaaatagtagagatctaactttgtttaataaggtacgattcatcctttcaacaacacgattttgcttcgaggtcttcactacggttctatacctaatgatttcaaattcttgacttgtcttgtcaaattcatagttaataaactccaacccattattcgtcctaaggttcttaattttaagatctgtttggttttccacttgagttttccaatttctatactatttcaggtactcatcctaagttgctaacaagtaggtccaaacacacctactataatcatcaactattaaaagaaattattgcttactggagtgagctagtagaggcactttgtatggcccccaaaaaggttagcatgcacatattcgagtatcttcttagtggtataccttgccagagtgaatttcagcttatgttgttttcctaaaatacaagcttcacaaaatggtaaggcgcaagaatttaaattttcaattatacctttttttgttcagttctttgaggccttgatcactgatatgtatatgtatgtgatgccacaacttcatatctgactttagccctttcaccatacttgtctgtccgtttgggtcagtttctccttggagaacatgtaaaccattgatcttttctcctttcatcactaccaaagaacctttagtgatcctcaagcttccctgaatggatttgtatttgtatccttcatcttcaagcacacctagggatatgaggttttgtctaagctctagaatgtgctttacacttgtcaacaccttgattccaccatcatactgtttgatggctacgttcctagctccaatgaccctgcatgaatgatcattacccattagaactttacctccatcaactaatttataatcaaaaaacgaattttgactcagacacatatgataa

SEQ ID NO: 29007 - DNA, 3021 bp, Cannabis sativa
  modified_base (453)..(457): a, c, t, g, unknown or other
cgccctgatcagcgtcggtagcgaatttcgcgaaaaccgacgctgaaagggcttaaaaaccgcctctaaagggagtttttatagtagtgacctataccactaatgcaatatggtataattttagtatcgatccttaattgttggtactcaaaacttgcaaccataagtagaaaatattttttttgctatttctatctgttttacaacgacatatacaatctttttataggtatgagatatatttcagatctgccatcaacaacaatcgcatatccacattaaacaacaataatactacaacaacaacaatcagagctcatccccaattgcaaccaccgcaccaccacccgtttttgtcttcgagctctttcgcaatccacgttcactatacaaaagaaagaaagaaacccgacaagagagagtaagagaaaaagttgagagagagagagagannnnnagagagagagagagagagttagtacctgcgcattggaggaggttggttcactgtcatcgatgaaggggatgtggactcttagtgttagcattgtatgtctcgccattgttgtacatagagagcaagaaaggtagagagaaagatactgaaagagaagacagaaagaattgtcttattgttattgaatgtaagaatacaagctcatatataatggtcaaaagttaacaactctataaccaaaagttgtagttgtacaagagtgaattaacaaacttttaacaacaaactaaaccaatcaacgaaaatatctaataacttccattacaatcccccattaacttagaattggtacactcacaaataccaaatttgactctaaacatatcaaagtgtgaagaggaaatggccttagtaagaccataagcgacttggtttgcaacatggaggaaatggccttagaaagaccataagcgacttggtctgcaacatggacttagtgaacacaaataagctgttgagatagcttttcaagaacaaaatataagtcgagctcgatatgtttattttgggcatgtagcatgggattagcagtttacaagacaatgctgagattgtcacaccaaataattaagggtcgaggcaaacacacatgaagttctagaaaatagaaagtgcagccatgtaatttcagagacaaatttagctaagctgtgatactcagcttcagtactagaccaagacaatgtgtgttgctttttgcattgccaagcaactagattagagccaaaaaatattgaaaaccctgaagtggaatgcctgtcatcaggatcactagccaatctgcatcacagaaagatgtaatttcataattagcaataggtttaaataacaatccatgtgaaacaatacatcttagataccttagtattcttttgacaacattccaatgtgtgttcagaggatttgccataaattggcatactttgttaacactaaatgaaattttaggcctagtaattgtttggtattgaagagctcccactattgatctgtaaacttgtggattttcaataggatctcctttgtaagcaaaaaaaaatacaccactttttatgagagttggagtaggtttggcaccctgcatttgagacatatgtaaccctacacaataagtctctgatatattttccttgagacatatgtaacctgtctatagtgtgttgaacctttatcccaaagaaatagtgtagctaaccaagatgttttagagacaaatttgagttcaaggcattaatcagagatgagatgagttcagaatcactccatgtgatgattatatcatccacatataccaatatctgtaacagacttaggtgtgtgttggatgaacaagctatgatcatatttggaggatacaaatccaaatgactctaggcagtgatgaagcttctcaaaccagtctctacgggctcgcttgagtccatagagagccttttttaacttgcaaaatagatgaggagcatgaggaaattcaaaccctagaggttgttttataaacacatcttcttttaagtcaccatttagaaatgcattgttaacatccaactattgtattgacctgttttatgctatggcaagggagagaagctccatattatatctaagtggagctagaggaatcttagctaatgtgtttgacaccagtatacgaaaattaaatttcatcaaaaattacatctctagaaatctaaagtcttccatttgcatcaagacatttataacccttatgattaagactataactaaagaatgtgcaaggtgaggatttaaactcaaattagtgcttgttatatggcctaatattagggtaacaatgatagccaaaaaccttgaggctagtataattaggcttaatattgaagagaagtttaatgggagaaagttgttagtaggtaacctgttgtgaagatagatagcaaacctacaggtttcatcctaatatttcaaaggcatagatactttagtaagtaaacttaagccatgttctaaaatttggctatattttctctcaactaatccattatgttcatgggttgtagggcaaggatacctgtgaagtatcctagcttttttaagaggttcaaaaagttctatatgttggtttttatgattcatatcagagtcatattaaaagtgaataatatcttatttattaaaaaatttggtgaatccatctaaacacaattatacatagtacaacactaactattggttcagagatttttacctcttgttgactatcaggattttcttgctatctttttatattaatgaaacaatcatccaatctagtgagacttgttaaagatctcacaccagggttttccaactcagcctcaacactctaagaatatagtgagctattaggtttaattcgaatgaaaataaatttttgatttcaatgtgtactcaactcatgagacactgtgattgagattggaaaaatacacaatcaccctcaagaaggagttatgtatgagcaaaggtagagagagagagagaga

SEQ ID NO: 29008 - DNA, 1095 bp, Cannabis sativa
taaagatgacgatcctgaaggtgacggtgacaataaggacggggaagggtattactatgaactagatctcgaattcatttgaatggctaaagaacttactaaaaccaaaaagaagttgagggatcaagaagaattgtcttgtcaaatgcgagaaactctagcaagattggaggccagggaatgtggctccagatgaaaacattcctgatgaacttgctccttaggaaaataataatacaaagaaaacaaatcctacaaaccctagaacttcttatcccgcgaggaacaagggaaaatgtgtcatgggagaacctacaaaaaagattgctccaattgctccacagaataacatgaatgctgccaaccaacctatgcagaaaaagaaggcagctaatgctccagagcaaggccacccgattgattcgcaaggtaaagttgcgcgaggggataggcctagtgctcaggtagaaaggcctaccattcggggatggaaaaattgtcctagaattctgttaactagagtgatggattagacaaagttcaccaaattccagaagatagtatgtaaacaacggaccttcaagaacgcttaaatggaaagaaagatcgagatagaggcgagaaggcaagacctcgcaaaaaaaaatctcaaaaatcacatcaatggtagagttttttgacatgaattcctagacgacaacactaaatgtttggaagaccaaatagctgaattgaccaaggtcacgaaacgtcttgcctggaaacaaagtggggccatatctaactcagaagaagaagatccaaaaccatatttcttttaatttttaataatatttagatacttctacaatacaccccttaaaagatatctatctatgcaccccaatctatttaggcatctgagagaattttttagtttaattttatttcatggtcatttatattgtagttatttaagatattatgtaaaattttgagagatttagaaaaatttaacacgcctaaaataagatttaaactatttgttgcacgagagagtcttttatttataagcgtgtgaaatcgattgtttgaaccctataattgacgtgttaa

SEQ ID NO: 29009 - DNA, 4637 bp, Cannabis sativa
  modified_base (1135)..(1138): a, c, t, g, unknown or other
gtttaggtagttttaccaccaaaattttagattagggggttagttgtaaaaacatgtccacttaaaggggttttaccgcaaataacccattatatcctttggtatttctcctcggtgcaattctggcatctaaatttgatactaattattattaattcgtacaatatatactggcacgttgaacaattatatctcaataatatttaaagtaataacataatttacatatctaattatactgtttatagcacgtgaattctattcggagaaacacctagctaaaagagatccatgatgattattattattattatataaatttgagttgttttaaaatagtttgtacccatccaagattgatggcttttcttttgttcttaggttggtctgtttgtaagttgttttctagtgtttgttgttttgtcatctgtttctaatataaaaagaagaagaagaagaagaagaagaagagaggtaattcgcagtttgtttatgtgaaaaactacttttgcttatatattaatgtttgagtattattgtatataatatatattataattaaccacattctttttaacctttagatctgatctcttcagcgcacaaacattgtttagtatgaaactatttattaattaatgtttgtttttttctttcctttttactttatactttatgtacagtagcttttgctcttcaagtactgttatacacaagttattgaatgttcttgatcgactcaaattaagctcatttgttcataactcctggcttttccaagctaatttatatttagaaattctcgactctactaggtttatccaaggactaggagtagaaaacaattccatctttcaaatgaggaactactatttatcatcccaatttgttaaattattcagtaaatattcctagtcctattaagatgtctactttagagttttgtatagtatagcatctcaaaatataacttttagtctttcacatgcaaatttctctattttggaatatataaattaataatggtgtgtatggttattacacatgctcatattttatttctttatgtatatgtacacattgcattgaaacattaattgactaatctcatctttcactctctctctctctctcnnnntctctctatatatatatatattatatgttcagagctgtgcttcttttaccagcacaagggtcccattgttcggtggagtccagagcacactggaaatttggtcaccccttttaagaatgccttcactatatataccaaaaaaaaaaaaaaaaccagcaaaataataataataataataataaataacagctaattattatatgtgttaattatgcacatatattataagtatgttctatgtgatactgatacataatagggtatgtttctacgggtacattttttgtgttctattttttttttattttttttttattttttttgagatttagataattttaatatatatattttgagagaacgatcttaaaatcttgagtaaacctaatgagacaaatctcaagaggaaaatgggcctcaataagagtctgcatgccatgagctaataatacaaaggtagcctaattccaccacacaaaataatcctttaaaaaacagaataagtcttgctaaaaaatgagccacactattagcaatttgaagacaataagtaaaaaaaaatcactaaactaattacaaaaagatagaatatatctaataatgcaccctaaataaggcctatcaatatataatcatgtggtgatgagttcaacaacaatttcagcaagcataaaacacaaataaccaaacctgaaatcaacaataattgatttgcaagaaattttgcaaaatgatagaatttaaacaacacacaaatttagagaggttaaaacttccttcacaaatttggagagcctaattttttttgaattccctttactatggcaatgacaaatattacaaaacaatggacaattaaagaatttgagaattaagaagatgtttaactccccttggaatgagtcttaaaccagagatgaacacccttggaatcaccttgaagaatgatcttcttcttcacttagattctcgatttggttcctcaaaactctcagatttccctttctcaaactaagtaatctaacctcaccatacattaatctcccttctctttttctctctctgttttctgtgtacgaagtgataaaagactaggactctatataggctaccacaagttggtaagcatttacaaattaaaattggttaacaaactaacttaactgaatgtctaagtcaatgctaaagtgtcattgtcccattggtctaagtttttcatgtcattttaatgtgatgattttagttaggacttattttcaacaaattctaccttagtactaaataaaaccatgtgaaagaaacctttctcaaatcgttgtttagatctttaactgtcttaaccttcctcaatacctagcagttctaataagtgttggaatttgctaagtggaactatttttgtacccatatcatttgaattttcgactttataccttctcagtgttcatctgttcttgagttattttttctcttatgaaatgctatttaatttcaatgtgttttgttcgatcatgaaacataagtttactgcacaagtatagtgcattttgactgtttgtatagacattttccttttccttgaacaagttcatttttttctagtgcaccttgtatccatagttctccttttttgttctttcgttacaactatatacttagattcaatggatgatatagagcaaccacatgttgtatttgagatttctagcttacacaattaccaaaaacaagaaatgtgtaagatgtagttgattttcttgaatctttgtctctcaaaaaatctgcatctacaaagccttccatctgaatcttgtcttgattcttcttaaaacaaaatccaagctaagttgtgacattaatgtacctgagtagccactttattgcaaccaagtgaagttttcctagacttcccactcaatacaattattgcatatgctaggtctagtattgtacaaatcctcgcatacatcacagaccccataacatttgagtatggcacttctccttcatctatttcttgtccttatcagtgtttaggcattgtttatttgatatttaacattagcttaacaaaggcattgttgccttattagaaccactcatttgaaacttatcaatcacctttttctaggtagtcgctagtttttactcatgttcctttgaatattgattattagaattttgctagcagcccctagatcctttatgtcaaattcttatttcataatttttttccttccatcaacctttgacttttcctttctcatctatacataaagtaggagatattcatcctgtaacatttcattgcctttgtagtataaatatgtgtcatacatattgcttcttttgaacccatgttgagtgataaaggcattgaacattttattccattgttgtggggcctgtttcaacccatacaaaaatttcttcaagagacaaacttgatcctggtctatctttcctagtaactttcaggttgtttcatgtatattgtttcttctaggtctccatgcaagaatgtagttgtgacatccatctgctccaattctaagtcatactgaaccgaagacaacataatccttattttcttgtatttcacaacatgtgcaaaaaattcattaaaatcaattccttttcttgttggctaaaacttttgcctcaagtctagccttaacccttggcctttccccaactctaaaacctgatttgtgtttatagatctatttgcagccaattaatatttttcccttttgtatttgaactactatccaagtcttattcttctttagtgaccccatctcatcatccatatggccttgtcccaatattttgcttcttactctgaaacaacttctgagtaagtctttagttcaattttttagtatttttgttgcagtgatgaatgcattgttgggattttatatataccctaaataaataaaactcattttaatataatcaaattgctatcaatagaagattagaagtcatttgagttaacatattattttcatgattatagtttaatatacaatttccgataaaagtccataacatatatagtaatttacaattacagtgatgtcatcacagtggaaaataattgtaattatatgcttcaaagttttgtggcatgatttatcagtgcactggatttatactggcgtgataatcaacgataaattttacttacacctttgataagtggcatgtcctttccaaggtattggtaaagtatactagtatgggatgcatggagcatacatcaaactgtaccgatattaaacttagataagatatcaagaatttaatgtaatatttttctaagtcaatatcacttagttgatcttagattaatagatcttaatcctgagatagttaggttctgcttcaactgtgttatttgtgttgtttgacttgttcgttaaagctaaccaattagattggcccaatacttacatcttgggagcatggtagtacaattgagtgggagagc

SEQ ID NO: 29010 - DNA, 1852 bp, Cannabis sativa
  modified_base (26)..(46): a, c, t, g, unknown or other
  modified_base (1360)..(1369): a, c, t, g, unknown or other
acataaaatattatttctgatctttnnnnnnnnnnnnnnnnnnnnntattgaaatgagttttatttcgggcacaaaaccaaccaattacatccacgaagggagagttagcaaagctattgggtaaactctttttgattggtgtggcactctagcgatgcgatggatcaaggcctccatctccaccatcctacgtgctaatcctaagtcaaaagtgttctcatgtggcattgtttttcctgcaattgtagaagtagttagtaatgaatcagttgtaattgatataggacatacttcccccgtagactggtgaggttggcccagaaagttgaacatattagcaaagtttgtgtcagttgacattgcgagggtgacgccttcttgttgtcgactggtgtcactctatataaaaccagacgtcatatttgttgtagctggaggtacaggtgggttaactccattggtttgagatggaatgtcgaatggaacgctactgttggtcataagaactctagtcgacgcatgatgttctccaattggttaactttctccgtgctgacttattgagcctaccattgtcgattatgggaatacaattgtttgggtcacattcattagagtcaattccaatgattgcattaggttaattggaactctcaactgtgagctttggtccagtggagtggccatgttggttgacattgactccaacttctctttcaacatcttgtttttcttacggaaggtttgattatcctcttcaagcgcttagactcgctaaacattctctcgcatttgagtcatgagttgagcaacttcaggttgatgttgatttccccttcttctatgtcttccattgtattgaatgcctagctttgttgtttaatcgattgtcaaggccccacagcgggcgccaaattttagacacatggatctataattgaattaatcgaaagtgggcaccgacaacctgcacacaacaaaagggaagtagaccgtaaagtttttgggacaccgggatggtgccagctaaagagacttcgatggtcaagtcagtaatgtagttcttaacaagtagactgaaaataaattctaaaatattgtgagttgttaatgaagattctattataataatgataatactataatctagttaattataatcacaaatatataaaaaaattataatatacaaaatttttattttctatatatttttaattattttttttaaatagtataaatttatatgcacttgataaaaataatttataatatttttaaattatacttttatcaattgtaaaaaaaaaaattgtaatttataacaaactctaggttgatattgtttgttaataatannnnnnnnnntataaaatattttttaaaacaaataaaaaaataaaaaaattaaatttattttttcttaaaaaaatatttttaatttttataatatataataaataattaaatagatttttagtataaaataatttattatgaaactttttagcttttctaaatgcttggtacatattttttttttttttttgaaaaagtttcagttttattaattaaccaaatcgacaattaacaaagagtgaatgtccataggaatagaaccttcaacaaaatgacaacctgaccaataacatgagtttctcgcaacacagtgcacaactctgttagcagatcgtttaacataacaaatgcatttttatcacaattttttttaaaatagattttaacttttttggccttcaattagccgtgatcctttatttatatataaaaaatgtgagccacatattagggatgctaataaaaaacataatgataattagtatgagattt

SEQ ID NO: 29011 - DNA, 3857 bp, Cannabis sativa
ataattaaattaaattggtgtatatttaaataattagatgtgataaatggtgaaattagaaaatacatatttgtttcattaaatcgaaatacagtggcaaaaatcaaaatccatgggccatcaatagtgatttcaaccgaggcttggattttaggcccaatactctttattttagcccatctcatctaatcttatcctagtgcgaaagctatataaaaaaagagatgagagagatttgtcgattaagtcatttatgtgattcaaccctaaatctgataagaaaagttctcttcttcttctctttaattttcaaaattattatatatttttctctttctctattttgtgttccaaaagtgagttgagtaccagcccatactattgaaggtggtacgcaggtcttttgtggaagatcgtgtagaatttgttacatgtcacatattcaaggaaaagaagattcgagttcaatatttaatgatactctactacaaaaaggattcgagggttagaatactaaacgaaaagagccagctaccatcattgtaaggttttttaatctcctatgagttaattgaccgttttatgtttttcatattttaggatgatagattatttatttgataaccaaacatacatgtcagtaaattaagatcttggtaaaacaagctccaacaactaattctcgggaggaactgccctttggccaagctttattcaatcttcaaaatggagaacaactaagaagaatacaagagttgagctcattaacaatggtgtcttgcaccttacaaatcaactcacttagagaaagaagtgatcaaacacacacatcctctttaaaaaccctcctaattcattacaagcataattatcatctaaattcctctctagatcgtcacctaaagaagtaatacaaaaagccttatataggcaactcaaaggggtacccgagttagttaattgaaatttaactaccttgggagctggctggacaaacctgctccatctaacaggtcactagatgagactagcacagtagtacaccaagttactaaaatctcccacaaatccatctattttagtcacttggtaaaaggtatcattgtcttcctttaaagctttgactgttccatttgttgtgcctctagaaacataggaattttagtgctattcaatgtttagaaagtttgggcaatgcctaaacttttctcttgttacacacttggtgaacatatcagttgagttctcattggtgtgaatcttcttaattgaaatctctttgctaccaatgatatcgcttataaaatgcagcttgatatttgtgtgctttgatcattcatgaaacatgagattcttcatagagtgaataacactttgattgtcacaatgaataatgagttgatctattttgataccaagctcatttgtgaaccttttaagccaaatggcttcctttatagcctttgttgctaccatatactcaacctcagtggatgatagagaaataaccttttaaaagttagacttccagctcacacaacctccaaacacatttacacatatctagttaaagattttaaagtgtctaggttagaaacataatccgtgtcagcaaaaccagtcaacttttctttgaaattacccagttttccttgtactagactagcgttaagagtccctttgatgtacctcaatatcatctaagtttttttctagtgttcttctctagggtatgtaatgaatcaactcattaaattcatgctatgtgtcaggccaggtctagtgtagaccatggcatacatgagactacctactccactagcataaggcacattgttcgtctttcttctttctgtctctattttgggagatttctcttgagacaatttgaagtgctgagctaaacgagttacaactggtttagcatcagtcatcctgaatttctcgattaccttcttgaggtagctatcttggcttaacatgattgtatggggtttgttcctctttatctcaatccttaaaatcttcttggccttacctagatccttcatctcaaactcactcttgagttgagacttaagcttatcaatgttggtcctatccttactaataattagtatgtcatcttcatacaataagaggtaaatctgattgttgaaatacacgcaagtgtcataattgcttctggtatagtcaactttcatcatgaattcatcaaaccttaggttccattatcttggatcctacttcaaactatatagagacttgtttaaaaggaaaactttatctggatcatcattctcgtagccttctggaatctacatgtagatcttttcttctaaattcccatgtaagaatgcaattcttacatccatttgatccacctcaagatcaaattctgtaactaagtaatgaattattcttattgatgttcacttgactactggtgatcccctctctatccctagccaattgatagcctcttagggttgtttgagcatcttttatggttttagattcatctagaatgtcttctgtttcatcaattacaaatttggacattaaatccaccacaatctaaggtcagctactctaagattcttgagcttaagtgatatttgtcttctttacccgaccattttttcttcattaaagatgacatctctgctaataatgcacttcttgtagctaggttctaaacaccatactttataccccttcacaccatcagaatagcctagaaacaagcacttgagtgctctaggctaaagcttgccctacctaatatgaacataggcagtgcatccaaacactaaagtattccaaattaagtacttgaacaactcttgtgatgtcctaaaattcaatgggacaaaatgacatctatttatcaaataacaatctattttgacagcttctccctgacatggtctttcaagacctgctcctttgagcatgcacctctctctttgagagtttaattcatcctctcagcaagtccattgtaatgaggagtgtcttgcacaataaattcttatctattttatggtcttttcaaaattcataaaactggcttgagcaatattcccaaccatttttggttctcaacttcctaatcttgcatgtggtttatttttcaaacagtttcttcaatgtgataaagctgataaaagtctcatctttgcttttcatcagaaatacccacactttccttgaataatcatctataatactgatgaaatagccagcaccaccaatggttttaactctggaaggaccccagagatcataatgtatataggccaacctctccatagtagtatgcacactaatgttgaacttgattctactactcttaccatatacacattcattacaaaacttcaatttccctttcagtccaccttgaaacaagcctttcttgtccatttcaataagccttctttcactaacaagtccaagcctcaaatgccaagtcatgatattttcaacatcattcttaccaattgcaaaagctgcttttccaatcactacattccaaactagatagtacaacttatttcttaacttcctcttaacaaagatcaaagaccccattgaaatcttgtgtaacgcccgtattttataataataaaatcgaaaattaattttagtaatttatatattaataaccatatggatcgggatcccgagtatcaaaattcaagttaaaagtactttactattacatattttttttttaagatttgtagacatgcatcttcaaaatacagactcaaaataataaaagaccgaaaccctccgggttgcactgccgcgatatgtacaatcattgccgagctctgcctcactgttcc

SEQ ID NO: 29012 - DNA, 1664 bp, Cannabis sativa
ttattaaaaaataaaactaatactgaaatccaacaatctcaatagtttagaatcattttgaccaatcttaaaacttgtataatttcctacatgtcaaagttgagagggcaaaaatattaattaacctaaaaaaaaataaatttttaataacttttaaaaaatacttttaatatttttatgaaagaaatttctcacattattttatgtaaattttaatatttattttaattttattttcatatttttttctaaatcatgttatattttttattgttttctaagaaaatttcatataatttttatttaatttttttatcataatatttaaaatataatttgttatactcgaaattcggctctacttcaaaaagtgacacatgtcaatctcgtggaatgtgaaccaacatgtataataacaattacatcattaaacgcaaaatagaataacttattaaatatggaattaatagagtatattcataactctgattgtaaggtcttaggcgagacaaggatacactaactatcaattcgtgtattgacgagaaactatcttgcctcgaaaaagcataattctgagggagctatggacaatgcatagcgagacatctaccttgctacatataagaaagtatcgactaggcgaattggctgttagaacacagtgtataattcacattataataattaagtataacagcttggaaacatggagaacatgattgtccagtctgtaaggccttatggtcaaagagcagttcttaagtttgctcagttcactggtgctcatgccattgttggaaggcatatgaataaaccaagtcattcatttatgtacaaagcgagatgcctctagcgagatgtgttatatcccacgtcagtgtccactaccttgaagataggaataacaaatggtatacgaatttttaactatacacatgttaaattgggatgtggtcaaggcccacgattcgtgaaacagctatgtatttcaaattcaaatgtaaataactgtcaacctatattcctataaataggggcagattatacagaaaaaagggacgaaaaatctttaagagagagatcactgattgaaaacccataattttatacctagaaatatcttaataagattgactcgtggactatgcagagttaactgcaaaactacgtaaaaaaaaacctggtgttactattgctattattattcttctcaagtttcttatagtttctgtgtttaatttattacgataaaggcttattagttagttaacgaaaatttgtgttaatagtttggtgctttcattgagagagcatacgtgataaaagctcagaaaagtccctcctaaccaactagaagtttatccatggctgatgataatcaaaacaatgatagtcgtcctgaagagactaatcgtcgtcctgggaaagaactaatgggttcacagagaccacccacttcaagaacacgatcaacatgttcaagaaggagccaacatggtcatgatcaaaagccaaaaactgggaacgaggaaaccaatactaatactggtggttatgtacctagaagtgaggatgtctatgatcccactaggtatgtaccgttagttgaattggaaaatcgacaactctagcaacgtttggccgagtctaaccaacgaaac

SEQ ID NO: 29013 - DNA, 2134 bp, Cannabis sativa
taatttcattaatatttttgacagtgaccctatagatcatcccatagttctcttcctacgattgataaatcagttattattccagtctagagggttgtcatctgaatactatcattcaaatttctcacttttgctgatgtcgtactgaagcgactcaggcaagcctttagagattcttcagttgttgcttgatgttagtcagtgagaatgcctttagccttctgtccctcccagcctgaaattatttcttgaaatccttagatagttattcccaggaggtaatggaatggttggtgaatttatcaaaccaattgctcgctactcccgtcagagaagttggaaataaaatgcaacgcaagttgttagaaacattgcttgctcgcattattgtgttagaattattcaggtgtgccacaagatcatttgtcccatcatactgcgcgacatgtgagttcttgaatccttaagggaattgataatttaatataacacaatgaaatggatatgtctcttcatctgaatcacatcctaataatttcctatattttccatctcggtatcgcctaaacttgtcttctatctgtattactcttaattaaatcagatccataggctgttgctcatcttgttgctagagacttacattttgattcaaccagtctcggagatttggatcattgcagttcaagtgctcgtgcaagtccggttgtctacggtttagatgttcacatagattagggtcccatcacctttcatttctctggtcgcaattgctaaccaacctagtagcagaatcattctcagattgataactttaagaattacttatgctttctggatcaccttgctagtggcaatgtgtaccttccccatcttgtgtttgcctctcatgtacatggattctagccgacctgctttgtccatgagtcctttatctcgacccactaggatttgtacttgaccctgtttcctgatgttcttctcacattagcctttgtctttgaagtagatttgacatgtgtcccctacttaagtaggtgtacgtgttgtctctatcattttagtttggcctttacgagtgtctcagtggtcgacctatactaggtcgatcgcctacacctctcgcatcgtgctaagagaatctttgactcataggtcgtgtttgtttggcatttgcattcatgcgagatgactctgagtttttaggttgtacattcccacaatttacatttccatgggacgttcttaaatcgttgggttgtttttctctatttctagtgttttgtgaattttgggggttctctttatccattgggatatcccttgtgtttctaggttgatcatcctaagtatctgtgggatttataggattattccctctaggggcatccccttgtcttctggtcttagagcttctgggtcttccctgaggttgtttagttgatgggtcgggttggtttggaagggcatcactgcgtgcagcccttgtggttgctgcctcgtgctccaattctgcatttcttccacttgacttagccaatcgctatcaaagttgcctattctccagttccactaatggaacatatctagtaagatcgtaggcatcctcactttgtctttctgggatttcatccccagtatgctcaaaatttccaccatttcttctcccagagcgaggagtctcaattgtattcatcctatgagaatgctaatgttctttccatggacgctgagttgtttttcctggttaactctctttgttttgaggaatatcatttgccatggatggaaagttcgaatatgttccaaggagggtattttctgagttttttcttacaaggctctcaatgaaagtaccaaactgttaacatagattttcgttaactaacaaataagtttttttttgtaattaatgtactcagaaattaaatgaataacgataattatgattacagtaataaatgacaagataatttttaacgtgattttgaagtttaactcttcatagtctacgagtccatcttattcaaagatttaagaaattggatatagaatacaaatgatagataaattgtatacaaaatgaaagacgaatattgttaggttatttttagtattaattttagattaagtt

SEQ ID NO: 29014 - DNA, 2518 bp, Cannabis sativa
  modified_base (44)..(60): a, c, t, g, unknown or other
taaatgttatttctgatctatactaataagtaaatctgattatnnnnnnnnnnnnnnnnnttaggacataaaacccaacagattaacacaacaataatcaatctgaggaaataacccatcaccctaacaaggaacccatgggatctcaaagacctaacacctctgaaacaccacgttcaaggagaaacgatggtaatggtgatcaaaatccagaaagaaggagcgaaagtgccaataactctgccagatacgtgcttaggagtgaggatgcttatgacctaactaggtacgtaccgttggtggagttcgaaaataggcaactttgacaatgtttggttgaatcaaactgacgaaatgctgagttggagtgggaagctacagcagccagggctacacaagggacagttcctcagaaccaatctgatcctatagtaagaagaccgcgaggaagacctcaaggctctaggaccacgaggccggaaacaaaccaggggaatccccaaaacacccaagaagagcaacctggggatacaagggatatcccaatggataatcaaacaaatcctaataatgtaaggaatcaagaacatcaacgagatgttccacaaaatttccatggattttctaaccaagggaatgaacgaactgacatgtcagaagcatctcacatgaatgaagaggaaaggcagccttgacaagggaattagagaatccctcgccataatgagagaaaccctggaaattaaccaaggtcaagtggacttcctccaagacatcctcaacgtccttctcaagcagatagagaaaatgtacacacgtacttgaatagaggacgtgtttctaatctcttacaaaggaaaaggccagtgcgagatgaagcaagctcgagcactaacaatcaaggtttcgaggacatagtcggtcaggtagacaaatgtgagaaggaagtagatcttgatgttattatgctaactgagaatgtataagtaactcatgaaattatcaatccgagagttactcagagacaatatctataagcaactatgaacaaaggcagactgaccttcgtgagcacctaaatcgaagacagcctgaccttcacgagcgtctaaaccaaaatacaccttatttgcaccatcaatttaaccaaaatgaaaattagcaacaagtggatcacgtccagctacgaataatttaaatagaggataaattcaaaaaatatcaagatggagaacatggtaaattgccaggctacgactcagatgaagaaatcgagccattccatccagatatcttaaattcagaatttcctcagggatttaagaacccacatgtctcgcagtacgatgggaccacagacccggtccctcatttaaatgactttaacactattatgcgaccaagtaatgtttcgaataacttgcgttgtattttattcccaacctccttaacaggggttgagagtagctggttcgataatttcacccatcattccataacatcctgggaacagttgtcgagggactttaaaaagcagtttcaagctgcaagagaccgtcaacttgaagcatcgtccttgaccaacataaagtaacaccgtggggagtctcttaaggcatatttaagtcgtttcagcacggtcgctaaaaaagtcagaaacttgaatgatagtattcaactaataacacttcaggcaggaatcacatctgacttatccacagccggaggtgaattatgggatgatctccagggtcgccttgtgaggaacattaatgagttcaatgaaagagcacaagtacttatgcgtaaagaagaagtgaggactgaaatgaagctgttaaaaattggctcgggaagcaaacctagcacaagtacggcaatagcacaatcacaacaaaagtagacaatcctggtggatcgaacacaaaaagaaaggatgactcaaaagaatcatccaagaataaaaagaaattgaaaaaacatgacaaatacgtatcgatttattcggtatatactgagttgaatgaaactagctaaaatatcttcctcgctaatgaaaatagggttgcattttgcaaacccgagccaatgaggcactccaggcacaagcaagattcaacaaaataccgtcgattccataagcatatagggcataccactgaggaatgccgacaactaaaatatgagattgagagtttgatctcgcgggcatactttaggcagtatgtgaaaaatgaaagaaacaagcctaaccagcctaacaacactaataactcgaacaatcagagattgcaacctccccctgttgagggcgaggatatcttggtaattttgggaggtccacacctcgtaggaaatagtaataatgcccaaaagagatatataaatgaagtgaaaaatgaaccatcggcatttgctcttgaaaaattaaagaaagcgaagtcgaatgaaccaccaattatcttctctgaagaagatacaaaacttgcactttatatgtgtttaaattccattgttt

SEQ ID NO: 29015 - DNA, 4580 bp, Cannabis sativa
  modified_base (512)..(524): a, c, t, g, unknown or other
atctttgttcgttgtggtggagcactcagaacatatactgtacaaccgaaaattcttagatgagaaatatttggctcctgaccaaaagccaattgtaatgagaagaatttgtgatatgataatggcctaatacgtacaagtgtcacaacatgtaaaatagcatgtgcccaagctgaatttaggagttttgttctcataaacaatggtcttgcaattatttgaaggcttttaatgaatgattatgctagaccattttatgtatatacatgagcaacaggattttctacttttatccctattgacatacaataatcattaaaagcatgtaatataaattcaccagcattatgaagacgaattgtcttcattgcatagtttgggaattgttctcgtaattgattatttgagcaagccttgcaaatgctacattatgagtatataataagcaaacatgtgaccatatagttgatgcatctaacaataccataaaatatctgaatggtccacatggnnnnnnnnnnnnnccacatatgtcaccctgaattcgttcaagaaatccaagggattcgattccaacttttactggtgatggcttaatgattaattttccttgagaacaagcagcatatgagaactcattggataatagaatcttctggtttttcaatggatcaccatgtgagttctctattattctacgtgtcatgattgaaccgggatggtctaaccggtcatgccaaacaataaataaatttgtctggtttgtgaactttttgttcacaataacatgagttttcatattgtacttatacatgtaacgtacaaacctaaagacaaaccaggtaatttttctaatatgtacttttttcttgaaacaatagatgtaatgcaaagatactcaaaattattttcatctattttcccaatacgatatccattacgacgtatatctttgaagcttactagatttctttttaatttggtggataataagacatcatctataatattttttgttcttctaagcatcaataaatggctcttttgaagccttcaattaaacttgtagtgcctcatattgtattaacatttgccttcattcttgataaatttgaaaaatatttatcacttctaagtattgtataagtggttgcgctatccgccaaatatatattctcacctttatttgtggaatcatatataagatgacaagtattcattacttcattaaccaacaaaacaaaaatatatttaataagttcaaaatataaatacttaaacaataaaagttcattacataaacaccctaaataaaatagacaccttaaaagcttacttctaacaaaaagccctaatcatttgctaaatctcaaaataaagctaagcgatcattattacacagttggagtattaaaacagatttatgaaaaaaattaaaaaaagatctcatttggaagcaattcagtgagtaatgatgtattttaaagacaatatagattatggaattctatacaattataatgaagtgatcaagtttattggttattgtgatgcaaatttttctgaaaatcatgatacttgacgatcaattactgaatatatgtccaaaattgaaactggtttcgtttcttggtatagcaaatgacaaccacttatatgtcattatcattcacagatgtagagtatagagcaacagctatggaaacacaagaaagcatgtggttgatacaattataaaaagatttacatatcaaccactcaactactcggtaacattgtactatgacaatcaatgagcaatttgcttaacaaaaaatctaatatcttatgcaaaaacaaagcatgtgaaagtgcactatcactatctgagagagaaagtatacttcaagaagaatagacatgcaacaattcaacatagataatcatatatcttatgattaagcacaatcaagttttttcatgatgggaagctgcctaaatacctcaatgaaactgttctctctcttatacctaagaaagataacccgacaacaacagctgattataggcccattgcttgttgtaataccttatacaaatacatttccaaaatgctttgttctcgtctgtcagaagtgctccccaaggagcgtttatcaaagatagattttttcaagacattctcaatgggtatactagaaataatatctttgctacatgcttcctcaaaatagatctttgtaaagcttatggcacggtagattagcgctttgtttcaaatttactcaagggtctttgtcttctagcacaattcattagctaggttgtggtttgtctaaaggggacttcctacttgctcacgatcaatggcaggctccatggagctttcaaaggagagaaaggtctttgccaaggtgaccctatctctcctttgctctttgttttgattatggaatacctaactcgattgctactccaggcttcagaggccaaagctttggctttcatcctctttgtaaagaagtgaagctaattaatctttgcttcgctgatgaccttattatcttttgcaaaggtaatttcaactttgtccagatcattaatcaacctattagcagattctgtgcagcaacaggccttgctataaataaggacaaatctcaggcttattttggtggtatcaaggaggattacaagaattttctcttagacttgatcaatatagaagaaggaatgtttcccttgaaatatttagggttcacttgagaccaacaaaatggaaagcagctgactgtggtgagatcctagataagatctagaggaggctccataactgggcgagtaaaaatctctcttttgctggtagagctcagcttattcattcggttttactgggcatccgcaatttttggatgagtatatttttcctcccgcaaaaagttgttgcaaccattgataaatactgtagggactttctttaggggtatgaaggggaatcgtagcaaacttcaccttgttaattgggaaaaagtttgtctccctaagagttatggcgggattgggttctatgaagggagaaaatagaatacttctttgatggccaagtttatttggtctaccttaagtaaacaagacattttgtgggttaagtggatccattcagtctatttcaagggaaaagatttctggcaggctctgttaaattggacgccagttggtacttccgaaaactcttgaaacttagagaaaaaattgacaaagatgatgtttatgttgctgttcagaagggtaagtttagagccaaaattttctatacttctctaattgctgctgataaagtggagtatgcaaataatatttggcatagaatgtgtgttcccaaacatcgttttattgattggcaagcactgaacaaccaaatcttgactcgagataacttgtccaaatttattatgtgctcccctcgagcaattttcccgtgtgtgatgctgaacccgaaactcatcaacacctcttctttggctgtgagttcactaaaaaagttgttaatgagatcaaaaagtggttcaacaagtttgtgtggcctgtcactttggaggaatggaattgccggtgtaacaagaatcaatatgatttaatatccacagttaataatgctatgatttctgccttgataaactatctgtggtgtaatcgcaatcaatgtatctttgaattagtttgttattcagtcaagatggttagtttatctattaaactagccattaaggctagaattagaatgtggaatcctcaactaaaaaaataaggacaaaagtacttgaaatgtaatatgtgacttgtagcttggctgtttaggggttgtcttcttttgttcaactacctttgtttgtattttggattttctttccaaaaaaacaaagtttttaaaatttaaaataaactaaatctcatcaactaagaagaagcttgaagagactaaatctcatcagcgaggtatgggtctgcattttaatcatggggatgaggattttggtagctggtttgaggatttctgtaatactcatttggctgagaatattgataagctggcaatgattctttggagtgtttgggggtcccgtaatgatttactttggaatgataaggctacttctgtggaaaaagttgtttcatctgcaattacgtaccttgaactttggaaatttgctcaaattaaaaatggaggagtttcttcttctaatagtcagccccgggctggtgttgagcattggattaaaccgtccttgggagagttgaaggctaattgtgatgctgctcttttttcaagagagaggagtcatgggttggggtggattgctagagatcatgcttatttgtgttttgctgctgctgccgtcaagcttcaaggtgaaattgaccctgttgttgttgaggcgttgtcaatgaaagaagcgttgagttaggttaaatcatgctgggaagaaggcagtgctgctgtggattttcgtcctacagcggtgattatggagtcggattgtctcttgttggttaatgctatcaatagcaagagccaaattctttctcctcttggtcttatt

SEQ ID NO: 29016 - DNA, 1158 bp, Cannabis sativa
  modified_base (892)..(898): a, c, t, g, unknown or other
  modified_base (1111)..(1116): a, c, t, g, unknown or other
tctaaatatttacaaagattgtagcattataataatccttggaagttttgaggtctccattttcatagtgggtaagttctctacacttcctcttgcaattttcttgcattgatggtgttcttgactttgaagaacaccaagaacatgaaaatttcatttttcctccattttttccaattttgattctcatgaaagtgatacaaatgtgtttgtggagatgtggtatacttgagaaaatttgatggattatcatggtgagggggtatgaagctcgaccccccttatcgaccactaccctgagatacccccattgagggtcggggtatacaacccgtgtgtaggacatggcaaaatggggttaacacaccgaggccatgatatccctgaggtgggggagtttggggtacccgctagcttgaccacttttctttttctttgttgtttgaagattgggtcgaggatggaggttgggggtgtgaccacgagaccactatatgggcgtcgaggtacaccacctgaaagtcgactcgtggttgttagggggtatcaccccaattttctcttttttttgcttggaacaccctaagcttatagggtcgaggacacaccgatgctacattgtagccaaaccccgagggtagtgtgtcggggtgtgccccgagatgaagcatggattttttcacctcaagcttggagggtcggggtacacccgagaaagcttcccttccccatttttcctccttttttctatgtatgagccgaggttgtgggttacacacctcatgactgttgggctttgtgtcctaaataaaatactatttcaatgtaatcttttctattcatctatcaataaagaaacagattcatttttcattacttgtttaatgtgttnnnnnnntcatgtgatcatttatatgtttatttgatttataaattcaaccaaatccttgtcacattgatattcttgtttattgtgtcgtcaacacagtagattgtaatcaatattatgtgatgtaatcaatattatgtgattaaatgtatgcctatgatttatcagtgtacaaggtttaattgataggataatcaacaatgtagtttacttgcaccttgnnnnnntgttatgttctttccagagcattgattaaagtaagcttgggt

SEQ ID NO: 29017 - DNA, 2456 bp, Cannabis sativa
cttatgtctctgcatcatatctcataaacatattgcctacacctataaacaactaactatcaccctatgaaaagttatacaaacttgcaccagattacaacattgttaaggtctttagatgctcttgtttttccctcctaagaccctatcaagcacataagatatcttttagatccttaaaatgtttgttcatatgatatagcatgaatcaaaaagggtatagatgcttacatccaagtggtagaatatatgttgcataggagtgttcaatttaatgaatctgaatttccttacaaaactctattctccacgaataaatccaccactattccatctgtcacaattctaaatcccaatgattattaaattccctaacatcacttgcctaatccctctacatctgtcccatctcacactccataggttgcaccaaattccccaacatcagttcatctaaaccagtcatctcaaaatcatacccctgcctatgagtcacaaaatgagtcccaattccccactattaaccaaatacatagtccactacagtcaaacagtgataattctttccattcagtgtctcaccaaccaccctccccaccgccaaatccaattactcaccctatggtcactaaatccaagaaaggcatattcaaaccaaaactttatttagcagatgttagaatagaaagagagccaactactgtcaaacaagccgtgacggatcccaaatggaataaagctatgaatcatgaatgcacagcccaagaaaacatggaagttagttcctcctacaccagatatgacagtatttacaaacaaatggttatttagaattaaatacaattctgatgggcctgttaacaaacttaaggccaggctggttgcaaggggttttcaacaagcacatggggtggacttctttgaaacttataaccctgttattaaaccatgaaccattagaattctattcacccttgctgccatatacaattgggacattcaacaattggacattaacaatgcctttttaaatggtcagcttagtgaagatgtgtatatgacacaaccccatgggtttgttgacaaagatcaccctgattatgtatgcaaattgaataaggccatctatgtttaaaacaagctcctcgagcttggttcgatcagctaaaaagccacccgttgcagcctggttttcaaaattccaaggcagactctagcctatttgacaacaaaataaatgaacatcttttacttctccttgtatacatggatgatatacttgttactggagcggatactcaataggttcaagcactgattcataatctacatgccaaatttggcctcaagaaactagggattgtcaactacttcctaggttttgaagctttcaaaaatggcaataaatattatctcactcaacaaaaatacatcagggatctgcttcacaagactaatatgttggactcaaaatctcagtcgaccccaatgtgtgctacatcaaaattgtccattaattctagccaacctcttgaagatgctcaataatataggagcatcattggtgccttacaatagctcactatgactaggcctgatatctcattttctgtaaacaagttaagccaatttctaaagtcccctactacagcacattggggagcatgcagaagggtactgagatatcttgctggcacaattcatcttggtctgtcattttttcctgcttcccacattgattttcaaggatacactgatgtcgattggactggcaacgatgattaccgaaaatcaacctcaggctactgtgtgtttcttggacaaaacctcattagttggtacttaaagtaagaaagtgttgtatctcgcttaagtacaaagtctgagtatcgaactttagctcttgccactgctgaactaacatggatccagtctttaaaaacagagataacaatcaatctccctcaaagccctatactctggcgtgacaatctaggagcagggtcacttgcatcgaacccagtttatcatgctcgcacaaagtatatagaaaacgatctccatttcgcttgtgacaaggtgttagcaaaccaacttgatgtttgatatgtggatagacactatcaaattgctgacatactcactaaacctttaaaggttaggggtaaatgttaacaatgattttggatggaggacacgtgtacttccaagatggttttagctcagctgttctagggcccaatcataagcccaatcaagataatgaattggatccatcaacaaattcaagccttctagatgctggacaaatgactcgtctaggtaagataaacctccagcactgtatgtgtccggatagccccaagtagagcttctggaggagtagttaacagaaatctggatattcaactttgtatcgcttttattaattgtcaaatcccacaatatgaagactt

SEQ ID NO: 29018 - DNA, 2246 bp, Cannabis sativa
ttatttctgacacccaagaagtgctattgatttcccaaaaagaactatttccctatttatgatgatgacgaataagatacaaaagttagatcatctatctcataagtggaaggcacctgaatcgacaaattattaacctaggcgctagggtgctcgatgcgctaggtgctcgaaaatgaacttgctttgattcttattctaatgccaaaagtatgtctgtgctatctctagttgatgtccaatgaaatttttgacccatttgcactaagactgtaacgccgtaatctatagtgacgccacgggtgtgattttataaactagtttaatactaatagattaattaaatattaaacactgtgataatattaaaaggttgactagaataaaacacttaaaattgacgttatagtggcacaaaaagcgtgttctaagaatccctattataaaaagttttactaaaaaactatatacgatgatgcctcaaaaacataaaacttaaatatataagagatacaacccaaaataactcctgacaacccagcacataggccagtgtgatcaatctgtacattgctgaagaagactgtcacctcatggttgatctatcttttctttacatttacatgcaccacatagcacccgtgagtcacgaggactcagcaagaaaagtaataataataataatcatatagtttattattcgaagattatcatttatacacaatcagaatcaaaccattacgcattgttcataaaatgaaatctagatcactattgggatctgcatgaatcagcatcaatatacagatatctggtaatacaaaatcattacaccaataataggaatcatattcatttaaaaatataaatcatatatatgttacttcataaagaaaccatcgtcattacatcacattgcctaatcaggaaagtggatgctttaatctgataatcctgtattgtgtttcctaatcaggcaagctcgtgccatagcccgataacatatatcgcataactgcatcacctaatcaagtgagcccgtgccaagaacctgcacccatatatcatataattgcatcacctaatcagggaagaccgtgccacagcttggcaccaatatattgcaccgcctaataagacaatcccatacctacgcccgatacttatcatatgtcattgaagcccgtatctacaagctgccaggtcgaaaccctacaatagtttcattctatatcataacctggcaatttcatatcactgacatcgtatctacacatcattaggagtaatctcctaattagatgaactcattcctacatccattacttatcatatgtcactgacgcccgtatctacatgttgctaggaggaaaccctacaatggtttcattcttggccataacctagaaattttcatatcactagacgccgtatctaaaagttgccaggagtattgcatcacctaattaggtgagtctgtacctacgctcggtactcatatatcaataacacctgtacctatgcctggtacatcaccaagagtatcgcaccacctaattaggtgagtctgtacctacactcggtactcatatatcagtgacgcccctacctataccttgtatgtcgccaggagtatcgcaccacctaatcaggtgagtctgtacctacactcagcactcatatgtcactgacgtctgtacttatgctcgatatgtcgccaagagtatcgcaccacctaatcaggtgagtctgtatatcacattaatagtatcataaattaccattgcttcaccaatcaatcttttcattatataacaatattaactatatctcaatctcaatattaatcaattcataacactattaattatactaaaatataaagtactatgtagtacaatgtacttttctaaccttcaatccaagttcatacatgtcatccaacctaagtggagaactatccctgatgatctcggtcctatgttacagcaacggtaaaccaataagtgtttctgccaaaacactacttgatactcacataagacaatatagggctttctactaaaccttgcggtataaatacactaaaataaagcttatattttagctctaacacatacaccatattacatagctcatcgcaagcttaaaaatgctatatagaatgtccaaaacggacactcgagtcaaaagttatgacaaaaatacggattctaatctccttgtaatttctaaaaactatgaaa

SEQ ID NO: 29019 - DNA, 3160 bp, Cannabis sativa
attaaggggaagaaaaatgctaaggacacctcaagttgttaagtattataaattgtgacatactcttataataagatatattttaatatcgaatcttgtacaatttaatttaataaataaactagaaaagaaaattactagtgtattatgtagtgtcacacctgtatatatagtatataaagctaacatggtgtttgattttttaacttcaaaattatttactttaaaaaataaaaaaaaaaatgcttttaaaaaccactaggggtgttcggccaatttcaacttttttttttttttttgaataaaaaacatcaaaattttgttttttattttcaaaaataaattttatcttcttacctaaacattttttatgtatatcttttcacatattcaagtgtggatttgaaatgtatcagaaccacgattagaattggagttcgagttcgggccaagttcaaaatagatgtacaccattaaattttttaattggcaaaaaatagttttagagtcaattttttataatttttaaataattatattagatatgctcgtgtaaatattccccgtgtatgggccggccctgaaacaaagtatgccacaagaaaaaaaattatttttaagcccttatgttaaaaaaagtgtagtattttttaaagtcagtaaaaaaaaatataattttaaaaggagaaaaaaaaattagactcctaagctaggtgggccctaagcacaggcctagcccgcgtatgctcaagactgggcctgaatatacacatatatatagttaatgtttgaacggcatgtgatttcagacgtaaaaatttactaagaggttgtaattattatttctcatttgttaatggtaaaatagtttgaaaaattgtatgactaaaatttgagcttgaaaatgaaaagttaggtgaaaggaggggtctaatctaaccacctattgttattaacagctcagaattatgggccattaccacactaaacactctgtccccaacacccataacccaactcaatcccccactaaatactctgttcccttgcaaaacccaaaccatgctttacaacaaaattaaattattaggaaattacaaattttatgattttactttttctacaatttttttttccaaaaattattttatacgagattagaaaaaaagcagtaataatatatatatatataaaaaaaaatcaagaataaccatgtaccattatagtaaccaggatgcattgtaaatattttctatattttattttaatatagaaaataaaaaggaggagcacgagtattgtaatgtatagttattttgataggcatttgtagtttttaaaaaaaatatatatatatacttttaagtttaataaaaatgaaatgaatgtttgatggccagcactgttactgtttgtctcattttcacattcaatatttctccattgacaatgtcataaagcaaaatcccaaagaattggagatagagacatcaaaagaaaaatattattgggttcaattcaatacttaaaactctttcgaaatacaagtatataactcactcgactataaaatagtgatgaacaaagatgcattttgggcaaagaaacaagtttcattaacatgaatttagttgcaaataaaacattttgtcaaaataaaatataattatgacaatgactaattaccattctcaaaataaaatctaacttaatttaatactctaaaaatctaagactaatcttgtcatggacatatattatatatagacaagaaaatctagacatataatacttttgtttaatggcttactcccacaacagaccaaaaactagtcaaatcatataaaactggttaacaattatagcctaaacatgcactaataatctcaatctatagatgtgacacaatcaaattatacaatacttcgattttgtcaaatatcaaaatgaataaagcaatgtgaaattaagaacaataaaacagtaagaccatgtttagtttggcatgatagtaatggaatcactattcgaattctaatgtttggattgattttgaaaacatgaaatggctttacaatataatcactattacatctattcctattcctatgtttatgttttcattccttagaaccaaaaaataccacctaagaatatatttgaaaatacaccactcattcccattactattccaaaaacaaaccaaacaatgtaatactattccaattttgtcagataccaaatagaatgaagcaacgtgcaaataaaattgaaccaagtaacaaagatcagaatgagataatagtaataaaacagtaagaccatgtttggtttgatttagtttgattttgaaaacattgcaatgcccctaatcactattacatcattttaataccattccaattactattcccactacaatccattacacattacctaagaacaataatcagtaatcacattgcaattaagtaacaaaagacacaattattcacagtaagaccatgtttgttttggcataatagtaatgcaatcactatacaattctaatatttagtttgcttttgaaaacattgtaatgcccctaatcactattacacgactgtaataccattccaattactattcccatgacacattatctaagaacaataatcagtaatcacattgcaaaaacacaattattcacagttaaagatgattaaacacagagaaagaaagctaacattagaattgtttagccaaacacatattgtgtgtatgaaaatctggaaaattttgctccacaactaaagcaaagcatcatcatcaacatcaccatcatcatcatcatatatcatcatccttagaaacaactcaaaaatcaaaaccccattaagaaagaaaaaaacatcttcctatgtataaacccaccacaacttagaatgaacaaaataaaaaccaaaagataaaattggaaaatagaaaggaggagaatatttactaattactctcttctttctttcttctgtgtttccttttcttcttcattgtgagaaattaagctgcctcagtgcactcccttgcgaaatgcccaggttttccacagctgtaacaaccgccgccgccgccagcatcgccgctaccaaaccttcccccaccaccgcctccacggccaccg

SEQ ID NO: 29020 - DNA, 3780 bp, Cannabis sativa
  modified_base (541)..(545): a, c, t, g, unknown or other
  modified_base (1891)..(1903): a, c, t, g, unknown or other
  modified_base (2031)..(2033): a, c, t, g, unknown or other
aataaaaagaaaaacttaaaaaaataagcaaacattaaaaaaaaatgagaaaaatattgaaaagacttgagaaaatattttaaaagagaaaatttagtaaaaataaaaatgagatattttttgagaaaaaaggagaggtttaaaaaaagataatggtaattatattaaaagatgttaaatggaataactcattaaatgcagagttaatagagcatatctataactcgcaaattgcatagtctctagcgagacaaagatgtacaaactattgattcgcgtattgacgagaaaccattttgcgtcagagaacataaccgtaaggatgacatcgataatgcatagcaaaacaacatcctcgctatgtgtacaaaagtgttgacagggtgaattgactgttaaaacacttagcgtataataacattatactaactaagtgtaacagattgaaggacgtaaatgtaataccctaagattaagaaaatagattagcaaaccctaactagctatatgtgtattattatagaattatattattatatannnnnttatatgtgaattaatatgatatatgacatgttaagaccccgttggtgagctataggtattttagtaattttggcccgagacgcgtaaaactgtgaaatttatattatgatatgcttatggactatattattctatagtatacttgtcttgtctttttttaggtgttgtttgacagatcggcgcgatatagtcacaattgggaattttgggtcaaaccgggttctcggccgaaattcattttcaggattttgtattggcattttattgatatgtaaatattctaaaaattatttgaataaggtgtcgtgtgatggaaatgacatatttgcccttgaatgtctatatgtgtgttatatggctttaggggcattatcgtaattttgcataattggtttattttacaacaaaaaagatttttggtagaggattgaattattttctggttctctctctctcttggaccgactctctctccctctttactcaccctatcgaattgttaaatttttgagaaagtactttggttcaagctttatttttgctagcttttggtgcttggaacttggaggtgttgaggattgttctttgctagaatttgaggtagttcttactattttaaatctaatttctcttgctgaattaaagttgagagtcatgtctttgggctttgaatgcatgagggttgaaaagggagctaatggtgattactttgtaacttgaacttgtttaaattatgggttatgcacccatgtttgctagcaagttttagggttatttcccaagtttaagaatcggattattgactctatttattgttgtttggatgatggtgaagcatgttgtgatattcaagttgttgaatttgtatagtgtgaagatttgctcatgtgttgagcttatgttggagtatgtttaaatttgactttatgatgcatgtatgctgtgatttagagcttaaaatgtgtgtgatagctatctgttatgttggttattattgtggaattaattatggtgtgtgagcatgcttttgactgagtttgggtgtgttttttagcatgttttcgagcaggaaaattggggttttatgggtttgaaacctagaagtcgtggcccagatctctgggcgccgcgtcccgcctctattgaaatccttgattttaaacataggtgtcgcggccccatgtagggagtgtcgcgacccgcccttcattttttttttgggcaaattcaaacgcgttatttgaatcctcgttactttgtgatctagacaccgtttcgggagctttatatatcgttggaaagcccgttcctagctctatgtgattatctgtattttgaatgccannnnnnnnnnnnntgaaagtggatttagggattaaccatatacttgtgaatcctggaaattgtgactaggattattggcacttagtcaggagcacccagggatttggaatctctaagtttgcgggacatcaggtaagacannngttagcacgtagagttatgcacgatgatgcttatattaaatatcatatatgtgagtaactagaaaccgagattagggttattaccctagagagagcagtttattggcctagggttattaccctagtgaattgttaatgagtattgttatgccatgatttatgtatgtatattgagattatgggttatgcctttaaggcgtaatcaggttggactcggtaactagaactaagatgaaccattctaaggccttattgtatgttgacgtgtgagcgtaacacgtgggtctatgccacaaaaacataaataggtgtgtgagcttaacacgcgggtctatattaaataaacaattataaatggcattatcgtatatgtgatatgatagttatgattattgatattatactgtcatgttgggcttggctcacgggtgccctactatgcaggaaagggtaaatctgtctctaatcagccctgaatgcgagggcttggcggtgcttgtacatgttcgggccacactagaccaagcgggttggggtctactagcgatgtacttttgtaacttcaattttactacttaggtcggctagtgaaaaggcttgtaatatttagtaaaagatttttgggaccccaaaatatgtcacttttgattgtaaagtttaaagttattacaagttttattttcattctgttttagattaaagtttaatttttctgcacttatcttcttagtaatcctagtttaggggattagggtttcataattagttgttgtgacgtgcctaattgttagggcgctacagttgggtatcagagggccaaggtttttaaacttcctttacaccggttgaacatgtacagtcatcgtcagaggcaagctcgactcgtggtgcagtagctgttgagagtaaacgctttcactgcttatatgactatttatttaccgctttccattttaggcaatatgcgagcatctagagcatttatgtgatatatgatgccatgcttaaaatgttatatgataaatgtttatttagttggaatgaataattgagttagggttaaaggcaataagtgcataagtgtggtattggtgcttaactcgatggggttgttgattacaggggtacttgtaaaaatggatcctccgcaatcatctagaccacagggcaagcaattagagcctagtgcagacaagaccaatccacaggcaccgcatccacctctgcagaatctgggggataacgcgggggttggcaatgctaattcacctgctaacttgcagcaaatgtttcaagaaatgtgaggtatcatacttcgtcaagaggaagaataacgtcggttgaggcaattggcaccggctgcccctgttgagcaagtgttaccaccagcttttatgccagtggtgggtaactaggggtttatgttgccgcatagagactcagtgtttgagcagttcgtgaagctgtaacctccaacttttctgggaggtactaatataattaaagctgagcagtggatgagcataatcacctgtatccttgataatatgggggtgatagggacaaagagagtaaattgtgcatcttttatgttacaagatcatgtccgcgtctggtgggatatggtgggccagactcgtgatgtcaatgtgttgacttgggaagagttcaagagtctgtttgaggaaaaattttataacatcgctgtgagaacctcacatatggaggactttgtaaaactgactca

SEQ ID NO: 29021 - DNA, 1621 bp, Cannabis sativa
cacattcactcgcttagttcgaagagaaacaagagtagggaagacaattaaagagggcccgccaaagaaaattcgtaacttttggagggagttttaaataccaaaacctcttccaaaaacgagagttgtcttgagaactccatctcccattaagctcttgcaacgcacgataggtactcctaacagaatagcttccataatcttcaaatgcccaataccatgagtccatattcggagctaaaggcagtggtatgttgcgaatgagatcaatatctctcagctcaaacaaatcttccaatatttcttcatcttaactcattttttcaacttgtaacaagttaaaaacagaaaaatgacgaagagcttcatgagaagaagtcacatacggatgtcttttgaaggaagccacggttgattaagaactggaatggaagtgcccgatcctatcctccatcgagctcccatttttacaatttcctgagcttcaaagacacttcgcgaagcatagctcgggtttgaacccaactcagcatcaataaacgaaccttgagggtaatatcttgcttgaaacactcgagcgacaagggacgatggatttgttaataatctccaaccttgtttaccaagcatagccaagttgaaatcccgcaagtttcggaatcccatgccacctttatgcttatgaagacacaacttatcccagcttttccaatgaattcaaccaccttgggaagatttagaatgccaccagaatctacccataagacgatcgatatccttacaaatctcaaccgggatcagaaaaacactcatagtgtaggatggtagagattgaataactgactttagaagcacctccttacccactctcgaaagtaacttactatcccaactctgaatccgctatctaactttcgcctttagaaaaccaaaagccacattcttatttctaccaatcacacttggcagaccaagataaaagcttttctcatcagcaacacgcatgtgaagagtggaaagaagtcaaagacggatcccatcacccgtgttggagctaaagaagacagaagacttgtttaaattaatctttttaccagaagcctgttcaaacttgttaagtaactccagaacacgttgagcctcctccaaagtagcagaacaatagagaaaactatcatccgaaaataacatatgagtcatataaggagcccgccgagccacccgacacccatggatccattttctttcttcataaagccgaataagagccgaaaatccttcagcacaaatgataaagagataaggggaaattagatccccttgtcggattcctctcgtaggaataattggcccaagaacctcccctccatgaataatattgtaagaaatcgtgcgcagacattccattatcatcatcacccaatcaggagaaaaacccatgcgaagcataatagattgtagaaaaggccattccattctgtcatatgccttactcatatccaatttaggagccatgcaaccatttcttccttgttgtttacgctttaggtaatttagaatttcaaaagaaacaagcacattgtcggtgataagcctccccggaatgaaagcactttgaaac

SEQ ID NO: 29022 - DNA, 1263 bp, Cannabis sativa
ataagtttacgtaggttgaaatagtggacaaagtttgaaggaaaattcaacgtgatttcccgccatattttctagaagattttaattaattacatattaaatcattagtttagtagttaaataaacttagataagctaaaaataataaatcatcccccaaaataggcagaccaaccatatgtatgagaattatgatgaatgatggatttataaaatagaggcaaataataatttagaaatttctaccattcatctcaaaatgcctcactcatttgtagttaaaacactaaacataattaaaaattagcacatgatatctattttaagcttatttggcaattgaatgccattttttttttaattgtaaagatgatatttttacattattatcatttatgttataattccattaattactatataaaaaaaacataaaatacaacaaacatcaaccaatatataagttatcaagaactcgtgagtcgtattatattaaataataaataatattatttttaaataatttaatgtattgtattaattattacgatttttttttatataatgtaagttgtattatttaatacataacaaataatacgtattagtttgtattataatatttacaaagaatctgaagctaatcccaatctccgacccagacctagggacccggacccggacccaagcccgcgacttgaaatccaagacccaattgcagacatgtaatttagacctagacctgggacccgtgacccaaactcagactcgaacccaggacccaaactcaagaccgccaagacccaacctggacccagaccggacctgaaccttggactgagagccgatccgggactcgaaccctggaccccaaacctgagactcgagatccgaattcagacactagaccagacctggacctgacctgtagtcgatgctggggtagaatttattaaaaaaaatattataaatttatacaacttattatatatcaaatatagtattgtattaaataatactaacacaacacaatataaatttaatgtaatataatacactgtaccaaatcaatcctaattggtcaatatatatccaagttaattaagtttgactttgatattatacacacgcatatatatagtattatataaatcaaagtaatattttgcttcatctttaaaactagcctcaataaattaaacacaatgtacgtgtatggaatagtgtaattactactatttctcatgattaatattacacata

SEQ ID NO: 29023 - DNA, 1885 bp, Cannabis sativa
  modified_base (138)..(142): a, c, t, g, unknown or other
  modified_base (277)..(281): a, c, t, g, unknown or other
atacttaaactttaacatataatcttgattatattccattgtgaagacaatactatgatcatgaataattatatgtgtaggatttaatagaatttataaattaaacttataatcatgaaagtaatcatgtgaaccatnnnnnataaaatgatttatgatcttttattaattagtatatatgattatattgaaatgggttttatttagggcataatatcccaacagtaagaattatcttctttgagaaactttaacaagtgaatcaaagaaactaatnnnnngaacaagagttcatgattactcaagatttaggccgatctactattgatcattgttatgatacgaattaggtcattatagtaaacgataagttagataaaaataacttcattcatatcggtccatgtcatatataatatctattatatacatccattcactttgatgtcatactacatccataatctaaactgagattacttggatcatggaattagcatcagtaaacagtactagcaagcattgattacagattcctaaactttaatatgttgctaagttataattcaagtagctacgagtgtcatcgtgtcttgtttgattagactgctacaaaaacatggcatatattgaattcattatttcagatgtattcttcatatgttcatgcatctgacgcataacatctttcatccttacaagcataaaacatttggccttgttgttggagtgaatccaagaatcatatctatcctgaacagtttttggggcattggtagcgggctcctcagaacactcctcaattaggaaaaatttgtgattctcacaaactaggattaaattcaaatttgatttccatttataaaagttatcaccattcaatttttcaagtgtcaataatgtagtaaggggatttggcatggtagacatgactaaactaaataaagtagcataatgatcatacaaaaaaataaatatcatttcagaattactgtaaacgtgatgcatgagcgcatacaagtaaaatacatacaattgatcgtcaccttagggtcagtatcgagtcaatttcattgagcccatgagataattattatctttattattttgaaacctaaatatctcatatttcctgttaaaaatataaagtatcactttttgactaagttaacaactaactactatgaagcttaggtacactttgtgagtgtaacccattattttagattttatgacattacatggtgtgttgccttgagggtcagtatcacactaaaatagaccattatctcttatcttagtcaagagatcaaccttgaacaacaatatggacacgtaccttccttatgagttaatgatgactcaagatttaggccgatctactattgatcatcgtgatgatatgaattagttctttatagtaaacgtcaagttagttaaagacaccttcattcacatcgttctttgtcatatataatctatattatatacattacattcactttgatgtcatactacatacataatctgaactgagattaattgcaccgaagaacaggcatcaatgaatcgtactagcaaccattgattaaagattcacacactttaatatggggctggatattttatgcatagataagtggtcttagttctctgtacagctacaagtcactgcctcatatatgaataaggaattttctaatatttatatataaattactcaacaataaatattaataatttaatattccagcatatactaaaatgttcaactctttattataattagaaatgtttttacaatttcaaggcataaaccctaacaccattagatgaacgaccaacaacggtcaccaccatacttgaaaaggaaacccaagtacat

SEQ ID NO: 29024 - DNA, 1638 bp, Cannabis sativa
caggatcctcatccttcaaccaaactccatactttggaacttggcctccagaaacactatactccatcaccttctccttaacacaatttgcttgatcatgaccccaaatgccacaattaaaacatagtaaaggtaatcgatcaaacttaaattgaatccaacgtttaccaccatctacagggatatatcttccaacaaacacctcccgatcaatcgagaaatcgatcttaacccgaacatatccattcaaaagtacttgttgtggattattccaaagaatatcccgaatctctcccgccatgtttccaatcctcttaacattattaattgtcaaagttttaagagggaaacctctcatcttcacccaaagggaaactctatctaaccgagcatctctccacattccactttttggccattcatcaaggaccagaaaaccaccattgaatacccatggttgcttctccagaatctttttagcatcagttcgactttgaaaagaaagaccaaaataaacattgtctttatcttcttccataatcttaactttccattcccctaccgatttccacatcctagtgaaaatacttttgaataaaccaagactgatactttgtttcgagactattctcccaatcaacgacttctctccaaactcagtagcttgttcttcattcacttcccattcctcctcttgatccattcccaatctatcagttaattgcacaatctcatcaacagaattagcattcattaccgtggccataattccacaaagcaagagaaaattaatcataattagagtcaccaagactattcagagtcacctggggtcacaagaaccattgttcactactcatttcacccgtaatttaggtatttaaattgattaaattacgcttttaagttaaattttttaatatataatagttattttataagacatgttttaaaaaataaaattgttattataaatttagtattaaaaaaataaaataaaaatcattacttaataataatgattctattatcattgattctcatttttttctcttttattttaatcaaattcttcattttgtaaatttaataaattaaataaacaaatgtaagcaatgattctattatcattgattctcattacttaataataaacatgccataatataaatagtaatataatggaataagaattttaatagaaatgtattatgatctttgattaaacactctaattaaataaaataagttatatattgacaaaaatacctttaattttattttaatatttaaaatttaaataaaagtaacataaaagagcaaaagatatatttttttaacaatgtaagcatcgttacattagttttataatatagtggggattacaatacatagtctaatgaccattacaatgtaaagtcattacaaagctttaaaaatgaaagcaaacaaatgtaatggtaataatgattccattacaattttaattacactaaatcaatcatgctcatcaaaccaccacatcgcacaaactgctcgcactaacgcacaaaaaatgcaatttgaaattctttgtgttgcagttgcggtttgtatttttgttaaaccgtacggtgagatgcaatttgcaattttaaa

SEQ ID NO: 29025 - DNA, 9428 bp, Cannabis sativa
  modified_base (9358)..(9380): a, c, t, g, unknown or other
ctcttacagtgaaaaagtcagtttccttcatcagccaaaagaatacaacagtcatcaaggccaagtaacctccaagaacaactccagtggcaaagatttctttgagtttccagctatcgggcaatggagatggcttcactctatcctttgagattgtcatgattgtccctttataattggataatatacagtgttataacatatttatatcatggatgaaagtacatagatcataaagaataaacaaaaaactagtattgtactttgcactttataagcatttaccatcatttaatatggcaatgatcaaaaccatgaatggagaaaagtcaaacttccatatgagtgcaatgaacatgaatccgaactgcaaaattttagcaaaatacaagagttcatccagggctcatatatgataactcatcgagtagtttactaatttctctttacttaccactatacgaattgtgatcgaaactgcatagatctgaagaaagaaacaataaggggtaaaaagtcatgaacatttatccaaagaaaaacgaagtaaaaaaaaaaataatcatttaatgtgtagaaacaaactgtgtagttcttcattctctggaaaatagctctgcttgtcaacactgcactgatgatgacactcaatccaggctcagtgagaacaatgtcagacgcacctcgtgcagcatcagtagcatcagcaacggcaattccaatgtctgccttctttagggcaggggcatcattgacaccatcacctgtcattccacaaatatgcttcctctcctgcaacttcttcacaatttcgtacttgtgctctgaacaagaaaatgttacaagacatgaaaatttccaattgaaacaaaaacaagaaagtgtgaagacataattattgtaaactagccatataattaaattatttacctggaaatactccagcaaatccatctgctttctcaatcaactcttcaacaggaattgcagctatgtttgcatctttgtcttgaccaagtaaggaagaagatggatacatgttcgttcccattccaagtctacggccagtctcttttgcaatggcaagctgatcacctgcgcataatagatagcaacaaatgcttaaatactattgcatttttataagtgatcacgacgaagacgaagaatcaatttaccagtaatcatcttgacattaacaccaaggttaagtgctctgcggatagtttctgcactatcatgtctaggagggtcaaaaagcggcaataaaccaacaaactgccatgcactgccagcactctcctttcttttctcaggcacttcctgaagtttaaaaggaagaatagtaggtgagcatataatgaacaacaattaacgaagaaaaaaaaacaaagtactattcataaacctgtctggaaacagccaatgaacgaagcccacgttcagcaaacttatcaatgacagcatgaacttttcttttgaagtcctctttgcagttgcatagactcaatatctgttcagattaattgtttaagaaaaagggtcatgattaggaaaaagcctctataattgttttgtactaaacaattataggctaaggaaacaatatgaactgctaactcacctgctcaggggcacccttgcttgctctgtgccaatttccactagagtcaatgtaagtcaaagcagttctcttgtccacaggattgaacggcaaaaagtgaatctctcgaactccagcccttgcctgcataaatattcaaatactttagaactgctttcaacattggcatggcagtttgcaaggtttaaatagagtataaatcttaaactacttttacctcttttgggtcagcaagcattccaacaatggcggcatcaatggcatcctggttctcagttctagatgctcttgcagcaagcagcatcacatgttgtttgtcagcatcctttacaaacacctcaatcaagtttatatcaacactaagcttgttcagagtcagtgtccctgtcttgtcactgcaaaggacatccataccagccatttcttcaatagcagtcatcctcttggtgatggcaccttgctgagacaacctgtgggagccaatagccattgtcacagacaaaacagtgggcatagcaattgggatacctccaatcaagagaactaggaggttgtcaattccatctctgtatttgcggtgctgaattgggtacataactacaagctcaatcagcattccaactgcgatggaacagatacagaagtttccaattgcagtgagaaccttttggaagtgtcctacttggttggtgctgtcaacaagatgtgctgcctttccaaagaaagtatggacaccagttgcaataacaacagcttcaatttcaccttgtttgcaagttgaacccgagaaaacttcatctccaggactcttggtcacaggaagtgattctccagtgagagcagattggtcaatctttaaaggatcaccctcaagaagacgggcatcagctgggacaatatctcccaatttaatgctaataatgtctcctggaactaaaattgcagcttcttgctcactccatttaccatctctaagcacctgtagataccaccataaaacaaaaagaaagaatatgagatgctattccttatactggctaatgaattaacagagattgatcatcaatccaattacatcaagaaatcgccatcaactttaatattccacttgaagattggagtaataacacattttcaaatatcgaagtaagtatttgtagggaaaaatatccttaaacagcatcatattcatccaaataatagaaaataattgaatgaaattattaaggtgcctcatgaagaggcggcaccagtctttaaattagactaccttgtaattcttgggatcctaacataagattcttgtatacgtattacctttgttttgggtgcaagacctgccatgagagcagcagctgcgtttcctgcattgttttcttcgataaaactgatggttgaattgataacaagcaagcaaacaataccaacaaagtcctgccaatccggaggcctcccatctccatttgcaagaacaattgccatgagagcagcagcctccatgacccatgacaggggattccacatgaagcccaaaaacttcagcaccttgctttcctgttaattttgaagaagaaaaatacacacagtaatgatcagtaatcaaagtttcacatataacctctagtattcaacagatcattagaaaaacatataaccttcttctcctccagcttgttggggccaaaaatctgaagcctgttggctccttcctctgcggacaaaccctccttcgaacattttagttgctcaaacacttcatcgatcggaatacgctcctgtaagagagtagttagtcaaaaaaaaaagaaaaaaaatgaggtgcctatatcatattgcaaaaaagcttcccagatccattgttttgatctgggtttcaaaaagaaaaagagtatccgaaactaacaaaacccaaatcaccactgtagtttttactcgatacaatgaacatgtacatacacacgtatatacacaaacataaataacccataaaatttttctcgacaaaaatatgcaaggaaagaaagagaaaagaaaaaaaaaaatggtggagggttataccagatcaacagtttcattcttgatctcctccaacgatattgctttgtcaccccccatcttcgacacagggtgaagaaactatgagacacacggtgaagaaagtatcacagtgcgtgtatatgtatgtaagtagtacgattgaaatatggggaagctaaaaatgagagaaagtcaacgagcattgaacgaatgagagagaatcctctatcccaagtaagaagaagacgaagaagaagaagaagaaatgggaatggaatggaaatttggctcagcaagaccctccttttatacttttcttcagtgtaagaagagccctatacctttgtgtatagtgtgaccagccgtttaatcttgccccaagtgggcctctttttaagacttaaaatatttctctatctctttctctctcttattaccggtgttgctgctgatttttgacgacgccttcggtttacaattacacacttacagttagagtgggcccacaccatgtacttcgcctactgtcctaaaaaaacaattatcatttttttttcttttatttttttctaaattatctttattttgttttttaagatttttttttttttttataaaaaatgaagattttataattaattaatttagatttaaataactgtttttgaaaaacgaaatattttttaagcaagaaaacaaaataaaattactagtttccttggcctgaaaataactgtgtttctttttcaaaatgaaaaattaaaactgtgactattatactgcctccagctcctactagtactactcaaggttccttgtccttctcttcgatgttttttgttttttttttttttttcacattttgataaagaaaaaattataatgacaattctttaaagtttttctttcaagtaattttattttcttaaatcctctacaaaaataaatagatatttacataaccattttagtaatttgataatgaaaattgtcttctactattttcatttgtatcgcaaatggaagctagggaaattggaatttagaaactgcttatttattactacagatagtttttgatcagatttttgaaaaaaaaattaaaaaaagtgcgttctacgcattgtattatggtattgaaattagttttatctgaactgaaggtttcaagtgaataagtgattccccaaattctacccatgttatattggtttaacataacacttttctatattttcatatggtcttgacgacaaaaacaaatgctcataatttaaaatgaaataattaaaataaattcatatggcaatattcttcttgtaaattatgtaactgggttttttttttcaaatctatacagatgttataacatttcacattttgctggaaaaaaaaaaacacacacatgacacctttgacaatgataggtattttgacatatggtctctaaaattattaaacctaccgaagtggtagggaagtaatttgcaccacaccatgtgatctatttttttatttgaaaatttctatccgcacctcagaagatgataagtacatttctaatattaaaaaaaattaaaataattttttataatcacatttaatatttttttaattttttttctcatattaatttgtgataatttcaatatttattttaatttatttccataattttttttctaatataatttttattttaattcttttgctataatatttaaaatataatttatttttttataggtataatttttaagaatatgaattagaagaaaaaaaattaaaaaaatatatattttatgtagaataaaaattattaaaataatgtgtatttatattttttgggtacaaataaaacttctcttttcgtttataaaaaaagacaatgataggtgtttaccgaatttttcggcaactaaatattttggagcttaaaaaagtaataacagaataaatagcaagatcacaaataagtaatttttacgtggttcaggcgttagctatccttagttcacgagtccattttattaggctcatcgaccaatgtgtttatacaaatagatatacaatggactgaaactcccttcccctgtgttcctcttgaggaagaggaagcttagtaagaatattctggagttttatgtgtgtgatgttatacaaaaatctatttgcttggagcggtgaaggatgaatcttctctctgaaagaaggtcctcccaaaagaaaaggttttctctcttttcttgtgtttttcggggggtatctacaggccaacttatttgcatgtgctaccttagatggatcatcgttggggcgaaattcgactgttggattggtaggtggcatttttcccatatgacatttaagggcttcagatcgcacaggttgggcctaatacgcatgtcatcccatggcttctcctttttgagtttcccttatccctattcgttggatcatttgtttaggtacacaaggacacgcatgctctatacaatagcatgtcgtgggagacaatgtcatacctgaaaaagcctggtcactaggcccgtagtctgacacgtataggcaaagcttttgtgggctaaaggcgtagcccggcttaacatgtctcaaaatgccttggtccctctgggaaaatccatactcttctcgaaagtagatggctttggttcctggaatagagggagactttggctcacagataccctccgtgttattagcagtcagggaactccctccgcaaaaactcttcccgcgaagctgatgcctttttcttcccagagcattaatggaggaaattggtcagctaatgactccttagcctatcttgattaaaatccatgtgtcatgatcacagaaatgcagataacatttaccccgaagctttcggggcgtatcatggtccaggagcttgtagtgtcttctcctgaaagagtttaagcacgtgggatttatgacaagctctttattacactacctcattagccaccaactgaagtatcattattcagaaggcataatttcttatgttttctcgttagggttttaaatgctgacttttgagctttgcatgcgtgttgggcacgtgttttgtgggatgcccaaaaatggcagtgattggatttgagcagactttccatttactgagtgcttatcatgatgcatgtaatgatggaagccgattgctgggaggcgatacaccctatcagctttccactaatccaaccgttagatgtctcttaggcgaacgagttgaactgttcgcttctcgtggaaggcgcctcttcctggtacccattaaatatcttcagcagcaatttcacactttacatttatgtctatcataccagagttattttagtttcattccttcctctgccctgcaacaccttcttaactcttccgtactcaggcacccagttcgtcagcaaggacgcagcgcaagggtcaccagcctcatattctcttaacaaccggtaagttttcttcaatgtttacttgctgtaaagttttgagggaattgtgcatgttgcatgcagttgtttgccctggggatattgatgtcgtgcttgcagtctctatcatgaggagtgagagtcttgtggtcctgggttgcacttactcattttactttgtacccatttctggcaggtgcatttggtttgtaatgcagaagactggttcttctaaggtggcatgcggcaatgcccctgatagaaaaaggaaaaggcttgaggtagccacttttggaactggggcccacccagtgtcatgatctgccactgaggctaggcaagcctccggcgtatcatccttcagccatgccaaaaatacccttagtggggttcacgttcccaaggaagcccattccttttaatcctctcgacatgcagaaggagagggaagtgaacagggccttaaaggggcacttggaggcagagaggctacaaatttgtaaaaggcccaccgtgctttcaacggtgcgtaaggctgagatttcagacggcatgcacaccctgcccctttcgggttaaccgtggaggttgaagccttggagaagcgcctgactttcaaggtggggagagaggctgccccctttgccaccgaacttctagatcaggtgactggaaatgcctcagagctacccatggagacttgggtgtattgtagtagaatggacgtctttgcgcttgcccactccaccaagcatcaggtagttggggtaaggccttgagacattttcttcctcttttatttatttttattatcttctgccccctattctgattcttgactttttcattttggcctatttcgacaggtggccttactggcggagaggactgcccaggaggccgacacggtggtgacagaactggagcaagtcaagggggaaaaccgtgacttgcgcaatgccaacgaaacccttttggctgagctcactgaggccaagcttcagattgaaggcctaaaagaaggagaaccagctattggaggccaattacgttcaacagactcacttaatacggggtacgagggccgttaatgacctataccaggagacggtggcgcggttgtttggagaggggtcctctgacccatctggtggcgcccaatcttgacttccaacagaccttttttgaattgttgtttgttctttttttttttttgtatattcccctttcaccatacttttcaagtcgcaaagacaattataatttgccctggccacgggggatacttgtaatagtaaatagggttttctttgctatttcttgttggagatttactttaatagactttttaggagcgggttgtgtcattgaaacatttggttccaacagcgagtgtttcaatctttctctctagtcttaatcatttcttaagcgattcagggatcgtttcttggttttaccctttctttcttggagttgtaatgtttctttccaccacttaaccccttgcttggaagaaaccactcgcttggagttagcccagagatggtttcctttcgcgaaaaaggagccttctctttttcacacatcttcttcaggctttagtcccttttacgaggttgagtcccaagagtcatgcccatgactcccttaggcttttgggcatttttcttaccttggtccttgttaacctaacactttagctattatgcaacctgatggactaaacttatagaaaatccacagagatttataagaaagaatgcaggcatattctttttaagaattttggccgaatacacatcttatccctaaattcgtacttaagtttagcctttgaagaaagaattcaagccatttcccttgggaagaaatagttgaaaacatttcctgattttggctgcatagtacatttgagctaataatcttggtaaacagacgtaagaagttgtagtcgtcaacaatcgggcgtaccatacccccaaatgagctgggaattttggtctcaaattctcggtcatttgcttagaatctgtctcgtatcattttcaagtctatgaggaggaggtttgagtgtggttctactttgctccgagaagcatactactcatccaggctatgtgttttcctcttcgtgactacttggaggggaattcttgaaagtctagcagtaatctcctggcttctgtgagaaaaagccatggggttgtaggtgaaaactgttggaattattttaccnnnnnnnnnnnnnnnnnnnnnnntatgttatttaacatcctaaatacaaactttctaaaacgataataaac

SEQ ID NO: 29026 - DNA, 2540 bp, Cannabis sativa
aattctacatagaaactcctattacaactaacggagcaacctaaattgcaaccaaaattaatatagcaactcacatagaaactacggtagaaaatactttaagaaacccaaaccgtaaatttaaaaaaaaaataaaaaataatatataaactaattgtcttattttaaatttactattaatttaataatttaaataattttaccaccaaaatttaaattaatataaataaaataataattgagacttataagagtttagccgaaaaactctaaaacaaatcaaacgttacgttaggtcttctacctctctccagtccttatccactgtcttttcttcaaacccctgtgtcttctcatggtctaaaccaccccattatccaggcccctcttgatcctgtgtgttatctacccgtgtgtatgttatttgttaggtgtctgtcccttctctttgttgtcctactggtgggtattttgtttcgtgagtgtgcttcctgagtcactttagttgtgttgtgtgaagtgttgtgcttggcctttgtcatttctttattaatctcttgtttctttttattgttttctggagtgagttagatttctgttttgttgtgttttgttctgaagtgagtgtggggtttaggtgtgtgtcttacttgtgtgattcccgtgtgtcttaagtgtggtgagtgggttgggtggtctagtgtgtgaagacttgtgtgctgttggtgtcctttattcttttcttttgttttcctttttctgttggcatctttgactttggtgcagttatggaagtagttattgctaacaaaccttctgctaagggtaaatgcctctcttgttctgaagctactgtcactttaaatcctagtgcctcttccctcaaggtcttaactaccttttgcctttttggaaaagttgtggccccaatgagtgtggatgttactactgtcaaggaatttgtggacaaaacatggcatattcctgtgtctatagtggctattcctggtgaggctttaaattctaactactttgaactgggttttaatgatgaggaggtccgtacttgggctttagagaagggcccttggtgtgttaggggatatacactggtcctacaagcttggtctccacgggaggacggaaaagtacactttagtcatctgaaactgtgtatccagatacacaaccttcctcatgagtacttctctgtagacaatggtaagttcttgggtagcttggctggtgaagtgttggaagtggatttagatgaagacaaaccggcttcctggagtaacttcctcaaggtttgggtagtgattgacattgccgaaccactgttttctgggtgttttttcgatttggcttctggggtcaagatatggcttcaattcaaatttgaaaggattgacattttctgctacaactgtggatgcctgggtcatcaacggcgggggtgctccctctcctcccttgtcacggtggagaaaggaaatggaattctgtttccactttttggtccgtggctctcaacatcctcgtcttacctagatgttttctcgggggccaacactttcgtgccgagccgcggctcttcgtcgactttcccccctaatcgacttctcggcctggcctcctcggcgtcgaagggtggtaacggtgtgatttccaggcgtacggttcccactgtgggtggtttttcgagaatgagtaagagagtgacccgtcgctctcctgcgtcgatggggtttccgaagtcggcagcgtgggtggccagatcgaagcagggtggtggtacggccaaaatttctggtaatggtaatggtgttcttggtgagaaaatagacttttcctgatataactttgagaaagaccttacactgtttctcgaatagtgtgagaaattcaaacccgcctattgtctctgaagcagtcaaagaggcgcatcacgtgttgcacatgcagaaggaagctgggtcgtttccctctttgcttgggccaattgaagatcaacaaatgggaaatgggccgtttagttatgggctccaggttacaattaataaaactcatggagagggctgctcacacaggtctattgggccggttagatgtgggcttcaggacactaataatgacatcccaacttcagtggggcctacaatttcaattaatggtttaaaaaggagtgtgacattaaaagatgggcctgaaaatcctaaccgtgggcttatccaaatgaagggtaacatcaataaattaagtgggggttctaatttttccaacgtgggccatgactctcttgaggcgttgggacccgatggcctatctaaggaatcggttgagggccaagatgtggattcgggattggatgagaaaaaagctcttgcttctttctttcaagcctaggagacgttgttgcatgagcttaaacattttgggaatcttgatttatatgagatcaaataattgggaggagacattggtgtcaagcctacgtccgaaacaaatgagagagctactcccttcaaaaagcggaaatt

SEQ ID NO: 29027 - DNA, 2411 bp, Cannabis sativa
  modified_base (2349)..(2358): a, c, t, g, unknown or other
atccaagatccaataactatctgaatgtttcggatcagtaatgatccgtcggatcggatcactgatccgatccgaatgaatagatctttttgccatgcctagtttacatcaaaattctgagtaagtcttcaaagaattatgggtacaaatcaaaattctttatagtttttcatcttcagagtgataggtaatcagagtgaattatttagatattagaagacctattatgaatctgtgtcatggactttgagggttcatggtataaatacatgcctattgtagagttctcttacaacaacaattactagagtacgataggaatagctctttatgagatgctatatagttgaaagtgtcattctccaatccattgggacaaactggagaaaataagtatctgggtccataatttagttcaaaggaccaataaagctatagataagatcaaagctcagatgcttatttcgcaaaatatgtagaaaggttatgctgatctttacgcagagacattacattatgggcaggagaacatgttttcctatgagtttccccaaagaaggctattaagccctttggaaagaggggcaagttgagccctaggtttattgggtcattttagatactcgagaaagtcgggcaggtagcatgttagctagccttatcacaaacgttatcggctattcaaaatgtatttcatattttggtgttgaggaaatatgatgcagactcgactcataactttagttatgaagcccttgaactacagtcacacttatttaatgaaagtcagtcagtttagattcttgataagaaagaaaaagcacttcgaaacagggccatagccgtggccatagtgcccttgaagaatagtaaggtggaagaagccacttggaaattagaatctgatatgaggactcaatatccagatcaattaagcttatattttagggacgaaatccttgtaacgggggaataattgtaatgaccgcattttagattatggattagtaaaggcaattagcgttaattattgatatttttataattatgtatgaatatattatgttatgggtcccatttttagaaatgggcattagagttataatttctcaacttcaaagattttattaaactctagaggtattatttaagttatatatgcattatgcaatttttatgatttttgctcggcgacaacggaaaatgcgatggatggtcgtttgagtcacatgggtaagtttagaacctttttcttagagtgataaatatttcagataaatggaatacaatgtttgagcggggttatggattttgaccattttatccctaggcttaaaattgattatgttataagtaaaagggtattttggtaattttgttaagggggttaggtggctctccctagtgatggtagctggccatatttttttattcagcccaattgatgatagctttgtttgaaagaaaataagaaaaaaaatcaaaaagaaaataataaactcatttctccattctctctctctttttgaatcaagaagggcagccaagaacctagggttcttcttccttaatctgattaattctttctgattttgagtgtggttcaacagtttgtgggagtacttcatcaaggtaaactctagagttctcatctcattgttatttaagctataacttggattaatattgtaatttgaaagttttggctattcaggttagatttgtttgtagttcagtttatagcttctatttgagttgcaattgagttttagcagctggttgggttgagttttatggggaatgatcaagtttgagtttgaaaactcaaacttgagtcattaatggcatatttgaattctatgtgtaattctggattctttcttggaatatattgtttgaggttattataggtgttctggaggttttggtgaggtttggaaaagatttgggcataattttgaattgtttgggttacctagtgtaaatcagttaaccagtttcacataccttgtgtaaccagttagccagatcagaaactagtatcctgaatatttcgtgttgtcgatccgtgttatttccaatgccttatgtaacaccctaactattataggcgtgttagcgaactttttaacgtactgtgcaactcgttgctaatcaacgagattataggaaatcgtaaataattaaaattttgcttaattatttaaaacataatatattacatttataaaattccgggatcatatttacaaaatacagttacaaaagtttactattcaaatacaaatgatttgtcgcttagagactaaacagcaaaagccctgatgtctcaaagatcgtacgctccannnnnnnnnnccccaacatgtacaatcttcacctgctcgatctcacggctcctcaactttagc

SEQ ID NO: 29028 - DNA, 1356 bp, Cannabis sativa
atatgttatcacataaaattctaaagatgaaaaaaaactataagaatcccctatgaagtcagttattatgaaataactatatccataaggtccctatagagttagttatttgataataaccaactctatagggaccttatggatatagttatttcataataactgactccataggccccttacagagtaggatatttcatactctctttagcgtcacctgaaacagtgttagtcataaattttctcaaaaccgacgccatatgcccaaacaaagtgcctctaaagcttttttgtagtagtgtggatccattagcgaagtcaagccttccagatgttggacagcggactcatctagacaaggtacaccttcggcacagtgtgtctccggatggcattgaacaaatctttcggatgtgtaattaatgggcatccagatatctagctctatatcacatcaatttattactaaatcccttaatatcagggctttattaccaagatcatctccaagattcgtgttttccgaataaggaaataaaataattatcaatcaagcattaatgtgtctttattatccacaaaagtaggattcagtttgacacctatcaacatgatgtggtttccacatcagtagaagatcaaagtctcacagactgggcctctctttctctctctcacaataaagatcgttggagcacctcttctcctcacaccagcaccaatcgtcggacttgagcccatcacacgaggcgtacctcaagtctctttctctcttgtaatgtttttctctctttcctgattcattatttttttgcaggttgttgtgttcgacagtcggtggagcctcgtcattggaggtcccaagtcacgtctctctctcctgttgtcctcgcttatatctctgatcaatgtcctcaagtatcttcggtgttcatccagttatacatgtaaatgatttaaatactaacatttggaaactattaagaatcttattgtaatcacatttgggaattaatgacacttgatttatatatatattgttgtttatttggttttgttctcttaagtttggactctctttgtggtggattatttcttgggttcaaatctaaaaaagtagatgggttctaaaaatttattttatcttatttatttatcttagcatcggctttaaagggtcgctattggtaggttacctttaggaacagacaagaaaaaggttagtgaccatttaaaatagtcagttatagtcccttgtattgtcgttagtttttaacagtcgggaaacttaatacccgactatctatgaccaatgcttattccattctattttgtgtcaatggtataggcatcagt

SEQ ID NO: 29029 - DNA, 3257 bp, Cannabis sativa
  modified_base (2420)..(2428): a, c, t, g, unknown or other
gagatctagaacttttattcagaatatgtttccttaaagtgaaagcatcatagtcaaaaatttgcttgaagttttagagttgattttcgatcacaaacggagtgtgttgagcatcaaaaacttagaattattcactaattatatcctagaactcaaaattccatgataatttatcatattcatatcatttaatatgtttattctcattttcaattcacattatgaaatttaccatttaaaaacctaaaaaacaagtatagaaaaaaaataagtgtaattttgcacaaaatgaatataatcaattgaaacacacctttaaaacactttattaaatgaacctaaaactagcctatcaaaaattaggaatgacgtttaatgacaagtagcaatgtgtggtgatgtagttattgatgtgttttacgatatgtcgtgatgttacttgcgatatttcatgacatatttgtgatttgaattaatgtttgttccatttttgtttgcagattcaactgcatttgtagttgtgctgcatgatggtgtttcaggctattgacaattttaattggatgttaaataacctaaaaagtaagacgttgatgtttgagattgacactttttactttgaaatttttcaactgattctaaggtctaataaattctaatcaatcacaaatcaagagttagaaataatataaaaataaaagaaacactaagaattatagaggttaggccccttagatattgtaatgtcgtactccccttttagttgtattgatattgagataacactaagcatatcattaaaaaatacaaagtgatttctagctagatctcagtatgtttatagggaataatattcatagaggtgctcttaagaagtagagtagagatcatcatgaagtttgctccctttcccctgtgaattcattcactatttatagggagaagattgttacaattagttgtctaaaggaagcaacaaaaagtaaatatccctatattctagggtgcagttacaattcattgagagtcctataatcttgggcagaggagttaaatttgcatttgtaggatgcggttggagatattcacaaaggctactgaagaaaagattaaggttcatttaccttgtttggcctttctgggttcatctactctggccagcatgctgacaacttagctaggtgtttctagagacttgtctgcttgggaagatcacttttactgagccttcacaaggtatgttagtcttgttactcctagtcggcatgtttataacttggcaaggttctttcaagaaagtaattcacttgaggaaaccaaccttattggagacctgcacggtttgtatagctactcggatgtccaatcttatgacatgtgtctactagatcaggccactcatagcaccacgtcaggtaggtaaaaaaatagataacatttgcccccgaagtccccttataaagcctatccggatagggacttaggtactagccaggatgttgacacatgcgtgagtcttgtgccattattttgggcgaatggtccgtgcagggtcaacgggtcacccattagtcactcctccaagttagttatcattatgagggtttaggtcataaatcatgggggatcgtgctcacagctacactcccccatgattacacctttttagccctcttcacttccccaggcaaattttatgggaattgattttcccatttaattttttggggaaaatcctttatagagacccttataaatggttccctccatcccttaattatttttcccatttcatcttcttcaaaaattatctcagagagaaagcttaaaaatagaaaaagaccagccaattttaagaacccaagctttttcttgtgttgttatcgtagaccaaaggtttttccttcactgtccaggcactatctagtgagtaagtctcttgaaatattatctttttctttttagatttctacaactttatactgtttcactattggtagaactagatacctccacagtggaaagtaattgtgattatatgctttaaagtctttaatcccatgatttataagtgcactggatttatacttacgtgataatcagcgataaagtttacttacacttgtaaaagtggaatgtcctttccaaggcattagtaaagtatactagtatcagatgtattggctttacatcggactggaccaatattgacagtggaaaagatatcataaacttcttttctaagtcaatatcacttgttgatctcagatcaaaagatctcaatcctgagatggttagggtttggcttaactgtactatttgtgttctttgacttgttcgttaatgctgaccaattggatcggtccagtacttacatcttgggaacatgagagtgcaattaagtgggagcgctaatcatnnnnnnnnnatctatagcttctataactatttagaagtgaaatgattattttctttgagtttggcctaatagacataaatggaagaactcttatttcattaataatattagtttactgaaatattatttataggaagttaagtgttttaaggataaaatacattgaggggtagaacggtaaatttatcattactcaatgtaaatcatctatagaggatctttgataatttgggcatataaatttatgtaaatcaattttcaacaaataaatttatataaatacctaataccctaatttctaacttcatactttgtttgggcatttaatctcttattctgtaagagatacatatctccaaagaaatcacaaactaaaacaagtttcataaaataataataataatgcaaaaattataatcaaaaaacgatactaacatcaaaaatcagttttatcaacattaaaagaaataattatttcattaaaaacagtagaaaaaaatcagattcttcaacatcatactgtaaaaaatacaatgcaaaaaattataagtacaaactttaaaatttaatttcatctacattaaaagaaattatttattttaaagaagcagaaaaaaaaaaacagtttcattaacatggtaatgaaaaaaaaaatataatctaaaaacgatactaactttaaaaactaatttcatcaacattaaagaaattaattatttcatgaaaagagataaaaaaaaaattcatcaataacatataaaaaatacacaatgcctaataaccaaactttaaaaacgatactagttttaaaatctattttcgaacatataaattttat

SEQ ID NO: 29030 - DNA, 1489 bp, Cannabis sativa
aatgtaaaagtgtaattttttttaaaaaaaaatactactttgtgtaaatttttcactattaaatgggatagtacccattagggctgtacataaacttttgtacatcgtccaatccgaataaccaacccaaaccaaatcgagataatccgacggaaaatacaaaccaaaaaatccgataaaaatataacccgcccaatcaacccgaactaacccgaacaattcgattaaaaggatttatatatatatatatatttattatgtatatttctataaatggaaaagtcatattttagttactttacaatatcaatgtaactttgtcctaatgaacttgagtagtttgcataataatgagagatattcttttattttcttgtgaatgagtctacattgttgcaattcttacaaatttacaataccataatcccaaaaactgttgctttggcaaagctaaagagaaacaacaagttaatagtgttgtgaaacttatgataagtttggtttgagttctgaatcaattttagttatctatattcagtgattgattttttctttataattatagttttctactaggtatttgatgtattatgatcagaattttgatctgggaatttcataatgtgatactatactattctacagggctaataagtaataaatgattattgtttatttctgtgatctaatctcatgtttattttgatggaggtttgtgtgtaacactttgtttcttaagcttaatttcattcataaattactactctttctaaactaacttatcataaaacaacttttaattgaggttttggtggtttaattaaggtttattaacatggctgataagacatcgtaacttgaatttgatggagtggaggtgtcttcaacaggagacaccgaaattcattgcacgtaatacacaatagaaaaaacaacagcaaagtttagaataacagatcacacttgatcttgcccattttacaatattttgtgccacataattattgatcggcgataaattagacaatgtgttttacaaaatagaacataatgatatgatgaacttgattttggtcaaaaacttttagggtcagaaatagaatagaattcaaaccacaattgctagagttaaggaatagaaagttttagggttaggaagacgaattagagttagaattaaaactagttcgatcaaatttgggttcaagttatcattacgttcaattttggaaaacataagttccaaattaccattcaaaagagtaaaaatgttagcctataatttttgcaaaacatagttaaaattggtaataatagaagtaaaaagaacactaaaaattatcattgaattatttatagatatttatggtaaaatcttgtgatcatttgacattgttaaacatatattctaattaaaaaagatagtggcgaggcgatagtccattctatattggtcctctaaacttctacctttattataaaaacaatt

SEQ ID NO: 29031 - DNA, 1907 bp, Cannabis sativa
agaccatttacccaggtgacatggcggtgcttctttaccatttctccattattaaattaagtatcaataattaataaatagttaagtttagtttgtgacaatatataagtatttaagagaagtcaataagtatataatttgatatttatctacatattttttttattggtatatttaaattaatttttaaacaaaaaataaaaatttaataacttagaccaatcaaaaactcattaacttaacacttaacgaccaaatactgagatagctacagaagttagaaaaatataacttaaatattattaccgtcaaaaattaaagttagatatatatatcgtaaattatttcattaaattattaatattaatagataagggtaaatttcttttgttaaagttaccgattggatcctctttattttaaaatgacaaattaaatttattaaatgataaattagaccatctattttttaaaataatacaaaatataagttgatcttttatcaaaataaacttaataataactcgatctagatgttttataacaagactgtttatattttctgtaactattcatgctacaaattatcttcaagttagttgtataaaaaataaaaaattgaactcatggtactattttgtattattttagaaatacatagtccaatttattatttaacaaaactgggagtccgatcagtaacttttgccgaacacacggttcaaaatagtattaaccttatatataattggattgtttacaaaaatatatggaaaaaataacagcataagtactcaaaattttgtgtttgtaatcagaataaacctagtaattttggcggtacaagtacccagtgtttgtaaaactgtaattttcgttcagtttcgtcaatagagactctgttagtatcttaaaaaagatacatgtaagactcattcttatcaggtttggacagaaccatgtaatatcaattacttttaaatattcttttaataaaattcaaatcaaattgtgtactaactgaacttgatgaaaaatacaatttgactaatattaaatacttatgttgctaaaaaagattattaaatttatactgattacaaacacaattttaggtacttatatcactattatcatttaattataacctcttctaattaaaatttaaatttttggtctaagtgtatagttaaataatcgttcttttaactatatatatatatataacttatatatatttacatataatggttttcttttttaataaatcaaaattatgatgaatctcacaatatagttcacttgtggctgtttctctttggctcttcaaaagcaacggttaagtattaagagcatacaaaataaacaataaattactttttttttacacaacaaaacatgtttttagctagctcccgaaagtaaaaagattaaagtcaatgtagatgcttccgtgattgattctcagagttcttttgagggttggttagcccgagacaatggtggtcttttgcttcatggcttttcaaagattattccatgagtaatcactccaactttggccgaagctgtgggacttaaggaggttctaagttggattaagcaacaaaatctagttaatgtggtgattgaatccgattgtcaagtggtggttaatgcactaagttactaacacagtatgcaatttgcttcatctaaaatttccttttggcttaattgtttcaaattgtattagacttattcaaagtctaaataccatttatctattgtcaaacaatatgctaataagacaactaatttttggttcgggttgcttgtactcattcagatcatagttatggtgggacgattgtccctactgatttacaagctattttattagttgatttgcactaataaaatctacc

SEQ ID NO: 29032 - DNA, 3843 bp, Cannabis sativa
  modified_base (3434)..(3434): a, c, t, g, unknown or other
atgccgctaaaaataaacattgggattatgccacttacaaacttaagactttaggtacttatgccactatttaccctatattatatattatatgtttgaggtttgaatcacatttcttaattatttctccacacctttaatcatataatatctatcattaatggattttgtttatattatatatatatgtctatatggggcagtgacagtgtggacccctacataagttgagtgtgtagagtagtagaggtacgtagtagtgcaggggaggagggattagaagagagggaccggagacaagtagcgcagagaatacagaagagtactgttgcagttttgcagatgggtaatgtgggtggagtgggggcaatgtatgtacatgacgttgaacgcaacaattctttcactttcttacttgttattcccttgtttgaatatatgtcacatttcacattgtaaacaagttggcatgccaatttagagccggaaaaacgggtcacacgactcgaaatttgtacaagagttaacaaatttgggttcgactttaattaaatggattgttctcgggttgacacaactaatacgaaattgacccattaataatccatttaaagttattttagtattttaacatgtcaaaaatggattataaacatgtttaatataccataaatgtgcttatatttaaagaaaatatactttataaaaggattacacgtgtcaccccgcttataagcaggtcatgttcaggttttattttttgatacgattattaaacggatcgtgttcgggtcgagcacatacgtattatacataagtctcgacgcgatataaatacgacccgcaaacacaaattaccaccctacatgccatcttattattgtattaggaggctacaatattctagagttctacttctcactactaaaaaattgcaaattcccatcagttttatatagtcgggtaaagaattcctgacagtccacaaaactgtcgcgtatacgagcgtcgcgaatactaaagagaaaagacgatggttgaaaactgtcgggaaaatattatgggccacagttaataaccgtcgtctatagtgctcactattggcgacagtttaaaaccgtggcctatagtataggctacggtttaaaattgtcgcctatagtagtataggcacagttctaaaccgtcgcttatagtaaagttttcaagttaattttaaatttcgtatttttcaacgacggtttttgcaagtcattgagttgcccaaagagagaaaaaaataatttttttttttttacttttttctcctgtattaattaatttttactaatttataaattgtaactaattagttaaggtaaagtataaacataaattgaaaatcaacaaaaattgaagtttatacaaactacacactcaaacataaagtataaacatgaattaatctttagttatataaaagtaattggttatagtgtaaagtataaacaaaaactaaacatcataatagcccttgtcgcactgtctgtgctcggacgtattcaatccactgatcacgtagaagattcatctcgtcatttgagtacggattgctcttaccctgcaaaataaaacagaaagaaattatatattcattagtaatatatatgtggctataaatttctagtgctccttgtatttttttttttctactagatctctcaacttagccaacacatatttctatttctatttatgataaaagcataacaagcatatcattgtccatgcaattttgaactattagaacatgaaaactgtgacctaaaagatactgaaagcaaccaaataaaaaaaaataaacaagtcttaattaatcaaaagaacaaccagaaacaatacactagttcactagctaagaaaatattaaaaatataagcaaaaacaaaactctttcaaaaagggttgttactaagaactctttttaaagacaacactcaaatactaaactaagtataatgatcatcataaaatcactaaacaaataacccaaaacaaaaacctaacttctaatcccttagtaggggtttggtttggttggattatgtagaaacttagagaaatattacgagagaaagaagagcttctcttttttcgtttgcttctcctaagtcctacctaactaccacaaaattagtgaaggagaagcttacaacaaaccatcattgctatgcttacgtattattatataatatataatgactaccacaagataaattttaccattttctcacttggcatattggatcttcttcattcatgaaactataaatgaattttttcacatagtatccacattgcttcccgtttggctattgtggatatatcggagttatccactcgatgggacgatcattgcaccgggttgagcttttactaagcaggttgagtgacctacacaaaaattaaagttagcatataaaatatcagacacacttatatattgtgttggttatagaacttacatgttaacaatgtatttcaaatcttctggtatatatctattgctggaatcaaagtacgctaccgtatgcgtacttggttgcatgagtacaacgtaccatctaatgatacaagccactacacaaagaatcatatatgattagccaattgttataaattatgtagagttataaattatgaaactattaattttaaatttacttactaactgttgtagggtgcaataacccatttaactagattattaatttcagccatacatttgcgcagtgctcgagaacgggcattataatccctggcatcagtggcgatggccccaagatttaaaaatacatatagcctgtttaatccattaatgtctaacaaccattccttcaaaaatctaataaaaacacataattactaacaagttctcaaaataaattttcaagtttaataagagttgaatatcatacttgcacctgattgcaataggttggactcctaaaaattccatttgatagaattccttgatgtcaattgtttgatgccataccgaatcattttcaactccaaataaatcttagctgatctcaaagtggattgttgtcgattttggccacatactgaacaacttataaaaagtattgtttatcgaagtcctttttggtgcaacgtagcgaccttgtttactcaacaaagtgaagtgcttaatttacaatgcacctatcggttgtatactgcaggctatcaactactatcaagtaataaccatcaaaataaattaagctagacgaaaagaaaatatttaatgcaaagacaaaatttctaatacaataccacaagaattctattgttgtagtcacataagaattgaaagggggaggttgtgatcatgatgcatgattggggttattggaatatattttaccaggacctagatttactaacangtatgtttttaacatcctaaataggaactttgaaaacgatgaaaattaaacacatatatagtatgagaaaccttacattggttccagcggaattaaatgactccttccactgagatctctaactcttgtatcctttctgtagcagagtatgatcaagatctgagcccgaaactccttcagttatttggattcttcacagtcttacacactatgattgatgactaacttgctatgagtgggcatgcattcaattactaaagcttgaaattattttaatggtgaagaacactgtaggttttgaattagaagagagataagaagaagaagaagtctcaaactctctaattgtctgacaagaagaaaaataggtcaatagtcattagttggattatgagaccattcttttctt

SEQ ID NO: 29033 - DNA, 4969 bp, Cannabis sativa
aatcaaacttttttttgtatagtcgcatatggtggctcaacttggtggtggcgttgcagggttcaaatttttatttttctgtattggtttggtgaatgtggtgtggatggatgtaatttttctttcgttatttctagcgtttgtgtccattaataaccaacgcaaaataaataatcccgttagttaataatcgacccaacactccccaatttgtgtcagtggaatgtacgatggtcttttggactgatgcaaaaagcaaatatgtcaatttaatattagaattttataccctaaataaaactcaatttaaatgtaatcttaatttcattattagtaaaagaacataagttatttcgttacttatttcgtttattgcttggtgcacatgtttatttcatgatcatatatatttgatatataaattctattaaatcattaataattatatcattgtctacacaacagtaaataattatgattacatgatataaactattttagtctctcaatttattagtgcactagatttatactgacatgataatcatcgacgttgtttacttacacttgtttaagtagaatgtattttccaagacattagcaaagtaagcatgtatcagatgtattggttatacatcgaactggactgatattgacagtggaaaagatatcataaacttactgtatatcttttctaagtcaatgccacttatttgatcttataaaatcagtgatctcaatcctaagatgattaggttctagcctaattatactattcaggtttttggacttgttcattacccacttacccataggactagcctatacttacatattgagaatatagtagtacaattgagtgagaatgctaattataaatatgcaatctataacttctataaactcttagaattgaaataatggtttccttaagcttggataaatgagtttaaatggtagagcaatcatttcagtaattatattagtttactagaatatcatttacaagtagctaagtgttttaaggataaaataaattaaagggtaaaacaataaatttctctctattcgatgtaaactatccatagaggaacattgattgtttagattgaaacaatgggtacgtaattcatagtgtatatgttggcatatagagcattctatgtaatcaagactacaattctaaacctatagtggaattaggaagaattaataaaacaagaaatttattcataaattgtgggaactgcctattggagtttggttacataggcccatagtcccaaaactatttgggataatattgtcttgtagtcaattaattggtttcttgaaccaattagaattctaaaaaagactttatcttttttttaatgatttttactaagcaatgtgcctacaccaaaaatagccctatacatcaaaggttgacacgtgggaagaaagaaaacatcctggagttgagtagtcctaaatcataccacgtcgagatgggaggggtccctagcctgcccccaggttgactttgaaaactttaaaatgggtgtttggatccctctaatttgttttcaactcactatctttcagtattctataccatgaagacatagcctccaagtccagggtctgggagctaaaaacacacgaaacaacacatcagaaatgaacttgggcgcctagggtttcacccagcgcccaggttgaaaccccaactagggtttcagtttttgagatcgtttaagtgaaaatgggtcaaattttacactgggacatgaactagacataccacaaacatatttgaggcatcagaatcaaattcaaagaaatttcatttttgagcacccggtacccaggcacccaacgcccaggttgataatttctcaacttgggccacttccaagcatcaaactgcaaatccaactcatgcatcttctttgtcttcataaaaaattgggaaacaagtgtttttggggaagaaacagaccaacttgggggccaaaacaagggaccagcacccaggttgacacctggtgctagcctagtgccaagtttaacattttgtcaacttaggccaatttcaaggagtttatccaaaaagtcttccaggaatattctccattttcatcaaagattaagattcaactatttttggggagcaaacataattgtccgagggccttaaactggacccagtgtccagttaacacctggcactgggcccaacgcccaggctgacatattgtcaacctgggctgtttccaatcctctttctgaataagtgttctgggaattattctaacatcagaaataatgaagatacaaataaacttgaggagaaagaaataactacaggggcttcaaaactaagcttagtgtacaagttgacttggtgctgggcctagcgcccaggttgacaatcaacctggtgcgctggttttgatcactcaaatgcaaattttgctctgaaaattctttccaaaatggtcaaaaatagtgtaggagaccttgtccttaagttcaagaaagtgacaaaatagcagctcggaagctccaaaagaaacccccaacacccaagttgacatatggcttggtgcgctgggttctgcttatccgattctgattttttcttaattgttcatatagtttttcatagtaactgagagctatgaagtcataagagtcaaatttacaacttcacatttcatttttctagcaaagtgacttacacaaaaatcgggtagtttcgagtctctcatttttacagaatagcaacatctccaagaactggtgaccaattttaccagaacatagaaactagctaactgatgtagtgctagtatccactacagaactagagtatatttcccttactaaagttgtcaaggaagctctatggttaaaggtaatcatgactgaatcggggtttgatcaaagggatgtaagtgtgcactgtgactttcaaagtgctatacacttagctaaaagcactatatgtttcatgaaaggatgaaatacattgacatcaaactttatttcttaagggacatagttaaaaatggactcatcaaggtggttaagattgccacagagagcaaccctgctaatatgctaactaatgtgataccagtgagcaattcagtattacattagactttcttggtatcaagactttattcccggagctttgccaaagtagtcgctaattcactcacaggttacacttaaggaaatagaaatcaaggtgaaaaattgtgaagatttggtccttatatctttggacctttgttagacttttgtctaatctgactcatgttgcattagaagaccagttagttgtaacatccaactgtccaagactcaggtcaacagttgataacggaattcattaattttgttacaactaacttcagctctcttctttcaaaaaaaatcttcaactttctccttctctctttctcgccttatatatagagtttagatttgatcaacttagaattgagacaattgtaatgtacaatgatatttctagagaaaatttcagagagagagaacttgtgccattcagagagaaatttgtaatgcgagttggagatcatttctgatttgagtgtgtaacctcattctttatagtgaagtcgactcaaagcactgcctactcgaatcttaaccaaataaatttagcactccattagatactcttatatatctaacaacattttagtaaaaaaaatagaggaaaatatttttttagaaatttattggataacttctttttatttatatataactctggattgataaaataatatttttctaattgaatattagaaaatatgaaacaaatatttggcatatattgacactcatttcattattgaatatattttataggcatggttagggagttataatataataacatgtttgccaacttaaaactctagggatatggtacttgtcatattattgttccatgtgggactcttagggtcctttaatatatatggataatcccattaatttgatgtaatttataacgcatatataaagggcaaatcattcacaattctttcccaaacaacattacaaaacttttgcagctaagccaaatgggttcacttcaaagtgagagtactaataataacgcatttggctcagtactagagcttcaacagttcgatatagcaaatgtcgaggaaggtgctgttaatcatcatcatcataatcatggtgatcatatcaaaacatcatcatcgtcatcatctgatcatgagaatatggtcctcaacattcctgatcctccaactatctggcaggagcttctttgttcaatcaaatacgagtctctttgttccaagaaaaagaaaaatattcataccaagaatacagttaaccattcttcgttccttccaactctatttcccatcttccgatggggaagacattataatttttctatgttcaaaaatgacttcatgtctggtttaactctggctagtcttagcattcctcaggtacgtacgtactacctctttatatttatatatactcaaaattcttctacataacttaattaattagtgttacatttgttttgtgtagagtataggatatgcaaatctagcaaagcttgatccacagtatggcctctgtaagttattttacgatgacccctctgcatataatttcactttataaatctattcattatatatatatgtatttatattattatatatgatgatatacagacacaagcgttgtcccacctctaatttatgctgtaatggggagctcaagagatttagccattggaccagtagctgtggtttcattactaatatcctctttggttccggagattcaagaccctgtaactgaccctgtcgcctataccaaccttgttttcactgttacattctttgctggggttttccaagcttcctttggattcttaaggtttatatat

SEQ ID NO: 29034 - DNA, 3714 bp, Cannabis sativa
ctggactggtctgtttatttatggtccaccggttcgggcggacaagaaggtgttttgggaggcccgaatgatggaaattatgtctctaaatcatccgtgggtcttggttggggatcttaataccatctctggccaatgtgataagttcggtggtcgattggttgaggagggagagggccacttcctcttggatttgatgactgtcacgggggtgtggatcttggttgcacgggtaatttctttacttggtcgaatggccggagtctcccggcccttgtcaaagaacgtcttgatcgggccatttgtgaccctgattggatcatcctgtatcccaaggcgggggttaaatctttggctatcaaagattcggaccatgctgcggtgttgctggatctcctctttgaccgtgagaggttcaaaacaccttttcggtatctggatgcttggtcgagagacgaaagctgtaaggatgttattagggaggcgtgggcaatttctgttcatgggattaggagtttccaactggtatcgaaattggataatactcgcagaagattatcgatatggaatagaactcattttggattgtgcaaggagaaattgaagactctgaatcgtcttctccttgaagtccaacaacgaatcccctcggaggataatctcaaactagaagcagacatccttttggaaattgaggaagttgagatcaggcaagcggagatttggaaacaaaaatctcgggagttgtggtataaagatggtgatagaaattctagattttttcatgccgcaacagtcatcaaaagaaaacgtaattttattgattcggtcacgccagatggtttgggatggatctcgggtagaaatgcagtgggggattattttcgagctaatttcatctcgctgttgtcttcttcctcccctcctccccctcaattgcagcatctgattcaaacgataatctctgatggtacaaattctaatcttatccgtcccccttcggcttccgagatcaaggaggttgtgtggtcaatgccccctcttaaagctccggggcccgatggtatgccggggaagttcttcaaggaccattgggagatagttggccaggatgtaattgatgctgtgaaaaaattctttgaaaatggtgaattggataggagaattaatcagacgtttatggtgttgatcccgaagaagattggagctaattgtttcgatgactataggccaattagcttatgtaactttacctataaaatcattgcaaagctattggctaatagaattaagcctctgttatctgacattatctccccaacccaatcggcctttgccccgggtcgatggattgcggagaactccatcctggcccatgagataatggattccttcaaaaaatgcaaggggagaagcggattcgttggtcttaagttggatatgtcgaaggcgtatgatcgcattgaattgggttttttggagcatgttcttggagcttttggttttggtgggcactttattcgtctcttaatgaaatgtgtgcgatcggtttccttctcgatacttctgaatggaggtcctctcaagcaattctaccctaaaagaggcctctgccaaggcgatccgctgtccccttacctgttcatcttgtgtagtgaagttttgtctcgtcttttgctgcgggaggaggatcatggccgtatcacgggctttaaggttagtcgaagtagtccccctatatctcatttaatgtacgctgatgatactctaatattttgtaaagcggatatggaggaaattgagactgttcaagagtgcatccggacctattgtgaatggtctgggcaatgtattaatgttagaaaatctgcctatgttttctctaagaatatggatgactcaaggaaggctgagattgttagtttgctgggcttccgcggtatgaatagagatgataaattcttgggaaaccccattctttggtcgaatagcaaggtgaaggattttaagtttatcaaagagcggttatgtgccagaattgaaggttggcgctgcaaactcctatcccaagcgggtcgaacttcccttattcgttcggtggctgcaagtacccctgtgtattctatgtcaacattccttctcccaaaagtgttgtgccatgagatggatcaagccatcaggaagttctggtggataggcaatgccgagaaggatcgctaccttgctctcacaaattggaataccatgtgctcccctttggaggatgggggtctaaattttaaaaaatttgaagacatgaacttggcgcttgtagccaaacttggttggaaattggctaaaggggagaattcgctatggacaagggtcttttgtgctaagtattgggaaggggggattaagtctttttggaaccatgactctcctaaatccctatcctttggagcccgtagtatcctagcttctcgagatctcattcgtaaagaatcttgtttccttattgccaatgggagagccactaacttacggcatgccccgtggatcccgtggttggattgggaccaatttagagctgccttcaatcctatgatcactccgatttccactcatgtctcctctcttttgaatgaagagagggagtgggattaccttcaagcggccacttggatggtcccaagtgttgcaagctccctccatttgatctccttgctccccatccaccatgaggataggctgatttggaaggatgcaactaatggggaattctctccccgggtggcatataaatcaatcatcaaggggagattaggtgagaaagatctgttctggggaagaatttggaaacttaagatatcggaaaggatgaaactcttcctttggaaacttggaagagatatcttgccgtttggtgaaagactccaacgtatttttggcaatgatgtggtgtgtgctgtttgtgaagaacattaagactcgactgtccatctgttttgccactgccctcttgcaaaatccctctggatggcaagtccgtggggtgttcgtagtgaggagttgaatttcagtagccccctacaatttgctaagtggctggttgagcctttccctttgacccagcaagccaattttgaagtggaggagttcaggaaatatggaatttccctctgttatgttctttggtctgtaaggaatcaagtgttccatgatcatattcagccatcctttctcactaccttcaactgaattaagtgcctgattgaggacttgaactcagtctataccaatcatctggatgcgaactcgggccatccttctctctcggatttgcaggaacctttacttggagattttgtggtgtatgttgatgcggcctgcaaggatcttcgctcggctgcgggcattatcaccaccaattcgaactctgcatttgtggaagccttctcggtcgcccttcaggcaaaatcgccgctggaagccgaggcttgggcgttacttcacgcggttcatcgttgtgttcgtcttggtaggcacaatgttaactttgttttggattgccaatctctggtgtatggtattaagcagcgcaagaccccggattggaagatggcggctgtgtttgagctgctcttggacgggttggatcgcatcccgttggcctcagtttcgtggattccccgttctaggaatgaaatagcccataggcttgctaaatggtct

SEQ ID NO: 29035 - DNA, 2248 bp, Cannabis sativa
  modified_base (31)..(34): a, c, t, g, unknown or other
attaatcataaacaactgctaatttccaaannnnctaagcgggctttacagaaaaccttcgaacactttgaatggagggttagcccccaatactatacagacaatcgacgatctccagtatgaagcctctatttcaatttcatctaaatcaagcttggttaccaactggtcttcaattttcaatggttcagtaaaattcagttgggaagaaggagttctcacctgattaacttttgaacttactctacgccaccttagccgattcctggaaatcaatcttctccgacttgtttgctcaatttaacattttaggggtcgatttcagtggattaatctgtgtctccttccattccagctccagatcttcacacgggtccaaaaacacctttgtttgagcagaggcttcttcttcttggattaaaggaagctctagtttctctttcgaattgctcattcctcttgattctatcttcgatacaatttttttcttcttttctatgagaggaaaaaaggagcatcacccgcttatttccatattttttttaaaatttaaattgtaatatatttttttaaaacaacactttcgatttcttagcattcaatataatatatacaaaaaatattgcaaacatgtaatagtcttgaccggcctctccatcatatcataatggttatgaagtctaaattgctttaacaacctttaatacctcattcatcaaaaaaaaaaaaaaacaaaaatctttaatatctcataagaaattatgacaagaagaaaaagtagccttgctgaattgcttatcatcactagtacttcccataaattttagcaacaaggctatgtgtaaagtagattctttttcatttttattttttttaatctaaggtgtaaagtagattctttaattcttatgcgtggttgatagtagttggtgcacaaaaagttacttttgcattcatcttcagaaatacaaaacaataaaaagataatcttgtccaatgtatatattattaacattacacagatttatgttaataataataataataataataaccaaatcgttaaatatatctataaggcaacctgtaaagaaaagctctcgactatgtagtcagatgttacattaaacttaaacgcatatttgcgaaaagtggaaaaactctctctctctctctcgaatattatgatcattacttaaactttattctaattttgataatattttgtaacatgaaatgggacaccttaagtccatcgacatttactagacagctgggttggaaattttagacaaccaatcagaaatttcaaacactttatcacaaaatgttattttaccaatgtataggtataccataagaaataaataaataataaaatataacaaaagaacaataacctgaaaaagagactattttaatctattaatgaaatgttatccccatatacatgtgaacataaaaaagtgaaaacgcattcataataacaaagtaatacaaaagaagatttttcttaagaacattttcttacttaaattaagggtaacattaattcaaaccaccaaaaagatcttcccggttcctcattcctcattaggattgtcctattctcatcttttcaattgtttattaattacatgtacatatataaacatatttgtactttgttttattgaagaaacatagtaaaagctcaccatttactataattaaattatagtgaagtttcttttaaggttagtgaccttttctcaaatgctaccaacattatataaataaatatatctatatatatatatatttcattgatagcgcttcatttgaaaggcattttatgttatgaataataaagaagaaatcaaagtattgatgatgatgataaagctcaaaagacaaaatattggtcgatacacacttgatgagactaattagagagagtactcctgtgttgtaaattatcattccacattccggggcctctctcttttgttcttttttttttcttccttgtgaacacagactagagtctcacaatatcacgttacactttttattaaaaacaaaacactttgttgtgaattaatttgattcacatattaaatacaactttatatatggatcatcaacaggcggatctaggaatgttgagggagggctaaagcctaccctaagatttgataatatattaatatacaatttttgttttcacatatacatagtattagaatttgtgtacctattctagtgt

SEQ ID NO: 29036 - DNA, 5483 bp, Cannabis sativa
atctttgattttgttctttttatattcaagcttaaatcaagataaaatgaatctaaatatgaaaaagatacgttagacaagaacttggggcttacaaaattgatgcccattttgtagtttcaagagtcaagagaagcaaactcggttctcggttcacttcacatccacatcatcaagtcaactccacacaagtgtaaagtctacttgaggagcaaatgctaacaaaaacctttccttggtgacgtggacataaatgtttgacacatctcaagaaagataatatcttcgagtttagtagcctcgagtcatagtagtcgacctaggaagggtccctagccctgagcccaggttaactttgggaactccaaagtggaagttcacactttggtatcttgtttccaactcactatattttagtattttgtaccatgaagacatggagcaaccaagtcaaggtcttgggagctaaaaatatagaaatcaacaccttggaagtcaacctaggcacctagggattcactcagcgcccaagttgacatcctcaagaaggatataattttttggaaccctcttagtgcgaatgggacaaaatttgctttaggacatgaaatagacataacaaaaacatattttagggatcagaattagattcgaagaattttcatttttgagcacctagacactcggtgcccgggcaccccagcacccaggttgacaatctatcaatttgggctatttccaaacatcagatcaaaaatctaactcatataacttcatcatcttcatctaaaacgaggaaagaggtacttttagggaaaaaactatcccatcctaggtgctaaaaaaagggcccagtgcctaggttgacacatgtagttggcccactgcccaagttgacattttgttaacctgggccaatttcgaagagtttttctaagaagtcttcggggattattttccatttttagcaaagattaaggtttaactatttttgcggactaaatggaactttcaggtggcctgaaattggacctagcgccaaagttgacacctggtgctgggcccaatgcctaggttgacatattatcaacctcgatccttccaatcagtttctcaaaaaaattattcatgacattttttccatcattagaaataacaaaaatacaagcaaacttggggagaaaaccataaactcgaaggtttggaaactgagcccaacacccatattgaccttggttggtgatgggcccagtgcccaggttgacaatcaacctagtacgctggtttcaattattcaaatgccaattttgcttcaagaattctctctaaaatagtcaaagatgggttatgagacctcatcctcaagttctataaccttggaagtatcaaaatgacatcctcaaagctccaaaataagcacctagcacccaggttgtcaaatggcctggtgcgttgggttctacttagcaaattttaattttgtctcaacagttcatctagcttttcacaataactaagggccataaagtgaaaaaatttgaattcataatttcgtattttcacatttctgacaaggtgatttacttagaaagcaagtagttttgagtctcccgtttctgcaaaatagaaacatctttgagaacaagtgatcagcttcgctagaacacaatggatgacatgatggaaaaatatcacttaggcattaaaaaataaatcctaacacattttcccactcacccagtgtccaggtttacatcacatgtcaacctaggcattggatgtcagcctgggcattagatgtcaactttagcgctaggatgtcaacctgggtgcttggcccagaaaaccttcaatatggtcataactcactcaatattgatctaattgatgtgatcaagtcatgtatcactcttcaatcacaattttgaagttataaactaaaaatttcaccccaaaggagttacgaatttaagttatagcttacccagagcaggtcctatcgtcgcgactcgaactctgaatattggaaatcaacctcaaaagttaattttcaccattagatcatcatctacggtcaacaatagcctaattatatttttctatattttttggattattttattcccatttaatatgacctccttcacctataaaaggagagctcctctaggtcattattcatattcaaaaaaagtagccataaggttagagcatctctatctagtttctctcactagaaattagagcatccaaacttagccattttctgtaatccatcatgagaaaaaaaaaactcgaagtaggcatagctccattactttcgcagtatagggagtcaactactataaatttatgtatctctctatttatacttaacatatctctcattcttgccaatctagtgagtaagtgtggtttaggagtctgtgtccaaatttagtctatacaaggtgttatacccaaaatttggctggtacttcagaagaggacacgtgtcaacctaggagaatactaatcaacgaatataataataattatattaaaaggtattaaaatggaataacttattaaatgcagagttgatagagtatatttacaactcgctaattgtaaaatcttaagcgagataaggatatacaaactattgcctcatgcattgatgagaaaccattccccgacagaagcgcatacataaggatgacatctgtggtacaaagcgagccatcaacctcgctacatataaagagatgtagacgagacatgttgctatttaaaaatttagcgtataacatacattatacaaactaagcataacagttgaatgaatctgaacaataatagcgaggcatccttctcgctataggaaggcatactcatggtaccttcactaattagcttcagacatctttcaatgagatccactgctccgtctagtcagctctctcagaaagaagccgacattcaaaagatgttgactgctgaagttcaccttatcaccaacaactgcgattgttagatggagtgttatgtcttcaatagcagaatcgacgagatttacattaataaccttagaaagacatgggaaaagctccagctcgttgccagggttattgttgctaagttctcagcgagattccccaacaagatacactttgcagcgtatctaaacccacgtcagccttaacccagtaaaagtggataaatcacatctgtgtgattttcaaataataaccgcatttattttatgtgagatgtaatcaaatcttataattttaggaaaaatattgttgtgggatattaaacttattgtaattaatgtcctccctatgtaaccataaataggggcatagtatactaataagatagactcatggactgcgtagaattttaaccgcaaaaccacgtaaaaaaagctttgtgttatttcttcttcttcgactattattatttctgtgcaatccatcacgaaataggctataattaagttaatgaaaatctgtgttaatagtttggtgctttcattgagagcctacgtgaaaaaagcttagacaaaccctcaagatcaaaagaaagacctttctccatggctgataatggagaaaatgttggtactcatcctgaagaaaccactcaacgtcctggaaaagagccaatgggctcacagaggcctcccaactcacgatctacacggaccactcgttttagaaaggccaaacatgaaggtggcccgagtacgcggtccacatgatcaaggaggactcatcatgaaaatgtccagaacccagaagtaggggatgaagagcccaatctgggaggtgctccaccacagaatatgataatgaaggtgcctatgataccacaagatacgtgccaattgtcgagttggagaatcaccatctcaggcaccgcctagaggaggaaaaccaatgaaatgctgagttagaatgggaggcagccgcagccaaggcggcacaagaaaatagtgcacaaaaccaacctgatcctagagtgagaagaccacgaggcagacctcgtggctcacgaactaggaggcaagagacggctcaggagaatcctcaaaacactcaggaagaacaacctggggaaactgagggtccccctgagaatgaacaactaaatgatcaactagagccctctcacaaaaatgagaacagaaggcaaccaggaaccagggaacgggaaatcccccatgggaacgagggaaatcctgggactcagcttggggcatgtgcgtcactaacaagacatcgctaacatccttctcgaaccaacagggaaggggcatgtacaaaccctagcagggggcacgcaacgacccatacccaaggaagaaggacgagccgtgaagaggcgagtgttacctcagaacacatgagaacccatagtcgatcaacacgaggaagggaaagaactaattgcaataatgatcgagaaagtataggcataagtaaaactgaaagttactcaaggacgaggtccatgatcaggacgagatccatgagtaggatgaggtccgttagcaactataaccaacaacaaccggatcttcgtgcttacttgaaccaaaaaaaaaaactgatctttgccaatagctcggataaaagtaagaggatcctatccaattgcaaattaatgaattggaggaaaaattcaggaggtatcaatttggggagcagggaaaacagtttggatatgactcggatgaggaactcgagccttttcatccagacatcatgaacactgcatttccctagggattcaagaacccacatgtctcctcgtatgatgggaccatagatccagtctcgcatttaattaatttcaatactatcaagcgagccagcaatgttacgaacaatctacattgtattttgttccccactttttgctatagttagttgggagcacagcaagcagctggttcaacaaatttagtcatcattcaatcacctcttgggaacagttgtctaaggacttcaaaaaacagttccaggccacaagggataggcgaccaaggcatcctcactcattaacataaagcaatagccgagcgagatccttaaagcctacttaagtcattttagcatagctgctgtgaggatgagaaacctggaggatagtagccagcttactcctctgcagggatcactactgatctctccactgctagaggcgagctatgggatgacctacagggtcgcccagttaaaaatattatcgagtttaatgaaagatctcaagtatatgttcagaaagaggaagccaaaaaagagatgaagttgttaaagactggctcgggaaataaacccaatagtgtttcaataagcaccgtctcgaccaaggctgataatccaggagcctctagttcaaagagaaaggataactctaaggagtcagctaacgacaagaaaaagcaaaagttggacgacaaatacgtaccaatttacaccatttataccaag

SEQ ID NO: 29037 - DNA, 2413 bp, Cannabis sativa
attttaatgttcaatgattatttttatatttttatagtattttataaaagtattacataaaagtaataaaaaaataacattcaaacaatatcaaaacaataataataataaaaaagctaattatgatttttacctactaaactttaacatgtaccaaaccatgtccttgaattttatggttaaaaattttccctgaactattgaaattgttagatttaaggactttgtctaatttcattcaattttgctatttcagtgattgtttatgtactaaatcatactccccagactttgatatctactaaatcatatcccctgaattttcatccatgttagactttttttactaaaattagatcaaaattcttaaattcaacaatctcaatagtttaggggtatttttagccaccttaaaagttcaaggagcataatttaatagatgccaaagttcagagaaaaaatagccaaaaaaaaacatatccaccaaagaaggtattaggagggtgtatgagaatggtaggattgaatgcatgtaactcaaaaaatgtaatatgggacgcttttataaaaaataaaagcatgcacaccaatattaaattatacagaaatatagtagtatgggcataaaaacatgttagatgctctttggtattttccctcttttatagattcttttatttagatgcaaaagtgaacaattctttggaaaagcattggaccaatttcttttatataggttgatgtaaaagtttatgcccaacaatttcttttacatgagagttatttgaaggagaggtgtacatcgggtgagttttgacgaatttcggattttcgagttcaagtgtatagaattagtacattgaactcgcccgtttgtgtgatcgagtttttaggttttgggtacaggttaaggtggctttttttgggggaaaaaaattatatttttatacatttttcataaaaaaataaggaaaatgaagaagaaagaaaataaaaatgatatatcattatttataattatttttttctgacgcttatttttcaaaaaatgtataaaaaaaattaaaataaataaataaattatacatgtaaaagctaacaaaatagaagatccaatcaataccatttataaaaacaaagattcaatcaatgactatgttttcttagcttttataagttattttttagcttttagaattaaaaaaaattcttctaggggtgtttggataaaaattaaaagagcattgttatgggcaccagtgctacccagtgggtgtacatcgatcggtttgattgagttatagagtatttttatcaatccaaatccaatataaatgtcagtttgtaaatatctaattgtaacccgtctaataaaaaaattaaaaaaaaaagtgtaacccacctaatgatttttgtcgatttggtcgggttaactcattttaaaccgatcttgattttttttttttttattattgttagttttttggtgttcaattaattgatttgaaaaaataaatatatagcatatgtctttcaagattaaatggttatagtttaaattaatgttaaaaaatacaaatataatttaaataaacattaaagtattaaacaacattttttaaaaaatagaagtaaaaaatatattcctaaattctaaattataacttcaatatttaaatataatcaacagtatcatcaataaaatctaaatttaaaattaaacactataaaatataaattttaagtgtaaaataatttaattattaaacgtaatttatatatcatataatagataattttagtaaaaaaatatgtaagtcggtttattcgatttatttgagcgggttagaataatatttaacccacccaatatattcatttggagattttaatttttcataaagttattcgagttgtaatttttgtcggtttattcagtttgggttgagcggtttgtaatttttttttttaacaaccttagtgccccgcacctattataagtagcgccctatgattggttagcgatattccttaaaagttattttcttaagttatataggacccgatacttaataacactaataataatatgatactgagaagagtgttagacactattgatgttgttagttgttatcatatgaattagtgtaaaggtttattagtaatttgtaattggtgtaagaacctatacatatgtaattgtatagctattattaaatatagattgagaaaataaaactttaattcaattaggagattaacactgtcgcattttgaaaatttatcctgtattaaagagaacccatcacctaagaagtgccttttagcaattctaaaataaaaaatcattttaaaaatgctaaaatttatagcttcctaaaaaaaattttgaaaaattatttttaaaatt

SEQ ID NO: 29038 - DNA, 6261 bp, Cannabis sativa
attcaaaattttgaacttttggactaaaaattccattgctgtgcaaaatttttatttttgatcccttgattggacctggttggtatgaccaacttgttcccattcgttaccccaaccaaattctcatcttgtgtcctacctgttagataacccggtgaaggaggcaaacaccatatcgaccaggagctacttcaactcttatatgaggatcatccttgcctctgtgcgagtccgtcctcatccagtgacaacctttccaactctagcttcgaatattgggaaataagtagtgaacacacaccttcccaagaacccgaggtgcaacaccacttttatccttgctagatcgaaggtcaaggctacagacgcttcatttgggagcttagaaaggggtggagacactaccttccatccaactggacatatatttctacctagatatcgctgataccttgcccgtaggctgtccaaatcctgttgctgcaagtaaacccgttgctacgtttgttgtgaccatcgctagacataccaacaaagtttcgtccaggctgaggatgttggcacgaactaagaaaattgtgtggaagtcttcactgtccgacgcacaaattgcccgtgttgctactttgtcaaatactaagcagacccgacctgctacttaagaggaagatactgttggggacgttgaagtccaagagatggaggaccagggcgaggtttttcttgatacttcttctgaggctaaacatgaggaaggtgcagctcggaggctgtcatttggtggcttcaacaaagagggacaaccgatgtctgaggccggggaggtcctaaaggccggtgaagattatatcactgaggaatacattgaggccatttctttgaggaggcaaggcacactaagagattggtgggtttctcctccctctgtggtgaccagggcaaagatgaagaattcgctcaagcatggttacttaggggatgtcaaatgcttctttccctcccccaaccagttggcaactagtccaagggaagtttactgcgcctagttgggcatccacaccaagaaaggtgctatgttagccttgcttccgtacttcaggaggatcgcagactattaccaccttagcttaacccaatttactcttaagggcatcaaatacttatccgccctgttcatcatttatgcctcttaaggatggggtgagccgtccccacatgacaccaactggctctttaatctgaagtcaagttccaagcaaaacagattgggatacttctatttttctcagttcaaggagaagtggctgacgggaaccacgaataccgtggtgagtaaactagggaactttgtggatgagtactactttttccaaggaatggacactgtccataccagcttccagcaggtgccatcttactacctttctccattcacattggggctcaagaggagagcacaaaaaattcttcaactgccagacactgcatggaacatcactctcctggccattgaggccaatttcgttaagtataaactctacttagccgatttcatgccaagggcagtgaagaaggcaaataaggtaaagcccgaccaggaggatgtaattgaacaggaaaaatcgagtaaaaagaggaagaaggctcctccaagtaatcaggcaccagctgaatgaacgttctatcagaataagggaaaggtcgttttgatagagcaggaacaagaagactcttcagacgatgaacctccatcccttcttgtttaggagaatgctttcgcctacatgcaaggtattttaactttcatttgttcatcttctgacgttccttatatcatatttgcctttaactttcttgtttttttcatatgtaagtatcagaaggtgtttcaggccctgaagaaaaggttaggagatagctcgggtcagacccctccacccaaacgaccaagaggcgacaagaaaccgtccaaagagaagagtctacccgagacatttatcaacctctctgaaaaggtggtgcctgcagtggagctccaacccagagggcatccaaatccaaaggtgccaagggaggtagttcgaatggacctagtccgatcaaatcctccaacagtgccataatgctcagctccgaagccaagaagggcaaggagatgcatcaatactacctcgatcggttacttcccgaggtgagtgattagttggtcagggttggtaatgagttgtccgtggagcttctgatgggtgggctcctgaaggaggcaacttgcgtaagtattttcttcttagtttttatcctgtctttttaccagtgtagattttaactttttcctgtgtagctcgatttgaagatggcttacgcttactcctgagtcaaatttactgccctgaagaatatcaccaccaccaccaatctgtagaaggaggtggatacaacctagaaggaggtcgatactgtaagggttgagctgggtgaagtgaacaagaagattttagatgccaataaatggattgaggggctgaccaaagaaattaaggagatgccatctaccgcccagctcgaggcagaaaacgaggctctatccaaggagctcaatgagcttaaggacgagagggagggtctccgcactcttctttcaaagttaaccaaggataagagaagaggacgtcaaatctaggcaaacgagggaagaaaagctcttaaaggaggttgaaagcttggaaactactgcccttgaagttttctatgagttctggaaggtgaacccagagtgaaactttgattacctcggagataccaaagaggtatatcttagttatcgtgcgggtcaagtagacaaagaaagccttgaggcagctaattccacggccctgaccgaccagaacaatgagatcatagcctctaacgaccataatattgagcctctaacccctactaaccaagctgaaccatatagggagcccgagactcccgtagtttaaatattttcttttttcctgtttggcccatgggcctttattaaagataatatgaccgaccgagcggtttttaaacttggtaatatttcattttattttgagacgactagctgaccgggcaacctttaatcccaagtttataccatgcttttgtcatcttttaaaggaatattttcccttgtttcagtaattgtacgtgcgaactaatctgttgttttttgagcttgttatttatcttgttacttactaatgctttgtacgggtatagttgcctcccaagtgattgagcagacttatgactcttggtcacttgcatttgacaagtatgatttttgtctgttcggctctttgggtcgagcagaccttttgtacacattaatggtaaattcataaatcgctaacataataaacacaattggaatgataattaatatcgttattcatttattagtccgaacagttttgttaccgtggtaacttacatttatgacagctattaaatgatctaactgatctttagccaaatttaaacataaaacaattacacgtaaggaaaaaattgtacttttgaaagtggtcattcgacctcaatacttagttatttacttgaaacctttgagcggggtccgcccagaaggccatatgcttaaaaataaatgttcttgcattgtgtacttaaagtggtcatcgaccttgtatacttactggtagtatttctaataccttggtactagaacgagctccatatttttgtcatactgcccaagcttttatgcccctaattctgtaacttcgaccacctgatatggtccttcccaatgaggtccgagcacactagctgtgctgtcttttgtcttcaagaatactcttttgaggaccatatctcccacaaagaattttctcgccctcacatgcttattgaactatcaagccaccttttttgtgtgctgctaacttaggtttgctgaggctcatttttcttcaatttcatcaagtgattctgctaggagagcatgattagcttcttgatcgtaggtcaatcttctatgggatggaggttctaattctacgggcaacatagcttcataaccatatgccatagcaaacagtgtttgtccaattgctgttttttttgttgttggtatgaccacaatacttctggtagttcctccggccaattccctttagcttcttcaagtcatttttttcatagtgtctttgagtgtcttattgattgcttcgacctgaccatttgattgagggtgtgccactgcggagaaactcttgatgattgagggtgtcctacaaaaatctgtaaacatctggctgtcaaattgtttgccattgtctgaaacaattttgtgcaggagtctaaactgacatattatgttcttcataagaaattccaatacttttttagaagtgattgttgctagaggctcagcttctgtccactttgtgaaataatccactgcaaccaatgcatactgtacccctcccttgcccttgggcagttgtctgatcaagtctattccctaaatagcaaaaggccaatgactttgcatctgagttagcttgttaggcggtgcacggggtatttttgaaaatttctggcatttatcacatttctttacataggcctttgaatcttccatcatggttggccaaaaatatccttgccttagttttttctttgataggctttgccctgctgtgtggttgccacaaaatccatcatgtacctcggacaagagcctcatagcttcttctttcgttacacatctaagtaattgcatggagaaacctcttctatacattacaccttctactatgatatactgtgcagctttcctcatcatttttcgagcttcgtttctttcatttggaagttctccagtattgaggtaggctgctatgggtgttgtccagtttggtgctgtgtctatcatttccatttcttctgcacaattgatgctgggctcttctaagaattgaatagggactagattggcctttctgttactgtgctgctcccaagttggggtaaaacgtcagcagttgtgttttcttctcttagaatttgcatgagggtgtaagccttgaattgtgcgagcatgtcttgaatcttgtttagataagccatcatcttctctccctgggcctcgtctctcctgaaaaatgattcactaccaattgtgaatcactacagacctcgatataattagcatgcagctcccgagcaagttttaagccagcaatgagggcttcgtactctgcttcattattggaggctttaaacccaaatttgactgctccgtgcatatgtttccccccagaagtgacaagggcaattattgcaccataaagttggtctgtagccaacccgtctacgtgcaatttccaagtaagtctgtcttcattattgtcgagcaggggttcttgtaccggctttgggttgtcccttatgctgctttcttctttgcctgtgcactcaaccataaagtgttctaaggcctatactttaactatttttcagggttggacgattattttgcactaacccaactctatttcccatttaagtaaccgtccagaggcatcagctttttgcaatatttggcgcaatggttggtcggtgtatacccgaacaggatgagtctggaaataaggccttaacttcctcgttgctaagattaggcagtaagtgagcttctttatcaaatgataccatccctcagctttgaacaagccctttgattatatagtagactagatgctggacgttgttctcttctcttatcaacacggcacttacagcatactctataacgactaagtatattcttaaatcttctctgtccagtggttttgagagtacgagaggctttgaaagttgtctttttaactcttggaaagtgttctcgcattcttccgtccattcaaattttttgttacctcgaaggatgttgaagaaaggaacacacttgtttgttgacttcaaaacgaatctactgagtgcggctatccgaccagttaagctttggacttctttagtttttattgatgatttcatatccaggagggcttgtattttctgtagatttgcttctataccccaagcattaacaataaaaccaagaaacttacacaagctgactccaaaggagaactttaagggattgagtttcatgttgtattttctaaggattttgaaagcattcagccagatcctttatatgccccccaaccttcctagatttgacgagcatatcatccacat

SEQ ID NO: 29039 - DNA, 1715 bp, Cannabis sativa
acatgcctaacaaaagcttagactccttcatatttggtatttatttcaactagataatctccatttcgatttgtatatcatagctcataataatttaatgtttcgggaaaaatgtattatttgcaagatgacacaaaaagggccttattgaattgggagatacgctttgacattattatggggatagctcgagggcttctttatcttcatcaagactctagactaagaatcattcacagagatttgaagaccagtaatattcttttagattgtgatatgaatcccaaaatatctgactttggcttggcaaggatggttggaggcaaaaaaacagaggacaacacaaacagagtagttggaacttagtaagtttctttcatcttgacactcatttataaagtgggaattcatgcatggaaaccaatccaaactgacttatatctcataattcattaaataataatgttgaacagtggttacatgtcaccagaatacgttcaaggaggagttttctctgtcaaatcggatgtgtttagctttggggttgttctacttgagattgtaagtggaaaagggagcacacgatttgtccatttcgaatgtgatgaacccctaagcctcctcggttatgtgagtgtgaacactacacttttttttctcgatcaatttactttcctctttctgctaaccaaatgggataatcaatatttttcccaggtatggaaactttggacagaaagcaaagtgttggaattaatggaccaaactttagaggaaagttacaaagaagatcaatttattaagtgtgtaaatattgggctcttgtgcgtacaagaagaggcaagtgatcggcccaacatgtcaaacatcgtaaccatgcttgactgtgactttgtaacccttccatctcctaaacaaccagcttttgtccacagaagagactcaagtagcacaccttcttctagtaataagcctggaacgaatgctgaaataagttataccatggaagaaggccgatagagttccatgaaggaagattcagttgagttagtcttctgctaggttagtttatgtaatggtctttaaatgctcttgcttaagggattatgtatcatatagtttattatcataatttttccctcccattctttaaccgtcatgttgtacaaggttaaaataggaatagcatatttgtataaatgattaaaaatgaaaaatggctagaagcatctccaatggtagcatcctttaaaatgctaaaagtttacatattatctaaaaatataatattttattttatctctcttccttatatttttggtactcttacttttaaaaacacttcaatgtatagcactcatgttataattatctcacacattattatttaatatatatatatatcctttttagctacaataattttttagcttcaattttttattaaaaataaataaatagcatcaacgctacaacataacatccatataaatttctagaatgatattctttgatctctctaatggtataacatctcaatattttgacacataatatgtccacatcaccaaacatcctctaaaactttaccattgaagatgccccaaggggagctttatttgcattcccacaaaatgatcaaaaatctcattattaatcttaggaacttagtagtgtaattgagtgagagtgttaattatatatataaacatttg

SEQ ID NO: 29040 - DNA, 1501 bp, Cannabis sativa
tcaaggaccacttgttgccatcgtttgtccttaatccagctaagggcctcgcgaactccaattgcctccgctagctccggacgtacaataccatgacaaagccgagaaagtccctcaaccataaactattccatttgaaaatacggaaaagacaattccaataacaaataaaataaattaataatttttttatctagtttttatatgcatgaaatttaatcaatttcatttctatttttatttttattctcatttctatcattctattttcattctttatttcaaccaaacacccttaggatagttttgttaaggataataaattaaatagaataatatagaaaaaaaatcaactttcatttaatttattaatttgattgcatttttttttgaaataatttatttaattgcattttaatgcattgaaatattattttttaaaaaattattattgaatttcacttttctatttctattctccgtccaattcttaattcatattcttatgtctttgtggcactcttaaaatcataatattttttaatttgaaattaaatatgttattttgagttctttaatatttaatttacatttgacaattacaaataatattctttatttcgtaaattggtgaaaaaaaacagtataacgtcagctcaaatttaattaacaataaattcaaaaaaattcaaattgttgtggatggtcttgaatttgttggtgataagaataaaaaatttaaactgataaaaaaaaaaaaaaaacctagaactcgtattgtattaagtcaattaaatttttctaaaaatattaatattaaaatgattgaaatacattatcatatataaaactaaaattataataacaaaatccaagctttacgacagggactacaagagaagatgagatcagaccatctttatagctcttcgaatgttaatgttaaaaaaaaatatatatatttatatatttattgtttctgacaatgagtctctttttttttttattatttttttcatggataaaaaaaacaagaaagcttttgtcattttattatttgtttttataacatgaaaacagtggaagaatcctgtttgagcatttcaatctaccgacagtttgtgtatgttatttatttttatttttattttttgatataccaaccaaaaaacatttgatattgaaaaataaaaaacatggtaattaattaaaagaaaagccttacagaagaaagcttcaatcaaaacgaataatgaagacttgaatttgttatatagtaagactcaaaagctgataaggttaaaagggtgtcagtcaaaaattaaaattaaaaaatataccaatttttggtccaagtctaacaagcttctattacactttatgtctagtgtactattaagtctctcatattagtttttataaaaattatacaatgtattggtggtggccctagtatgctgctgcatcttgtgattccacaccacttttttttttttttttt

SEQ ID NO: 29041 - DNA, 1702 bp, Cannabis sativa
agtagcttaccaattccaagctagcgttcaagcaatttcttcaaaagatactaccacaattgaaaagctgcattgtgaataaaagtagtgatgtgaaaaattacaaaaaccaaataaagcctctcttcggagtgtgaacattaataataatcaatattgtacaagatgatgattattatgattattattatgttcctcccaaatctttgaacaatctaaactgatcgagtacatataaattatttgatttggatgatcatttttctttttctggcttagaatcagtattttacatatactaatacgatatctctaaagatgcctacaattaagatcagcacatatactaatacgatatttaactgtctctctctctccctctctctctatatatatatatatatatatatattcgatctaataactataaaacaatatttttctaatcctaggaaaagatacttgctattattctttctgttaataaaaaggggtcatctccttatataaatccataaagacataatcaaaataaagcacattttcaacaaacaatggtgaagagatgactatatctagactgaactcttgcaaacaggtatttttctttcaataatctcttcattctgtttttggctgaaatttgggactggtgaagggttgaagagagattgatgacaagtaatgagtatgaacttaacacatgaatcagccctcatatttgaaatggttattatctttaatgagacataataatgtatacagcactagaaattgatttacatatttagctataaaatacaatattattcagatattgctagccaagatatatttgactagtgaataagaatggtataggttcatgctatcaatgcagacagataatctcacccaaaccccacaacaaatctctaccagcactgcaccttaaacattacataccttcatgaaaagcttgtttctcaactgaaaattttgttttttgttttaagtactgcccacttcatattatctctttaatacaatataactcatcttcttgaacttgattgatatgcccagaaagaagcattgaaccaaaactatatatatatatataagaacaacccaatctttcattgtttcaacgcaaggaaacaaacacattttccaattaagccgatctttcactaaaaagctaataatgggcagcgaagataatggggaagtcattttgtcaaagaaggccaacccaggcaaagccaccattttggcactaggcaaggccttccctcaccaacttgtgatgcaagaatatttggtggatgggtatttcagagataccaattgtgatgatcttgacctcaaaagaaaactcactcgactttgtaagtccttcgcttcccttgttcatcttcggttttaaaaacacttataaccccaaacacactaaaattcaacatatctacctatcaattcacatcacatatgcagtgctgatttttttttttcaatcaacaatacactaccttaaacctttatgctttcaattcacattgcattagtattggtgctgagtcaatgaatatgattttcttataattttttattataaattatattttttcatgaatcattataaactatattttttatgaattattataagggattatttcacaaaaacataaaaacaacaaaaaatttacaaaaatacggt

SEQ ID NO: 29042 - DNA, 3112 bp, Cannabis sativa
  modified_base (723)..(749): a, c, t, g, unknown or other
  modified_base (2489)..(2493): a, c, t, g, unknown or other
aaaacccaacaatttggtaagaaataaataaataaataaattacttctcatactttgaaaatttctatgtttttttttaatttccaatactagagtttatgtttttttgagttgggcaaattttttgtttatgttttttttactaggccccaagtttagcaagttttgcaattgtgtccctctactacttttgtttcacaaaacgcaacattttggtaaggaaaaacaaaagaaaagaattacttctcgtactttgaaaatttctctgttttttatttttttattttttttattttcaacactagattttatgttcttttgaattgggcaatttttaatttatttttttcttctagtccccaaagtttagcaagtgttgcaattgagtccctgaatcgtttctttttggccattttactacctaaccatttatcttattattttttatacaaaaatatcttataagaaactatgttgttgttgttgactaactcttttttatttccttcttaaaaataataaacaacaaagttctatatatatacatgtagataaataactaaggtatgtataaatatcctataacttattatatagttaattaattaaagatatttctacattggatttttaacatcaattattacaaactttttctttagtttttagatttattgttagtcaaagaagaaattaaaacacatcaataataataataataannnnnnnnnnnnnnnnnnnnnnnnnnntaataataataataataaaagaaggaagaaataagaagatttcttgtccaacttgaaccaacactcaccaaactttaagctacattccttatatatatgtaggaactaggaaggatcataacccataagtctaaaaaatatattttatataaacaaataaaaagtgtaaattgtttagtattcattataatttgtagtcaactataatgttttaaagtactcaaacttctaaattgagtagctatttttggatttagtgggtgcattatttggagaaaaatttactctaattgtttgtgaatatgattttaaaaaattaaaattatgaaatacttggaatccaaaaaaaaaaaagtgtatatattattggttaattgtttgtgttttacaaatgttaaaaatcctattccaaaaacacctaccaatcattcataaaatgttcatttaaatataaaattaaaaaattaaatatatcttcaaggagtgaatcgtgtgtggtgcattaagagttatttaattactttaccaaagcttcacaagacctttcatgaagttgttaagtataataaggtggcaattttatagtaaaattgttattagacaacaataatatctaacattattataaatatggttagccttgaatcaacacgtggataatgacttaacatttaacagttaggtacttacggaagttcgaaaaatataacttaaatattattaccataaaaaattaaacttatatatttatcttcaaacgagagttttttttttttttttttttgaaactaccttcaaacgagagttaaacttagatatttacgttacaattactctatttaaagaggagtgctaattacttcctattacaacttcttagttaacttccacgtccgaaatcacatgcattaatatttttttcatagcagtatttgttatgtagttacaatattatcctggtaaatttttgaaaaatttcaaatagtttacagtattggaaacagagttcttgatatttcagtttaccacgagtgttcaaaaaacttttttttcaacattgtaaacaattcaaaattttttaaaaatttacagggataatgttgtgagtatgacgaacaccactgtgaaaaaatattctagtatgtattttcggacatagaggttgactaagaggttgtaataggaggttgacggtcgttagggttggtaattcgtgttcgcggatcgtatttgtgtcgtgtcgagacccatgtataagtatatgctcgacccgaacacgacctgtttaataatcgtgtcagaaaataaaactagaatacgacccatttataagtatattttgtttaaacatatcaactaacacatttatgactcattcatgacatgttaaagtactaaaataattttaaataggtcattaacgggtcaatttcgtgtaaacccgaacacgaaacgggttagacgagtcaactcgaacacgacccaaacctatttaagacaaatctaaacccattaactctcgtgcaagtttcaaatcatactatcgtgtctgatccgttttgctgacctacgtactcctctcttgctaaaatggaattaattttaaaatgcaagggcaatttgggaattatggagtatatataaaatgttcccaaaaccctcatctttgattcccatcttctctcttaaccctttcttagggtttttgacagaaacagttctcttctctctctctctctnnnnntctctctctctctcttcagccatggctacaaccactgtatcacgttctcttcccaaaaccctaaccctagcctctttcatttcccgctccatatcaacttcatcctccatttccacagtccactctcgctcctccctctctctcctccaccgactccgccctctcgccggagcattcctaacccaccacaacgtttctctcccctcctccaatctccgatgtttctcatccaatacgacgtcgtcttctctcaaggatcctaaccctaactggtctaatcgacccccgaaggagacgattcttctcgatgggtgtgattttgagcactggcttgttgttatggaaccccctgaaggtgatcctaccagagatgatatcattgatagttatattaaaaccctagctatggtcgttggcaggtgactcttcttcctcttcctttatttatttaatttttaatttttttgtgttacctatttaattaatgtgttaaagctttaatcttgcttaatggggttgattgaatcattctgtttgttttgaaagtttgagcttttgatgagttgttttgagtacttttgaatttaggtatttcccaaatggtgttcagtttagttat

SEQ ID NO: 29043 - DNA, 3067 bp, Cannabis sativa
  modified_base (269)..(271): a, c, t, g, unknown or other
caatgttggaacaatttatttcaaacgcataaaaattaaagagtcgcacgtgcatcgtttgaacttaatttttaacgtgttcaatttttcaaaaaatttattaaaatttacaaaatgtcttaaataatttccgcgcacacaattaaaaagaatagactaaaatgttcttcccattagattttgttattggcacaaccgcacaagaaagtttatatctatatattgattaactaatacagtactctgtttatataataaatatatatatnnntatatatatatatatgtgcagaaggaagtaggaaatgaaaaagaaattgcagaagtgccaaacaatgatgcagccaataactccaaccagcctgctaattcctcaaggtaattaacttctacaaatacaatattttcaatccctagaaaattttatagtatttaattttatggtacttacaaaaagtataactcaattttcttggacgacagtatttatattattgttatagtagacatattattaattggaatacataatgaatattcatttaaatgcaggcatatctatctttataatacatataaaattaattatttgaactttatttgataaattattaaatatttctaaaatttggtgggatgtgtaaaaaacaaaaacaaaaattgtattataatttcatcaaatgtcgaaaagttacacttctactataattacttcaaatataatatgtgtatgctagtttgtattaatgtacacttaataattttaatgcaaaataataataaaaaaattaatacattttgctgaaaaaattacaaatatatttcatataatttcattataaaaatgatctttcaaaataaataataagaatatcgtgtatataatatttaaaattaaaaaatttagttttatatatttactagtaaaatatacagtataaatacattatttttacaaacaaaaaaaattattaaggaaaaataaattcttgtatatacaatgtccactttgaaatttaatgagtcatagaaaaaaaaaaatagacttttatttagaaaaaaaaatatagtattttttaaaattattaaaaaaaataaatttttttggcctttaaattaagtgagctcttagtataagcctaatttgcctaaacttcaagcccggactactttcatgtaaaattactgtcagtgtattctgataaaccaataagaactaaaaatataattaagacatttcttcaaaacaaaacaaaaaacataattaagacattgaaagaaaaaaaacaatgaataatcataactttttttctattgaatggatgggaatttattaattatcaacatgggtgaaagaatttacacaataacgttattttcaaatttcatactacagatataacactttggatttatcttagtcttctctcttttctctaataaggaaaaaataagaaattaattaccaaaaaatgagaaagaatattacgagaataaatgtgttagcccatattgttgaaaaacaagcactactcaaatgaaaatagcactgactagagatacaaggaatcatgaaagaatattccttaatctacactatattatttaaagaaaaaaagtttttaccatacaaaccaaaaattattctcataaattataactaaggaaaaaaaaaacacttaattaaaataagatgatagtgtatacaaagatatcgatgagaattatttaaacaattaagatatgaaaagaaagaaagaaataaatagccataacttatttttcgtacaatgagaatttacttcaaattatcaaaatgggtaagagctattttaaaatttaatattacatattctctttttttgccgctgcaatgaaaattgtactatatatataagacaaggaatacaaagaatcataagataatattcgtgtttatagtagatataatatttcctaaatttcaaattataattaatgtttttttttttttcaaaatttaagaccctataacagttgggttggggatctgatctgaacaagttttcctttttttattttttttttatttttatgaatagaaccagttttacttagtcacagctgccctgtaaatatatattattttgacaaggctatttgtaagaaattatttatgaattgaacctgttttcttcatgaaaagaaacagtaaattgcattttgaaattagaaacaatttatttaggtaaatatgtgcatttttttttacagaagatatatatatatatatatattaactactgatacaccgaatgtataatatttggtacaaagtagtgagcaattaattaattaattatttacaactggttgcagggacataataaatactgcttatgacccatcatatgaagagaatggcatagctattgacccccatattcggtcctttacttcatcctccatctaattaattaccacattttggtaattaattacaattcccatatcatttatctctgtttttggttcaataatttctgtcttcatgacaatcagaaagaacatgttgcttgttttatttacatgcagacaagtacttaaatctgttattttattaaaccggttgattggtttgagaactcatacaatttatatttttattgagacataaactttgggctacaatgtcattaaattcatggtgggttaccgttacagtgaacaattttagcattgttaacaatattttctgttgatatttttattttggtctcacatacatgcattaaaaaaattgttttaattttttgctaatgtttggttcgaaaaaataagggagaatggaatggattatgggttgtttggttttataactaatcgaccgtttttcatttttttaaaatagaaaataggaggtgtttagtgaaatattttaaaaacacctttttgaaaaccgagtaaaaaacaaaacaaaaactcaaaaaatatcaaaatattattttttattttaaaaatattttttagttttttttgtgtaacatattttgcttacattttttctttcaaacctgggtataaggct

SEQ ID NO: 29044 - DNA, 1593 bp, Cannabis sativa
  modified_base (46)..(59): a, c, t, g, unknown or other
taccaggatttagatttactgacatgtatgttgattataattctannnnnnnnnnnnnnaaatatgaatttcctaaaacaatgaaataaatacataagagatcgataaatgcttactttgatggcagcaaaatcataatgactcctttcattcagagctttagcccttgattcctgactatagcagagcattattaagatctaaacctggatattctcccttcactttggttagacacagtcttccacactatgttaggtattgctttgacatgagtgggcatactctcaatcaacatagaccacgaaattctatgaagaaatctcaagcaaaatttgaaaattataataaaaaataataggtttgtctttcattcagtttgtcaagagagagtctagagtcttctcttgaatcaaaagccttaatgttctatttataagaattcattaggtttagggttagagctaaatgggctgattagaaagattcaatggcttagattcctcctcacggccgaaccccttaatgaagctaatgagttagaattttgccattattttgtttccttaatgaaacaaacttgtctttcatcaataatgccatttttcggctttagttattaggggtgagcaaaaaatccaagaaaccaaccaaactgagtacatcaaccgtccaaacaccaaaaaaaccaaaaataaaaaaaattgcctttggttaaaactgcctttgcacgatcagttttagtgttaatggtaaatcgaccgattaaactgagaacccaccaaacatatatattgtacactatacatatataatataattatttttgtacatatttaatatacaattttattaaactagctttacttctcatctttttatttaaagtcgtaatctccattgatttattttattataatttgatgtatttacgtattatatacacacagtcataaaataatacgagttttttaatatcactcatcaccatactagtagcacaaataatttgagcaaatttaaaaaagtttatttcacatcatttatttaactaagaaagtttttattcttaaattatatgatatttgatacaatactctagtttttttagtttccaaataattatagcaaatttaaagacttgttttttttttaaaaaaaatgaagctcggtttggtcagtttaaacagaccaaaccgtgaattaaaatggtttgtttttttacatttatataatggtcggttggtttttggattataaccatgaaaaccaaaaattgaattctgtttttttttttttttttgtgttgaaaacctattaaaccgactgttgctcacccgtattagttattaaatattaattctatctatttaataattattaaatataattattatttaaatatatttattaattagaccttctaaggtctcttaattaataaataaaccttgaattctcttttttttctcaatttagcccttcattggtgaaaattcacaaacaagacataatcttatttagaattccaattgattaattaaaatcaattaattgagactacaaaacaatatcatcccagttagtgtgggg

SEQ ID NO: 29045 - DNA, 2073 bp, Cannabis sativa
ttacatccaacaactaaaagatatattttttttttcttttcaaaaatcaaaaaaaaaaaaaaaaaaagaagaaaaacacttgcccaacttttttttttttgatagagattagtaatacaggaggaaaaacaataagtaataatctaaggagaatgggaactaatattgttccacaaatactcatcgtcagttcctaaagcatatctggccaaattatgcgctagaatattgttgcctcttggtgtatacaagaccgagatcttcgagaaggaggataaagagttgataatcttccaaatcaaactgaaaagggcagagagatccctttgtttctttataattttaagaaccaggtcttgacagtcggtagccacaatctcaatggggaagtgaactgcttggcaccactgcaaagctctaaggagagcttcagcctctgcaaagatggggggtaaaccagagatggatgaagaggaaaaacaagcaataacctggtggttggagtcttgaatcactgcaccatatccatgtcgattgtcctgatattttgttgctacatcaacacttaatttgtaagtccctggagatggaatcagctggttcgggtccttgtgatgaagagcagcagcttggaaaggttgagatgacgattgaataaccatggcttgagcatccctgtattcctgtaaataagagactatagaatcctctatttctttgtcaaagttcttattttttgcaaaaagaaacttgttataataattccaaatagaccatatgattccaaaaaaatatagacagatcctctttttgaaaactttcaaaacctctcagcagaaagtctttgatatcacaatatttattcttgttaaagaagtcactaaatcaggtatatttccagtacttaccttctctggaacagttcactagggaataagtgttataatcaatctgagagaaacacacagagcagaaaggattaccaatgaccttgcgagagtggaggttaagattggaggggataagatggtggaaagccctccaaatgaagtgtttaatcttggggggatagtagaagagaccaaaaactgtgccttccaccagggggtttgaaaatgctaggagaggaggaagaaggatggggagagatggagtttgccaagtaataagctgaattgactgtcaagaaacctgaaggactgttaccccaaatgagacagtcctgactcgtagtgtcaattggcactttaaggatagagtccactttaagggtttgaaaatgttaggggaggaggaagaaggagagatggagtttgtcaagtaataagctgaattgactgtcaaaaaacctgaaggactgttaccccaaatgagacagtcctgactcgcagtgtcaattagcactttaaagatagagtccactaaatcttggtgaaagaaggtgttgagcttaagggaatcccaagtgccatcctccttgataaagaaagaaaccttgtcttcaggtagaggagaattattcttaaaagagatgtggctagagttggggatccaattatggctagtaatagaaatagacttaccatttcccactttccaaattaaatccttggcaagaagatcccttccccataaaagactgcgccaacagtaggaaagagagtgaccaatggaggcatgaaggaaactactgtttttaaagtatttggcttttaagagggaagcgactaaagagttcaggttagagaaaagacgccaagcttgtttagcaagcatagcttgattggtgaacaatatccctgaacccaagacccccatagaatttggaactacatatctgggaccactttttccaatgtatcctatgtgtacctaaagatttctaccaaaaattggacataatcttactaaactgcctaccaatagaaagaggaagcctgtagcaagacatggtataggaagagataactttgatcaccgctttgagtaggatttctgtaccagccttcgagaaaagacattggttccaggccgataatttactactcgctttttggagaaggaagagaaaag

SEQ ID NO: 29046 - DNA, 2871 bp, Cannabis sativa
ccacaataaaaaaaaaaaaagaagttaaagatttcagaaaattgtgtaaatatctcaattaaaatttagaccgaaccaatccttgaatacccctaaacacatttgaggaaattactagtatacttacttgtttaaatttttacctttatttttatattctttaagatatactcacttttgtagatgatttctccattatatcccttaagttaatgtaaattatgtactagacttaagtggaggatgaggttatattgaacaactcacgcacaaaagtgagtacattttaatgaaatataatatgaaggtgtgtttgattaatagatacaaaaaagatgtattcatcaacttatctcaacacactttgccataagtttataggggaatgcccaatagaaactggcagagacattacataggtaacgagaaaacttttatcattttctagtacaacgaaaatattggatactcattaataattaaaagtgggtaaataacaatataagtacctaatatttgtaaaaatataattttcgttcagttttgtcaatagatactttgttactagtgtattaaacataacacatataagacctatataaatattttttttgtaagtatataagatccatattctaaattattgggtttggacaaaaatattatcagttactttcaatttttttaataaatttaaaatagaatctgtacaaaaattatgattttataaatattagatacttatatcgtcaaaaaaaattattatgtttataccgctgacaaaaattaaaattgtaaatccttatgctatagttattcctaaaaaaaataattaaaattttaaaagtaaaattctccaaataatttttaaaaaattctaaaatgttgaggtcaaaagtccactaagacttctctcctggtgtattattacatgagcactgatattgagcatcagtagtgattaatattttttatagatagtgccttatgattgaatagtaatattatctaaaaattattttttaaaattatatgtgacagatacttaattacatcatgatgacaccgagaattctcattattagatactgagcatttaccttaaatcttttccaccaacccatgtcaattgttaattgttaattaaatattcgtaaatattgttaaggatgcacatttttttttcctttttattttatagttaattattcagaatatttaaaggtttatgctatagcttttcaatttgatttagtatgaaaatgatcctatgttacctattgagattttatgattattttattagatttgattaagtatgaaaaaattgaactgtgtcccacttaatatgtattattatatatattaggtagaggttgttaatatacaaatgatttattttaaataaagaattctcacagaatttacacgtttaattcattacctatttttaagtctagttttatgtcatgtttattaggtagtttttatttttttaagttttttattgtttagtgccatattatgctttgcttttatttgtttgcaggttttagttttcaaataaaggaaaagagaaaataaagaaaattgtggaaaagatgataaaaactttgctttttggtattgattttgttaaaagatgaatcctttgaaattttgggatcaaaaatgtaaaaattaagaaagttcttaaaccgcagcatggccttttgataccgtggcatgcccctttacagaaacattgaattttcaaagtttgtacacgggtcgcggcaagagattgttaggaaggaaattacattgtatactttattttatttgttttaatttgtacttctatttttatatccttttagatatatctactcgatttaagtaaattgttgggatgaatttgttttatatactagatttaagtagagagtgaaggtatattgagaaatccactcgaaaaagtgggtatatattaataaaatataataaaaatatatttttgattaatgaatataaaaaagaggtatttttcaacttatcccgattactgggtcgtaggctgcattacttgagctatccaaaaattacacaggccacggtatggcattacctgagtcgcagtccccattacttgagttgggtagaaaattgaacacaagccgcggcccacgtcccttcagcaagagaaaaattaggttttcaaaagtgtagttacgattttttaagaggcggatttagagggtgcaattttagaggctagaagcaaactgtggagtatctcaactcactctctaaattttttttcttcttatttattttgaacccaatgtttattttgattattattgtatttttagaatgaggattatgagccaaatctcttttaaggaattttaattgaatcacactactacaaaaagaactattccccatcggtcctcaaattgatttttgtcgaagaccgacgctattaggattgtgtgcgccggcttaaaactgacagctatagtttagtagtgccatcggtttaaaaattaattaataaataaattattctctttacttttcttttcaaatcgactactgagtctgagttcatgccactactaaagttactcaaggacaaaggaacaatttactcagatagtttgtcctcaattcacaagtgtaaaaatcctgtctaccatgagaagaataattaatagaatagcaaactaaaccaattaatgcagagttagttggaactgactacttcagctcaatttaattaattagtctttttcttttatgagcttatatgctgccattgattggtgagaattgttagtgggcagctatttcaatcgatccattgttgttgttgttttttttttt

SEQ ID NO: 29047 - DNA, 1796 bp, Cannabis sativa
actcaaccaatcaaatattcttatacattttaagttttcaaaaagagaaacttgttttcaaatttcaaaataatcaacccaatgaggtaaaacttttgagagtttttacgtttgtcgcaattaacaaaaataaaagagtaatttgcggcataaatacttacgtttaactttcagttgtaaataaatacctaagtttaattttttgtggtaataacctaagttatatttatagaacttctgtaggtacctaagtattaagtaaattgccacatgacaattctttttttttagatcaagaaggaaaacttcattaatcgaacaagccaattacaccttcaatcctttccaaaggaaaagacccaacctcacaacaataattaattacaaatcaatctctcaaggaaatcaagctccaatttggacccttttctattcttgagcacactcaatctatatttgatatcttttttaatactctaaactatacaagtcactgtttttgagtaattcgaaaatatacaattatttctattcctccatatgcgatatattgttgctgccaacattaccaccaacaaccttccaacgaagctagactgagcagtgcacaaccaactataccaactgctaaaattgctagactagcccttgaaccctagccactcgaacaattcagctaacaccaaattcgacaacctgtaaccaaaaaataaatgctgatggcattccatttttgtaccacacatagcgcaacaagctgattccacatcgatatgaaaacttctcagcatgtctcttgtgagaagatttgtatggaccgcctgccacattataaaaccatgtttaggcacattgaggccacaccagatggctttggcagcaaggtctatggtctggttcaaggacgagttatagagtttaaacactctaatttttccccaacaccaacagccttatatcatcttgagagaaatcattccttaaacgacacaacttcttctaataccatcttgtgtccactttaaaattgtaagtctaaaaattattccctttaagatagactgcatttacctatttcacccacaacagatcttttttattcattaatcccaaataaacctcgcaagcgaaaccttgttccatctagtgccatctttaaacccaagtacgtcaagagctttgggaagacaaaccttctcccaactagttagatggattttgggccgattctctttcatcccccacagaaaaccacagcacaacttctcaatttctttaatcacgctttgaggcagaagagacacatttatccaatagttccttagaacaatcaaagtagattggatcaggtgaactcttccgacaaatgagagatgtttattagcccaagataagagtctttgcttcatctttctcaggataataccacaatcttcaagcctctatttgattggtctaagaggaatccctaagtattttagaggaaaactcccattagataaattgattctttgtgccaaagactcagggtgagtcactccacctgaatagatttgaaatttctcacaattaatagtcaagccagaagttctgctaaaatcctccaatgcctccttgataacttgacccgactcctcatcccctttacaaaaaacaactaaatcatttgcgaaacataaaccgaaaccaaccatcaaaccgatcagacagtaaccaaactttcggttccacgtcatcactgaattcggcggtcggttttagtttttttgacatggcggtcggtttcagtttttttg

SEQ ID NO: 29048 - DNA, 1720 bp, Cannabis sativa
  modified_base (1654)..(1681): a, c, t, g, unknown or other
gcagaaagaaagagaatggtttttagcttagagactatacttgacactagaaacaaagagaacactgcacaagctgcctttatctctgagttgaagtcttacgttgatgaccacaagacaaagcagaaagaggctcttgatggctagtaggccattagggaggagtatgttgacttgtcctccgaactcacttatgagttcaagttgcgcaacccctgagctaaactatcgtacatgggtagtttggcttttgtggagacaatgttggctcgtggaaaggtgctttttgggagccggatggaggtagaccaggtcgctacctaacaagaggggtcatcattaaagactcatgacgatgggttggccgacccatatgtggaggaggtggctggccaggacactaaccaccaggtcgaccagcatgttgatgttggggctggcctagactcttgcaatctcgacctcgcggcttcagattcagctcctcctgcccctgcacacatttagacagtattttcattagtagtattcgacattgtatttgtataacataaacataaacaatattttcatgttccgtatagctccatggcttaatatggccggcggccttttagctttatagcatgtggctttttatggccggtggacttttatctttagaacattacttactttcacgttccacgtggcctgtggcctttttggaacactactttattttcagcccgagggcctttatgttcatatctttggccataagccctctattttttaacactattattgtttggcccttttttttttttatcatggattgtgtgaacactacaacaactatagcaaactgcactcctccttttccctttgggagttgaccaatcaagtctatcccccatactgtgaagggccaaggatactacatcaacatgagctcattgagtggagctcaaggaatttttaagaatctctagcacctgtcacatcttttgacatagtccatcgagtcatcgatcatttttggcaaaaagtacccctatctgagtatctttttggataggctatgccccccagcatggttgccacaaaagccttcatgcacttctatcatcaatcgctcgacctcagtcttggtgacacaccataagagcaccattgagaagctccatctgtacattactttgtctaagattagatacctaataacccttcttcttatcttttttgcctcattcttgctttcatgccggctccagtttggaggtaaattgcaataggtgtcatccattttggactatcatccaacatgtcgacttttttaggaacagtaatgcttggttgccaaacaagcaagtgcatctgctgtagcattttgttctctggggatctatttgattgtgtagtctttgagctgacttaggaagtcttggatcttgctcaagtaggccaccatactttcacctcgagttgtgtattcacctaggacttgattgacgactaattgagagtcgctaaatatgtttaggtggtcagcccgtacttcatgtgctagcttgaggcaaactattagggcttttatttagccttgttgtttgaggctttgaagccgaatttgatttcttcatgtagtcgttgttggaaatattttaccagnnnnnnnnnnnnnnnnnnnnnnnnnnnnattaacatcctaatatgaattttaaaacaatgaaataaa

SEQ ID NO: 29049 - DNA, 1865 bp, Cannabis sativa
tagcctgcgaacccacaaggcatgcaggtagacagtggtcaatatatttccaagactgcatttagagttatgtaacatttcacacatatatgcaatacaatttaaacagtttgcaaaaaggtaaaagcttacggaaccgtgagttgagctcgacattggccttgattgtacatatcttgaccctcttcagtgaacaacctggtggctctgataccaaactgtaaagcccgtatttgaaaatttgctaattctaatttaaacttatcttattatatttacaaactcattggtcgagatcctgagtataaaacaacggcttaaaatacatattctatacatatatagttacatattaattttttttacaaacaacaggcaacaacaaaatgtaattcaaaatgtagtatgaccaagaccctccaggttgctctgccgcgatatgtacaatctttgtcgagctcctccagcttaaaggtagcaaactgatgagtcgacgtaaactcagtaagatattcataacatttatataagcaatgtgataccagcttaatgcctaagccgtcctaagcccaattaccaagctcaccaaatggctaagaacgttctcaaagaaagtacgaccactgtatcatattcactagagtatagactccgtacttgtgttagtatggcctttattttacttttgggagttactaagtcttgtaccacatgcactccatagcccttggtattcgtgttggtaaaactgtaactatcctaatgccctatactgtactaacacccttaaaactaactcatttaggcgttagtagtgtaataaataataagaaacactcaatcacatatacatactttatgttttcttacctcgttccaaattcaagcgtgccggtcgacttgaatggaaaatcttcgagctgaacggaggtcctaagtcacattacacaattgggtaaataactcgaataaatcgtctcgaaaccctagctcataactaagggtaatcttaatgacacatacaatatacagctaccccaaataccaaggaaaaccaagctcgaaaaatagcacggatttggaaaagttgcaattttgggggccttgcttgtaaaccgattaaccggttttacataccctgtaaaaccggtcgactggtttgcaccagcaaactccaaaaattgcacaacttggccaaatcttccccaaatgaaatgaaactttctagaacacctatgcacatattctagaacaattcccacacaatagtagtaagaaaacacaataaattcattatgccattgttgagtcaagtttgagttcaaacttgctcaacctcaaaatagacaattacagcagcacaaacaaccctaaatcatcaagtaaaacctattaaaactactcttaatcaaaactcaatcaaacagaaccgaaactcccaaaattcaacacttaaccaaccaaaaccttaagaatatctagagtagggtttcaagggtcataccttcaatcaaaggcttcaaacctaaactgaatcttcaagataaaccacacaatttcattgttgcacctctagttcgaagatggaagaagaagaaggatagaaactctaagttttttttctccatttatctaatttctattttttttttcttttcttcttgaattgttggataaaaggttaattagataaccttactttaattaaatggcagctgtcaaccaaaggtggggacacctatccaaaaaaaaccaatttactaatggctaattatgatttttgccccctgaaattttaaggtcgttaaaaatgctccctgaactattaagattgttggatttaaggacttttttctaattttagt

SEQ ID NO: 29050 - DNA, 2117 bp, Cannabis sativa
gagtaatgtgggataaaacacacaacatgtctctctatttatagatttaatcacacctataataatcttaatggtgctaaattaggatgaaatatgaggatgagatgaaaagatataaattaaggtacattagctgggtgcatgtgtttcaatttggtgctgtggcactgtcagtggaatgagagagaaagaaagagatagtgagtagtcacgcgtatttaaaaagaatttggctccttgcgcgctcttcaatcccacgccttcttaatccttcacatttcagccacgccttccattcatcatcacttccaaactatatagccaatctcttacccttttataattggtagtacttccattccatcaaatgctatagctctttcacttacgtgtcacgtactgcaaaattcaacatattgtataggatatatatatatatatatatatatcgatcgagagagagaacagaagaggtagttaagtcagaaaaatataagaatgagcaacaatggatggtttattaaacattgtatggtggtggtgatgagtattattatgatgagatcatggggtagtgcagaaaatgtcacatatgatggcagatctcttattattgatggccacagacgattgctcttctcaggttcaatccattatcctcgtagcactcctgaggtaccaatttatatttatttttacgtgtttcttgtggtacggattttggatctaactaattatcaagaaaagtatagagttaataaaatgtatacggccctcaacttactttgaaaactgtatatatatgtatatattacatagccattgttaagagtctcatgtggaaacttcatattactgattactttctagataaaatctcttatttttaacgtacgttttactttttaaactacactacctactacaacgagtatctctgattcatcacttataatctgagtcaagagtattttgtttctgttttatatagacaagcttcttgtgtggctctaattaattattttaattgctggtaataatattttcctgatcgacaaagaaaaaagggagaaaatatttgggatagtgatgatgaattactaattttcttaatttgtcgtttttatatgtcacgggcacagcataataattatgatttgtctacttactattgttcatccacttttcatgacttctttccgtatgtattatatactatttatatggtcacattatagctcatttttgttatgatgaacgcctctcgtgatactaggaacatgtattttgattccgaagtcatatatgatatatacatctatactagatttatataaccttttaattggtaagactaaatgcatataaatttttaatatttcattttttttttccttttataacaaagtacatagatatagtgtgttataatatagaattttctttaatgtgatttaattgtgttcgtactttgttgctatatgagtccgtacttatgaagaactatatctttatatattaaaagtgcttatataacagtattttttggtttaacacaatatactttaaaaataaaagaatattctgttaaatttaacgatgttaataggtttgatctcggttaacaaataaactcaataattaaacccaataaattaaacaatctttttttaaaaaaattaaataatatttatttttacttaaaaaattaaaataaataatatttatctactgaattgttccacctagatatttctgttatttatatatatatatatatatttttgtttaaatatgaatttgaatttgaatttatttaaataacaaatttatatttaataaaattaaactaagcgaagattccccatcacagtaaccaaaactctcttcatgtaaactaaccccaccgttcattgaaacccttctacatctcatcgtccaaaggaaacgcttcaatgaaatgccttttcattggaatcgttatttgattggaatcgttgaatgaaattagcaattatcatcttgtcaatggtaaagtgagctttgtgattcgattaccacaaatccctgcgattgtcatctaaatcaaatttatttgtgtgtgttctttattattg

SEQ ID NO: 29051 - DNA, 2665 bp, Cannabis sativa
  modified_base (2609)..(2620): a, c, t, g, unknown or other
attatcaccactttagtttcttcttgaacgtgttgttccagaagtatggggtctttgagaacccattggttctttcctagggcgatgggtagtttcctcaagatgaattccatcgttctaattgtgatcatccatggatagatttttgtttgtaaggagggattttttttgtgttttatcacgtagtctctcaatgaaagtaccaaactattagtgcatattttcgttaaccaattataagcctttttgtaataaattttaatagagaattaataagaaataaataatgtataagtaacaccagatattcttatgtggttttgcaattaaatctagatactccacgagtctatctcatttaagatattttctgaatacaagatacaatatacaattgatcgtatttattcttctctctcgaatcatctgtctctttttttgtggggtttgcccctatttatagaaatacatgtttggaagttatttacattaaattcaaattatatccgttaatgaaacgtaattaactatcacgtttcatttaaatcacatgttagataacactggataactgcttaactccttcttattctttatcctttagatggtcaataccgatttggacaatgacatctcgcttgactcttagataattaatgctaatttggataatagtatcttacatatttccaagtttttatccttattcattatgatgtggaaaaaatactaagtgtttgtagcagattcgcctcgtcaagtttcttttagaatagcgaggtggttgtctcgctatttgtgacctgagattactttgtataactgtattgtactcatttgaataaacgaattatcttcttgggcatgtgtactctgaggcatgtgtgtgtctcattgacagaggttctaatagtctcttatccttatctcgcttaaaattatgtagtccgcgatttatgaataagttccattgatcctttattaacgagtcattatttttctttgcattaaatgatataattttattatatcaggtggttcatattccactgtatgacatgtgttaccctctgcagtgtagttaaattttgggtataacaatactacagtgaagaggttctttagtaaaaaagtgcagcatgaatcaatgaaatgagcagtaaaaatggcagtatgcacacatgaaaaatacttgtgaaaatcgcataaatttattccccatccctttaaaatcatagagttgagacaaacatgaagacaaaagagttataatgaattttaactaacgagttccaaacaattcaaataaaaggtacccacattggtataattcataagtcaaaagagatatttgttgaaagcttgagagtgcattgtaatttgtagagctacttatgtgtagagatgacaatcttatattataatgcagagagctcaaaatttagaacaaataataacaccctctattttaaaatgctaaacagtaagaaaaaccttagaattctccatgctaactattttttatctcttctaatttttaaagaataaattttttattcttccaaggaatatgacaaatagaacgttaggattcaaagaattatgatacaaatcaactcttccatttagactaaacaaaatctagctacaaacatttctctaaaacaattcaaagaaccattattatgtaaacaaactcttccaatccaagaagtcatcaattgccaagaaaaaaaaatctttgcacaacatataagaaaaatactcttttagcatctgtgatacacccacattttacatagaaatctaagaaataagaactgttcataactacatatccctcaagcctaagtttagtgacccacccataaatatcgagaacaatggaaaaaacttttaagtgttgggaaacagagaaaatcttgaacaaaactactaaccattaacaaattgaaagataatgaacgaaagagagagatgaaggagattagaaaaaatgaccacatctgataaagatttatgaaattgagagatatgttcaattaaccaatttaattttgtatacacacgcatatatacacagagagagaaacttggttaagtagaagaaggaggaagaggaagtgaacaatggctagggcttcatccaacgacgcatagagagtgtttcaaagtaagggctgagtttctaggcaaataaaagtcatcgttttgatgatgttgatattccctctgtgtaaaggaaaggtatccccctataaaatgaaaatcccaaccaaaaaattaaaaataaaaatacatatcaaacacaggttagacttagtattcccaacacatacaccaaacaaccccttagagtaaattatggctaaactccctaaagtttcacattatttgcatctaacccccaaaacaaatttattgacggcaaaacccactccctaaagtttcattaacatgcccatctatccctaaattattaagagagtgaattgggctctataattacaaagtttttggagttttgaactttgaaatatcgattcacatcctccccatctttgcactctgctcctctaatgtcgtcactgttggattttgtgccctannnnnnnnnnnnttcatataatcagatttacttataaataaagatcagaaataacat

SEQ ID NO: 29052 - DNA, 5097 bp, Cannabis sativa
  modified_base (941)..(942): a, c, t, g, unknown or other
caaacacaacagacaattgttgtttctttttagaaataaagtagtctttcttgctttgcttacatcaaaaagaaaattaatatatttattattattactattcaaaaaattttattattattattaaaaataaattcaattcaatatcgtttgattactggtgttggggttgagaggtagtgtgcgcctcatgcaaacagtgtcaagattaatgtcgatgcatcaatttttgaaggtacacaaggctatgattttggtatagtggctagaaatgaatatagtttttggctagagagtgttactcgtttttactaaagggttcttcggttcgaattaacaaaggcaattgctgtaagagagttcctaagttagatcaaataaaaaagttgacaacaagtggtattggaaactgactgcttggtagtagtacaagcaattcgaaaccctattaaaataatctctatttttagtttagttattaaagagtgtaaagcattacttgttgagtagaaaaatgtttctatttcttttgttaaatgttcagcaaatttagtagctcattcatttgtaagagcttctaatttatatcctagttgtgttttcactatgagaatgtcttaattgaaatgttttcttatttgtagcagaatttaaaaattaataaagttttggtttatttttttaaaaaaataaagtacaaataaatcaataccctttgaatcattattttttttttcctttctttcctttttgtggaaagaggataattaatgctaatttttatcaattttagaaataaaaagaaatttgatataaaattaaaaagtgatcagtagtatatatgtttataaaattatacttactcccttttgttttggggtaataaaagattgaggaataagaataggttagaatagaatataatttgaaaaaaaaaaaannaaagaagaagaagaagaaattagagaaatagtttatttatttttgtattgaaaaatattatttttttttttaaaatgaaataatcattctaccaaaataaatataagaaaaatcattgtattgaaacaaataaatgaaactaatttgtgttctatagtctaaaagttagtaacgaatgcttctctcttctcatttatacctttttttttaaagaaaaaaaggttacttgaactagtctcaattgttacaacatacatttgacaatcaatatttgtgtatatatttatgtaaatgtatacatacaaatctttttgttttagttccaagtcctatatattaattgtgtgtatctattaaaacttaaggaaaaaaaatttgtccatcccgaatgaaacagtctcccgagccacgttgggagactgctcatggtcgggatgacatattgcagggtttaaatcgaaggctcttcagccttcgatttttctgaaccaatcgctaatggttcttacgagaactctagagtcattcaaagaaagggttttaagcccttgagctaatgcatctgctggagtgtacaagttaccaacttcccactttggctcctgaaaatgtcaaatttaaaaacatcttttagtattagatgaaagtgttcattcaaactatgatatttttcaaaagtgaattatgtagtggtgacttattacctgtatgcatggtgtgatatggttaccatttagctcaactttttctagtgtcccaccaatggactctactctaggttttaatgtctcttcgagaagatctgtctcgtctattgtgtcgaaattaaactttacctacatgacaaagttagccgtgttacagatcaatcttgaattgaatctctagtagctatctcgtctattgtgataatgattggagtaactcatgctaagcaggtttgacctgtctatgtctatgctagggccgacctcaatttagtaaaaaagaaaaagagttgagagggggagcgaaatcgcgtacttacaagtagtgtgtgcttgacattgtacgagttcttgcatcgggagcgattttctgagggtgaaggcttgaactctgatatcccttgagtcacctagcaaaaacatttgaaattcttggaagtgttaaaaggtaactaatcatagtttgattcaaacacaagttaccattattccattagatttttctaaaaatgtacctcaccaaacacagagggtaattggtcaacaaacttagtgacagagtttaaagtttgctgatcattatctgatattatagttccagctgcatcaagcaacaccttccatgcatcccctaaattacatgtatagtaaatgagaatggtattgtataataacaaactttgcagaagtataggattttcataaattaatacctgaggcatttctagccattgaataaactggagatgattctacaaccggcatcatctgtctaactagaggacccaactgcagtaaaactagaaattagattcagaatcaaaagggactaaatacagcaattttctctgttgtatctttttcaagtctttaatgaaattttctaacaatctatctttgctatgtcaaccttggtcatgacctaatgtgttatatcgttattgagataattaagtatcggttcccatataatttgatatattaacttttataaaatatcggtaaccattctttgcttagcatcaccagagcctgatagcaatgctcattttcatagctagtggaagatgacaagtcttttatatttggttgaagaacattgtcatgataaaatctcacatatctatcttcttgacagaaaaacatctttgacttacatagacaaaaaccataataagaaaagcaaaactactaacctgctcaaagtaaggtactgcctcagtggctgatttgttgttgtatgaaataatggcattggccttaatcacaacaagacataaaaccactcaagtgaaattcagagtaaatgtaaaaaagaagaagattatgactaagaaaaccaaccaaccaacctttggaatcttttcatcaaaatagcttcctgtgagtacttgaagcaatgcaccattactacaaaggaaaaaacaacagaaaatggtgactaaatttgacacgtcaaaaaaactaactcaaaagaacctcaaacttttttcacctgactttacctatggccaactgagaaaagaggaagatcagaaatttgggcaggagttagatttgaattaggaagcccagttgccaagatggaatccaaacaggtgttgaatctctcataaacttgtttagcagcatcagcatggtcaaaagtcacattgtatggtactgatataataacatacccttccttagccaatagctcaatgacatagctgaaccccaaaatgaaaaaccagataggaaaacaaaggcaaagtcatgtaaaaactcaattaatcaaactaaaatcagtaaagtttgaaactttaacatctataaagaaaagggtattttcctataattatggagactcaattaatcaaaaccaaaatcagtaaagtttgaaactttaacatgtattaaacaaaagggtattttcctataatcgtggaaactcaattaatcaaaaccataatcagtatagattgaagctttatcatgtattaaacaaaagggtattttcctacctgtatgtaagttcaggaacagctcccaaaaaggctcctcccaagaatttgatgattgccctgggcttcactccaatagggggaggtattacaaggcaagaatctatttgagtgaaatttagattattgctgatttttatggtgttgttggtgtttttgttattagctctgaccatggctctaatcccacgaaattggagcttggttttgccatggaaatgggatagaaaaaggtgattggttttggttttgttcagagaaggtaagtaactgaatttggtggtgaacaaggaagaagatgaagtagtaatattggtagttgccagaagctccattcccataacgaaacaaggaatgagtttttatttatttatttgtgaagtttaatgtgacatttggtttaagaaagtttgtaaattttgagtctttttaatgtaggttggtcgttgagccacgatttcaaatcccaaactaatcattggtagtgtctgactcctgagctcagaaaaataatactattaacgacttgtcgttttatgtccatttataactacatgtcgtttgtaagagaaaaaaatatactaggggtgtttggtatgtggttgtgatagttagtggtccggtaatccgtaagaggaaagattgggagttgtgtaatcccacatcgtctaggaataagtgtgatgattctgagactctgtaggtatgatactacacagttaaagagagtttaaatgaattgattggtactacatatatcaataagatgaatcttcttttcggtagtccatcatgaaagaacttcaaaattaagcgtgtttcacctgagtaattagtctgtggaggaaggaccaatggacgcttaagcaaggatgttacgataattaaaattattagattaattggaataataatgcagagaatatatttgttaataaacttataacagtgtttggttatgcatgaaaatatctagttagactactgttaattgaattatattgtttgactgaacataagaatctaataaatcgttgtaaaaagttaaataaaaaaatattaatatattaagattacggaaatatttaaaattcaaaattttaaaagtatttaagattatcccaacagaaggtaatcttatttctaaagtaataattttcccatacttaaaataggaaaaaccttacaccaaacatgataatgtaaaagattattattcatataaaaacattatatcataccaaacaacccttgaaagtaagaaaattgctaatattagtgctggcaaagcaacactagtgttaagtgataacttcagactaaggtgataatagtatggggtcctatgagcaaatctaacttatgtaactcaaaaatatatttatatatgttatattctttgatataatataatatagattaaaatatttaaatgtgacaaatta

SEQ ID NO: 29053 - DNA, 1827 bp, Cannabis sativa
tggtagtaaatctagatcctggaaaaataatttccaacacctatatgttacgtgccaaatctgatgcccttgccataatcaaacatttcttctcccttctcaacactcaatacaaatctaacataaagtctgttagaacagacaatgcaaaggaactaactctaacaagtttttttgccagcaagggagtcatgcattacaattcctatgttgctcgcccacaacaaaattctattgtagagcaaaaataccaacacatactaaatgttgctcgggccctagcaattcaatctaatgtgcctctgatttattggagctatacggtacgcactgcaacttatttgatcaatagaacaccttcaattttattaaaagatacaacttcatatgaaattttgaacaaaaaaccccctatgtatgcacacttgagaaactttggttgtttggcctatgcttccaacatagttcactcccacaagttctcaccatgatccaaagcatgtgcgtttatcaggtatcctgaaaatatgaaggcttaaaccttacttgacatcaacactaatcaaatttttcattgcagagatgtaattttttatgaaacattttatcctatgactgacaaatcccccacagacaattttgatagtttttttttcatcacctatcaccccttaacatatttctgaatcaacaacaaacaacactactgataccagcaataatatagaatatgttgatcaaaatcaaatcaacaccggcaataatgcagaaaatattgataaacctcggctcaacaccaacaataatgcagaaaatgttgatacacatcgaatcaacaccaacaataatgcagaaaatgttcatgaccatcgcactaaatctggcaggtctacacacaagcccaagcatttacaccaatacttgtgtgacatgattcaagttcttgcctctatttcacattctcttgccaataccctagcatacactagattttcaaattcatttagagtagcaatacttgctacacatcagctggttgaacccaagtcatactcccaagcttgcaaatataaaatctggaacaatgtaatgggaattgaaataaaggctcttgaagacaaccacacatggatcattgtcactttacctgatggtcaacatgcaattgacaacaaatgggtttataaaatcaaatataacccagatggcagtgtggacaagtgcaaggcacgccttgtcgtcaaagggtatacacaacaaccaggtatagactatttcgatacctatgcccctgttgcaaaattcaataccctaaaaatccttttttcccttggttccatcaataattggcatctacatcacatggatatcaataatgcattcctccatggtgatttaaatgaggatgtttacatgaaactacctcaaggatacactcccaaagaagtgattccaaaaaatgcagtttgcaaattacaaaaaagttcgaatggtttaaaaaaggcatcaagacaatggtacgctaaactcagtagccacctcatttagcaaggctttcaccactcaaaatctgatttctctttatttctgagacacaaatcaggtgtttctattgtcttgctcatttatgttgatgatatagttgttgccactaataaccttgatgaactaacaaactttaaaagcagccttgatgctcaattcaaattgaaagaccttggcggccttcgattttcctgggactagaagtagctagatgttcaaagggcatatctgtttctcataggcctttcaccctgcaacttctagaagagacaggctgcttag

SEQ ID NO: 29054 - DNA, 1821 bp, Cannabis sativa
cactataatattactagaactagctagccaatcaaagaaattaccctttggctagtagcaaataaataatatcactctagtacttcataaccttgttaaggtcactatcctttactaagaccctatatcacctcaaatagatttcagtatgtaatttagtaagaaccataaatctaaactctaccatatatgtataataaaactcccaggaccatttctattatattaatcataagctaattacttataaatatattccaattgatcaaactaacataatttaaacatgtaaaagctatatttaacacttaataccccacactcccgcaacctgagagaaaaatgtgtcctttggaaataaaattacacgataaataatgaaaattgtttttaaagtactcattatgactaacttttgaggggtttgcacaacgcaacttagactatattatcttctgacaatatataatagcctttaatccaaataagctcgtagtgctcaataccgatgcatccaccataagtaatttggtttgtaaactctcttcttggacacctctaggagttccaaacgaagctcttccatccattccttccattagtttggagactctttaggggcttccttcattgatatgattgaatcataataattggatatccaatcaacaacattctgtggttgtcttattttttggccatgagtaatcttattccttttcgtccatattgcccaagtacacataattaattttacaaaagcatctatttccaccatttcagaaacataatataaaacattcttgaaattaatctcttctcttacttcatgtaataaagaaaaatccaaaagattccaaatgccttgtgaaacgggataccaaaaaatagcataagcattcgactctcctccaaaactacataactaacaagaagttttaaaggcgatattctgtttaaacaaacctttacgagtaggcaggatttcatgataacctctccacgcaaaatgtaacattttcctagaaattttcaatccccaaaattgtttcccccataatgaaaacacatcactggcagatgagggtagaaaattatctgtagtcattgcaagattataatcactcccaacagaataactaccatgattcgtatagtgccagaaccacgaatattcctcataattaaacgggctttaaaggtatggaaaaaaatacattcagcatcaggtacattaaaatattgatctactactacattattccatctacatgatgagccaataaggtctgacattcagcatatcaggtacattaaaatttttattttccaattcactctcttctttaattttttttctaaaactaatttttttagagtaaaacttaagagtcagtacctacagaagttccaaaaatatatattattactgttaaaaattataatacattttggaccttgtatattgcaaaagttactaattagattttctgttttgctaaataataaaatggaccaaatatattccaaaatagtaaaaatagaaccctaaacttaattttcgacaaatttattactgctcataatttggctaaatttactctagagttagatgaagttatcttttagttggagactttacttttacttatttactctgttaacttataataacatagtatttccaaaacaaaaaatccacaaatataggtttacgtaattaatatatatagggtaagattatggtaggacctagcaaaagttccttaccggtagggaatttttttttaccattgattttagatcatgtggttattatga

SEQ ID NO: 29055 - DNA, 3415 bp, Cannabis sativa
taattttaaaaacagtaaataaaaatgtattctgtatagttttaattttaagtcgggtttaggtctgaggtaagaggtcgggttcagcaccagggctgtaggggatttgggtctgagtctggtcggagccaaaatattgaataagaaaaaaaattatttagaaaaatattgaaagttattttttttttattttcaaaattttgattctcaattaaaaaattgaaaagtaaaaattattttatagaatatatttttgaaaatatttttactttttcgattttaaaaataaaaaactgattaaaaaagtaccttaaatttaattatatataattaaaaatgaatttgtcaaattgataaaacaaattgattaaatttgaatttaagatactatacacattttcaaaatataaggtatcataccaaacaagtatattcttttattaaattaactattacaattagggctaatatcggctaagagctgtaaatacaaattgaattttttaacacaatacgaaatcaacacgatccgatacaaaaaaatataaatttgggtacgacacgacacgatagcatgacacaatataaaagaaataagcttaaacacgacacaacacttacacaacaagcccaaatatatgacacatgagcatgaatacactaacacaagtgttaaaaattcttaaaataataataacaataataatataatattgcccgtaaaaatttaaaaataattagtaaaaaacttcacataatattaataaaagttaaaggaatatagcactatactcgtgtctaacttgtgttttattaaaaaatttaaaatgcagttttctttttatttatttaataaaattatattctattagacaaactagagaggaaatatgaatgaagaaatttcataaccttgtatttataaattagactgtaatatagctttgaaagtataataaaaattgaaagctattgtagaattcaattgattttataagattgacttaacatgttggtcttcaaatctctgtttttcaatgaggggcaatatgatattgatatgcatccaatttcataggcagatttcatatgaaattgcattgaatcaaagaaagaagcaaagcaaaaattaagtagtacatacacatgaacaagtgtttattttttaattctatgacaagccatgttcaagggaattggtggatgagaatatgctcctcctacaatctgatcaaaaatccctttgttaccagcttgagtgtaatgtactccatcccaattcacccaaactgaaggatctttacaagcctttcccaccaaaatctctttcccatggaccattttcttgcccccacatccaatgttcttattaaaattatacttcccaccatgaccacaacatgctctcaaaggctcttcaaatcctgcattattagtctttatgcatcaatcactttcacataataaaggtgtttcttttgtttggtgaaatagtctttctttctttctttctttcttttttatgtacaatttgcataataagtgtattttgactaatcactccacataatggtataacaaaaacttgtgattctaatccaacaatctatcatgagtaattgatagatgataatttttgacaaaaaatgacctttctagaaccttcacaatctaacattttgttaagaattccaaatacttcgtcaaaaattctcaatatatgtatgtaagtaatgtaccgtgctttttgggttggctaatgatggagtacttggctttgtaaacatcaacataagtgattgcagccaaaggtaactcctttcttaattggaccacaacttgttttaagccacggttgaaaaacttagccacttcattgaaaggagtggcacaaccagctttatcaatctcattagctgccactggcaacctgtctaagacgtatggtagacaaccaaagggaccagtgttgtgtatccaaaagtatcttcctccttgaccatatacatactaccaaaaaccattatcattatcattaaataatataagttcaaaaaaaaaaaaaaaacattattgaacaaaacaaaaaagttggtcacattaccttgacaacatttttgaattgatctaatacatcaggaacatatgccttaacttgggatgtggtcatgtttgagaagtaaccagatgttaagtcgttctgaccaatatcaaatgtgtacaaagcttgagagaaaaactctgccttaggtaatagctttttgaaaaccccacctgcaaattctaactgttaaaactctaaaatctatgtataatatatatgagccagccagataaatgatattattagtattgctgaccttggctccgagtagtttgagatctactatgaaaatcatagaactcattgaactgaacatccaaagagattggactaaaaccaccttgccgaagagttgtgttttggggtctaatggttgagcctgctgtggcaaagtttgccccatgagtgaaattgctaccaactgagtctagatatgcacttagatatggcaatccaagactctgagctgaaaaatcattatcaaaaacaacaaaaacaacaagttaaattatcaaaatggtctttttggtcttcaaattcaatgaaatttcatagacactatttacttcattaactcatgaacttttattagtgtcggtggtgaccataattactactaacaaattaaaactttcatgacccttttggtcaatttttttttcctgagaaagtttggaaaagttaatgaagaagattattaatgtacctataaaatcaatgacaagacgtccatcgcagtaacgaccagcaggcttgtgaaaaaatgactctccatgaggtgaacgtgcctgaccaaacacggcagacaagccaccggtgtcggagttggaatcgccaaagttaaatatggccggaaaattacagtgaccacttgttttggcagagaccaaggtcactgacagagctaacaaacaagtcacaacatgtttcaacttcaaccaatgtgattccatgagaaacaagggaaaagaaatgagcgtttttgaagtggagaaagtgatggacaagaaagactcaatggagtataaaaattaatttaaatagctaaaaaagataagttacttttgagtttttaatagaaaatgccaaaatgatagtgtggattttaagataaatgcttaagggtgactatggtaattggtatccttgtcatgtgtaagagcatctccaatagtggtattttttgagggctcgaattgtattgtattatattaaattggattatatattatattttatataatattatgttaaattttaatttatactaaaatattatatatttaaatgtccataaaaattaataccaca

SEQ ID NO: 29056 - DNA, 1849 bp, Cannabis sativa
actctcttatgtcagggtttttgggtacaatatatataaaaagaggtatgtttcaattaaatataaaattagaggtaaatttaattaattaattaataaaagtggtatttttcaacttaccctaattaataatgtcaaagatgaagtccgcccatttttatgggctcaaaagcagcccaaagcctaaacaaaactccaagcccaacggccaaagttcttctctctctctctctctccccgtttgtttatatagtcattttggcggtaaagtcacctcccgcgggttcttcttctggttgtgtatccatggatgcccaaggatttcgtcctcctcagttctccgaggtacaagttttctcttaccctttacccttttcttttctgttaatcatatttattgttttgtttgtttgttcattcattctttctttattttgtgaaatgaatagaatactttttttttttttttttcgtttttttaaaatgaatagcttgatactattatacaactcactgtaatagtttcattgtgttttttaaccatacccatactattgatgttgacaattttactttttttatttggctggaaagtaatggacatcttgaagggttcattctgggttttaaggaaattgagaaaattttcattcattgcataggttttgttattctccgggatattatagtttatcattgtttcattgccttttactttatgttattttttttaacgaatgttgatgttttgatcatctgctgctgaatgaaggatttagcttgggctcctaattgggttcagcatcaggtggaacaatttgggtcttcaaagctttcatctaaggtttgggttttctttcatttatgtatatatatatatatataaattttttccttatgtttttgcaactgttaatataaatttacggagcattctatcatttctttatttaatggcctttttaagaactattttattttgagatatagctgataagcaagtgacccgcatattttgtgttcttgtacttaagatttgctggtgtgtgcgaagtaaactttaattagtttatttgtaaattttggtgtgaaagaagctacctcaggtctaccgtctttggatttcattaactgatgttatgccaagtctaaatgtaagggcttccctttttaaatctttggctaatgtttttattcacttctgtggataggatctcacatcatttcaaggaaacatttgcgctgataacaatgtagctttgttgtcaagggaggaaggtatgcatgataaattatacctgttcatttctggagaagacaattcatcaatgagtttggcttcatctcatgaaaatgtaagattatggttttcaagggtactacctaataagaacccttttatttatcaagtacatgttgcatgtttaataagttgttactttcttgtattctcagacagccttactcacagtatcccttgagtttttctatcatattcgaatatcattatacatttttggaactatttattcagatgaagagtacaaatcatgaaagttacaactcttagtgttttgcaaatggtagtctaatatccttcaagtatcattagtctacactttttcttaaaagaaagtaacccctaagggagtgttaattcaaaagacgttgaagccaaaacatactttgcaagacaatgacttttcttcaacttttgagaatctaattttttaagatggattgaccaaaattctagagtaattgcccatattaatttctgcactgtgctgttttctttgggtttgtgtagccaggattgtgttttgtaaaatagatatttaattatttt

SEQ ID NO: 29057 - DNA, 3345 bp, Cannabis sativa
tgacgacactcgtctatcgtatgcccaatgtctttgtgatacttacaaaattttgttgcatctctcttatgtctcgcatgcctcatgggctcaggtctacaaaatgcgaccctatgctcatgtgcgagatagatgatttcctaaatttcattaagctcggtataaacagtgtagattggcacgtacttgtcgtgctttcttttgctttttcttgtccttggctgactccttagagttatccttcctctttgaactagaggctcctggattgtcagccttggtcaagacggtgcttgttgagacaatgctgggtttaccttccgagccagtctttaacaactttatctcttttcttgcttcctctttttgaacaaacacttgagctctttcattgaattcactgatgtttttcattaggcgaccctgcaggtcatcccatagcttgcctccagtagtggagagatcactcgtgatccctgcctgaagagcagtaagctaggtactatcgtctagatttctcacccatcaaagtagtatgtgacaatggaactcagtttgatggcgaatttatcactaagttctgtgaaaggaatgaaatcattaaaagcttctcgtcagtttcaagaccccaagtaaatggacaagtagaagttgttaataaaaccttaaaggatactattaagaagaaattagatgctacaaaaggaagatgggtagatgaactaccacaagtactttgagctcaatacacaacagagaaaacaacaacatgacacactccattctcgttggcatttagctccaaagcaatgctgctagtagaagttaatattgcgacccatagacgagatttctataatcaagaagaaaaccaagaactccttaaattgtccttggttctacttgaagaaaggcgtactgaatcacaaattactaatgcagcatatccacaccgaattacgcgatatttcaacaaaagagtgaagaaaagcctctttaatgtcagagatttggtgttaaggcgagtatttgcaaatacacgagatgcatctgcaagagtatttaacccaaactgggagggtccttatgttatcgaggcaatagttggaactagggtttataaattggctcggcttaacggctcgctaataaaaaactactagaatgttgatcatttgcaaccctattaccagtaaaaatgtaaatgttgtattttattcttttctataatgtaaatttctattattaataaagttaagtattgttcaagtaattataaagtattattcttaaaattacttgaggggcatatataaatgtgtatatcaactgaaatttatctagaaatacatgatatattacaaacccactctatttaaaaaaaaaattccaaataaggataattgattaaaattgtctatagacaatataaagtcaaaattgaacctttctcttcagaatggaaaatcgaagtagcagttgtaagtgaaattaactcataaaacaacataaagccataggcgaggctgaatatctaacgacacgtattattcaggcatgtattatgaatggggcacagagatgccttaaaaaataatactttaacctaaaatatgaatagaaggcttaactattcttatacgcaatcaaaaaatgtacaaagtacttcataaaatgaattattaaaagtatgtttaagtttgcttttaaattataaatgacagattacaactgctcgcgcgaagtagatctgataagaactgctcgcgcgaagtagatctgataagaactgctcgcgaattgaatacatacgtagaatataaatgctcacacacatacatatagtagattaataactacttaaagaatatcaaaagaaaatcgagatcaatagaaatgctcacttaaaagtatctcaaagtttgatcaaaatataattgttcaggttgtgaattaaaacgcaaatgagcaagcatgttaaattcaaacataaaagatacgagacaataaaggaaaagataaataaattaaaagtaaagttggccatccaacaatataaatttgtctttacaaaaatattgccacaaggggtaagctattgtttcggccaaaaggccatttttctaaataaaaaaaaagttaaaattaaaaaccaagcctacatcataggagacttagatagatcttcttgctgcacctcaatctcttctcttctggtcttctcgtaaaaggcaagcatggcctcggctctttcacccaaaaagcttaagtccatatcaggattagctgaacagatttgataaatggttctcgtagaaatgttgttgaccctagttttggtgtcaatttttgcctcttcaagctttttatcagcctcgccctagatggacttgatggaatcctcaagttctttgatcctcttctggtcagcttgacattgttttttagcctcctcccttgtgcgagaaagttcagattctgagtcgttccatttcttggccattgtatccctatgctctctagtctaacaaagtttagtctcgagcatttcaacttgctaaaaccctctatgttgagtagcgaaggaaagaagaaatgcctgcgagaaaaagacagactaagaaaagagtaaaaaatgagaaagaatgagaactagaagaaaaagagactaacctgatgcatgaggtcataactcctttgcgcaagaccctcaaagctgccttttgtaagaagctcttaatcactagactcaaaagtatggttacgacgccagccgttggtatcatgcagcgagcagagttgtgaacctttaatcccggcctcgaggggcaaaggacaagaaggctcgagaagaacaatccctggacaagaaccagagaactttacttggtgcactgacctagtaggttgttcattggtgctccccgcagttggaaccatcttctctaaagacttagctggctcgataacttcttcttgttggcggtggttttagtccttttgggttctttggtagaacccgagacatcactggcttgggcagcttgtttcttggcctttttatcaacaagtggaggactgctgaacatgttttccaagtcaagatccatatctacaaaacaaaggaggtacatcagcaatgaaacaaaaataaatgaaggaaaatggggaataaactctcacttaaagaaagttaccataattatcagaaggtgacgagaaagaaatataataattactaaactccgtagaccttgtgctctcgtaaataccagaaggatttagtggagataaatcctaacttgagtctagatggctcgccctatcaaggatggtcccatattg

SEQ ID NO: 29058 - DNA, 2558 bp, Cannabis sativa
tcccactacgccaaggtaccgtgactttctgtctaagaacataagtggtattatcctcatcggttatgttaagacaactgaggcagtaggaccatcttatatagaataaataagatggtagaacactttggaataaaaaaaaatatctcctctactttgctactttcagatttagtcattttcttaataatataacttaggttttattactgttaaaaattaaactaaggtatttatttgcaatcaaaaattaaacttaagtatttatgcggtaaattactcttaacacaaatatattattcgggatcttacgttttactctgttacattttgactctattttcaaaaattatattttgaccttatattttttaagaaattacaaataaacactaaagatataaataacttatagagttaccttaattttagcattgaagaaataagagattgatgtagcagcaacatcagctaatatatccacaattaaatcattgggaagccaatcaatatttttcattgaattaattggaagaccattatcattgactataaattttaagtcacttttgctatttttctgcattttctttgttgaagctatacttatttttgatgagtcattatttttttctcttgatcggcttcattattttgagccctacattatacatacaaaaataagtaaactaaaataactatattcatatcatttcaaataaaaaagggttgcacatgtttatattaaaatatagtagccatcttctctttaatggagaaaaacaaaacttataatgacccaaagatccaacattaggaacaggaagaacaactatcatttcaaataaaaagggtgtcttcgcatcattgactctcatgactatcattactcggttaaatcaagacaagtggtcactggggtctgtatctcctgcgtacatcattatttcaggcattttaaatttttttgtggagctccgcttcaagaatgtttctagcacaaggttctcgatcttcataatcagacttcgaatcatctccctttttccttcgagaaactttagctatatctttctagaggatagagagtttagacaggattccctcatttaaagcgccctctgaaactgacattgcttgtttctttttctccaagtgatccataagatcaccatgtctatcgttaagcttctgtcttaaattaacagggggtgcttacgatttttccttcctcttttcccgggctcttgatgcatggatacactttttcagtcctcccagtcttgagggctagtgctctccttagggagcctgcccttctgcgaacttttctcctttgggaactcggagcagacctttcgcagatcgtgagcctttttgttcttttctaggaaagacgtgggatttgtttttggataacctttcgagggataccggatagggctcgactcttgacttttacgtctttgggtacttggtgaatattcttctcttgttttgcctggtccatgaggcatagcttttgggtgcacgtgaatgcctgttgtttccatagccttctgcatggcggccattatctcttgcatcttcctattttgctcttttatggtgctgccagttcggcctcatgatcagtagctttttacctcaaagccactaactcggtgtaactgccgtcatcataggcgccatactcttcttggttttcctcatactctacatcattcgtttcatcttgttcttttacctccacgtctactcataaagttgcttcttcatcttctggtcctctaggaccctgggggcacgaggctgatgtgtatggtttctagtctccaccattgtactctgaatcttcttttattgttattctataagtaaagccttctacaactctcaatgaaagttccaaaatattgaccgagattttcggcaacttagacaattaatgcagtgaaaatgattagaagagagtaaatgcgagtatttttacgtggttggggcttaattagtcttagtccacgagtctctggtatttaatatggaggtgtttctttatagagaatgttctgctctattttttctgatccccattataaatgtggttggaggtatttatagcagttttgagagaggaaaaaggtctctattgtctcaagcgtccaccttagctatgcacaagtttccaaattggcaaagtagggtatgcacccctacctagtgggatgcgtaggatttaggtgagacaagtccttatccttctttgattggtgtgacaattcattatgtagtcgtcacttacatctttgattaacgcgtaattgccaaacaatgggtttaatgtgtctgacatgtctttaatgccagtgaatagttcatctccagtatcctgggcccagtggagctggatgatatcctgctcccggagatgaacagaaggttgatccctctgaagctagcctaagctccaggaggaaccttcaaattatgttcacggagatcctacctacttaggattttattgagcgcttggtctttaagctttagctgctacatgt

SEQ ID NO: 29059 - DNA, 4826 bp, Cannabis sativa
caagaaatgcttggctgagatttcctgaactttccttagaaacaaacaacctcacagttctgaatacacaaatgattaaaccatttgctggcctttcaatgcataagtatatggtatcttctcttaattaaatgcttctcaaaatactttattaattttatcctaaaggaatatgatattattgcattgtttacagaaaatataatgccaagccaattatatatgtaacacaaaaatccaacaatcccaactgcactcatttaattatcaacatctataattaattggtttctactttctactaccactggttatgcacttacatcataaactaagatcattaaatgataacaatgagagggagtggagaaatgaatgaatgaatgagttgactacttgaaaacttgagaatgggaaaatgtctaagaaaccaagaatagaaaattcagtgtttcacttatattaatctaagtaacgtattgggttactagcaactttgctttttcaacaagatacctacaagtctgactctgccacacaagtctctggagcctcgccataatgcaaactgaatccaatttttctaacatacctacaagctattgctagttacaaatacccttgccatatggcaagatttccttccattccaaagtgagggttattaagatggaccaagatttaatttctaataaatacattacgataatattcataattatgagaactataatgtaaatgggaaaaggaaaaacaacttattcaaaaactaataataaaagtgatgataaataagagggaaagcaaatcaataaactaggtttgtttagatgcaattatgttccaacactgttctacaaattactttcacatgttgtttttcctgtagatgcatatctcatcaatgcatcatacaagccttacctctagtattcatatgatactgatgggctataccatctcgaaagccctagaagtcaaaatttgaagtatatagctagaaaccccacaccaacttgtttacaaggattttttttatatggaaattgactagtcaaatttgattgatcgaattgttactacgtctaaccaattcagatgctccttctcaactataacccaccaagtctacacataatagatggttaaaatttaattaacgattctgttaatctatataaacagcttggtattagtaaaaagtattattcatatcgaaagagccaccaaaaaatttgatctactttgatatttaggaaaccgtttccgtatcatacaatacaaagatttaatatgtttcaatatatgtgtggcaactcaactgaagtgataccaacgcaggaacttcggattatgggcatactatgtcttaaagtttccattacaaaccagtatatttggtaatagttttttttttggtcaaattaatggtccctctaattcttttgaaactcttatccaaacctcgttcagctactttataattaataaatggtaacaaaagtgaagtaattagtaaagtaatcatcgtttggagaataaagctaactcaccgtttacatttggcagtctaatccccgaaactactaacaactatcacaccggaaggtccgtaatcgaagagtcaaaagtgtattgcctaacaccaattcaaaatttaaaataaaaattaagaaaattacaataaaaaattattaccttgaatgggtttactctccaattccgacatgccagatgagcttccaccgtgagactccacagaaccttgagaagtattttgaatagcaccagcactaactttacttttagctattactaaatcggaaccggctccggtgccgagcagggtttgtctagtggccgcagcccaagtggtaaacccaaaaggtgggttcaccgaggacgagctaaacgccgtcgtattatcacgtttctcctcttctagagaagaccctgcttctttctcgcccttggccgagttcctctgcttctcggaccttcttcgcttggctgccattcttcttaaggtctgtaactctttcctcttcctccattcctcttcggtttccgtcggaagtgaagacgttcgcatcagattcgggtatggcacgggcggcgatagcgttgtcgtttcttcgttgttgttattgccccttacgagcggcatggttccgattatcgaagaagatcgggtaagcttgttcttcttatttgcattcttatcaactccaaatcgacctcctaaagacaaacccagattcaattcaagctcttctgaatcttcttcgtcttctccttctccttctacagcagcatcaaacgctgcgttttgggattgctgctgcgtgttactgctactcatcaatctatgcaacagatctcttggatatttctctatttgcagagaaaggttctccatttctctaccactaccactaacttctcctctgattccctttccttcgtcagcttcacccattttatcttctactttctgaaaaaaaaaatcccagcaaaaaatatcttagtgttcaacaactatagcgtcgtctcggccgatataaagcaaaacccatttgcagaaactcgtatattatcagaagtatgcatccattattggtttggataggaaaacaaaacattcaatccaaaacccatatcgatctttgtctcttcttttctgtgtataattatgtaagacttcagttttcaaaacaaaaggatttcgaggcgaatacgtgtgtctattgtatatacacaatataaatatttatatgtatggaagcggcgaaaagtcccggaaaaactcgccggaaaataggagcagaaaaaggagaatgaaggaaaaagaaaaaaagaaaaaaacagagaaaagaaatgatgagagagaggggctggtttttattgtaattataaattatttaaaaaattaaaaacaaatagattatttattttttatctattatacctctatttctgggatatgtgggagaagatataaaatgaagagagagaaaaaaaatagttagtaaatgtgagtttccgaaaatgcccttggtgtttagagaagaaaagtacctggaggagacaagtggccgtctgaaagggtgccagatggacacgtgttggagtaagcataattattagttattagtattgttaggggtgtcagtagtagtactgtcctctgccgcttgcccaaagaaagaaaacacgtgttgtgcggagaataaaaaaggagattaaaactgccacggtgtcggtcttaatcgggttccctggtgagtgccacgtggggcttcttggtttgggcctcgggaagccgcgacgatggctcgttagctgtcgtccaaaactatttgactcatcaattcataatcataataatctcaactccaccatttccttctaccattgttatggtcaccaagagcctaccataactcaccttattacctcataaattttctttaagttaataatttttattaaagttaaattaatgtgatttaatattcttatcttatatactgatattatgcctcacaataataccagccaatttgttaataaaaataataataataaataataaataatactagccacctttagcatttctcgttcccttctcttcccaacccacttgtttacatatgtaaaggtgtcaaaccagtggcacttaaattaaatatattttaatatataatttacatatataaatttaaaattaaatatatttaattagtattttatatttaaccaaagataattttatttttccaaattaatttataataatataaactcaaaaataattaataattacaagtactaaatgagtatattactatttctcactaatagataatactactctaaaatacttgtttttaaattacaaattaaatgattatatatcattatcgatattatacattcattcacatatgtacgaagtaaatatttgtatataaaggtcgatattaaattatatgtatcacctgctcatgtcacattatatgatgtttgatatcatataatataaatatgatatgccaaaatcatattattttcttaaatgtatttctttctttttcttttcttttgaattttgaaaagtctcaattgtcctttgacattatatagaatataattttacagcttaattgtattatcttcttaatttgttgcaaacgtggattttggttgtttaaaaatgatcggaaaaccatgaaaattatatgtaaggtatattgtcatatcatatattagtttttttttcttagaaaaatattatatattaggtttggttattatcatcatttggtatatgtaattaaaaattgtattaaaaaaaattccacctgattaagtcttttgtttagattagtgttcaactactttgtttatttaatcttttttgaaataattgaatgatcataattttatttatctattttttccttttttaaatccaaattcgataatacttcaattatagacatgatttaggaaagaacattactatttcaaccacaccattagtgctgtaaatatgagttgaatttttttaacatggcacaaaaatggcatgagcctaagaggcacgagcatgacctgatatgaaaaatatgtacttaggcccaatacgacacgatacaaaaaaaatataggcttaagcacgacacaacatgaaaaatatagacttttctacgacacgacacgatcgacaagctcgaaagcgcggcacacaagcacaaatggattagcttgaaagtatgacgcattaaaaaaacccgatgatttaataataataataataa

SEQ ID NO: 29060 - DNA, 7043 bp, Cannabis sativa
gttgatcttagacccactctgctcaccaatgacaaaatcagataagctttgcaaatttttcagtttacacaagtcttgtggcatatccttcaatggtgttcctttaatattaagatgttgcaagttgatcagacctcccatattttttggtaacaatcttagattactacaaaaaaacaatagtagtatctgcaaattgagcaaaccacacaatgtgttaggaagtcttttcaaacgactccaggatagatccaaatattttagttgttttaaattgcctactgaatcaggcaactcttcataagcatatccccacagagacaaaactcttagtgttgttggaaatgatgttgtttggaataactcatatggtaatttatttaacccactgaatggataatatttttggtccacacttgacaatcctaaaatggtgcgtagtgattttgcttgacatagagcttccaagatatttaagtcatagacacttttctcatcatatgataagtgacggatactcttgtttgtagcaactgagctagagcaagtattatccagtacaagacaatactctcccgatataaagttggctagatcgttcacaagatcatgcatgtgaaagcagtgcattggcttaccaaaatataccattgaggtttgaaataacgaccttgatgttagatcgtcaaagtattcttcaccaacttgtttgagatttttatacttttggtgcggcaaaagatcctcagctatccacaacaaaattaaactttccttcttaaattggaaatctttaggaaataatgagcaataggcaaaacatcgctttaggtgaggtggtagatggtagtaacttaaccataaagctggaagaatattgtttttctcattgggcaactcccaaatgttactattcaatatcttctcccacttctccaaatttgattcagagcgcaatagaccagcaagacatttcacagccaacgggagaccttgacatcttttaacaatctttctaccaatcaattcaaacttttgatatgcatcctcagacacacgaacaaaggcatgcttctcgaatagttgccaacaatcttcatcagataatatctcaagtttaagaggttgaacagtagtcaccattgatgcaatttcatcactgcgagtagtcacaattatcttacttccttgtgctccagattcaaaagcacacattaagacactccaaaggccataattattgttccaaacatcatctagaacaaagaaaaatgtcttctcctttaaaacctccttcaatttcacctgaagttgatttaagtcgcttgtctcatcacatggtttgagttgaaccacatgactgagaatagtttttgttattctagtgatgtcgaaatcatctgagacagtaacccatgctttaacatcaaactttgtcactctctcatcattataaagtataccagcaagtgtagttttgccaattccacccataccaacaatgggaattactgatatcttgtctccaatatgatcatcattggaaaaaagcaagtgaccaattctctctttgtcataattcctaccatagacacatgattcatctaccaaagaagttgctggtaatctttgtgaaactctattttgaaagccctgttttaaacctaacacatccttttgttcaagaataaacttcaaccttttaagaatctcttttatctttggctctattacattatcaaaagcagaagcagtagggaacaaagatgagacaagtttctttaccttgattctcctgcttgaagatacactgctttttatctctctttccaaagctttggtagcaatggcgtccaacaagtcctcagcatcataagtagcttccttgagttcatgaagccacttcctcacaagagagttcctcagttgtttctcctcagcatcatccatcactgaattagcagacagcagcagaagttcgagttctttgagcagcccatggtccagcttacttctccggaaaaagctgaccatctccggagaagccatcttctcaaacatcgtctggaacaaggcagagagaaaagctccaccaatcacttcaagagccatctcagaacttttttttcagagagaagtaaagatcaggcagaaaaaaagtagaaggaaagtatggtagaagagtatttttgttttcttttttttgtggttgtgattttgcttagatattattagttggcatttaattccttcagcgaaccttcccatggttgtggttgtgattttgccgccaattactgtacacttttgtgccttatcgaattgtcgtccaaacgtgttttcatcgttttttcaaatctgtcgttttatcaactgtccctatcattgtttgttattctaagatgtcgttttattacgtcgtgatcgagatcgttctcattgacacagtcgtttgtttgaatatttcaacccaattaactgtcgtttttatcgttaaatgccaaaaacagcgacacacacagactcaagttgaggtccgaccgccatagccataaccataataatctcacaccctttcacctctgcaaattgacaacgacactaaagaggacttaattcgttgatctgaatcttacccattataaaatctacattcattcaatcctaatcctccataaattcaattcttctcttattttattttactccttaataattccgaaaaacaaaacataataatggcgactactgaggtcaataatccggctctggccccggattcggacactccgaacgatccgagtcacgagttcgctgagttcggagctggatgcttctggggagtggagctggcgtttcagcgagtgaatggagtggtgaaaacggaagttggatattctcagggtcatactccggacccgacttacaagctggtttgttctggaacaactaatcacgttgaagttgttcggatccaattcgacccgaaagtatgctcctatacccatttgctttcagtcttttggggtcgccatgatcccacaaccctcaatcgacaggtattttcatggttatttttgaaggattttttttttttaattttttattagtttatttaattgctcccaatttcgaaaatttcactgttgctataattttcttagtcagaatctgtattctaaagtggaaaatttgagtgaatatggcctggtgaaatgattgactttttttttttttttgccttattttctatgtattgtgtatatgtatttacatgttttagtgaacaagtgtgtcaattatttgttaaataaagaagaaaatgatttatgattaatgttttattcatctctaaatcgtttccttgtaatttttcttacatgtccattttatgattatcccatcttaaatctccatttggcttctgcaaacaaaataattcttatattttaagcattttgagattgaaaagtaatgttaatgtgtgatagggtggtgatgttggggaccagtatcgatctggaatatactactacaatgaatctcaagctcgtttggcccaagaatcaaaagaagctaaacagttggagttgaaggataagaagatagtgacagaaattctgccagcaaagaaattttacagagcagaggagtaccatcagcaatatcttgagaaaggaggtggtcaaggctcaaaacaatctgcccagaaaggttgcactgacccaattagatgctatggctgagaatatttcaataagtccataaaataaagctcaacacataatcctgagttgtgttatgtgttatatgttatatctgtttggatactagttttagtgtctctgttctgtgtgaaaattcctatcaatgaatgccagcactgtgtttgctatgaataataataaatctagtgctttatactgaatgattgtatcttcattagatatatatatatatatagttgaaacaattctgaaattccaaaaaaaaaaaaaaaattattgatgtgtgaaactaatattattcttatggttcatgaggccatgtcccatgtaacctgagagcagaaaggaaaacaaagaaaaagcatctaaaagggcttgaaaccattagtgtgagcggtttagagttcatctttgggagaaggtgaagttgcagtaggattagatgatgatttcttgatgggatatgaagcctccattgctattccacaaagtccttctttctcagaaatgtttctttgcatccttatgtaacccttctcaccccactctggtccccaagagtttcttactgtccagaacttggtaccatctagtgctgttccatagccaactactgcaactccatggttcagctctgtgccacagcttccattgaacactccctgatgatacaccatactcatacagatcaaaaccaagacaaggtagtttctatctttatatattgatcaatatatgtataaatgcatgtgtctgaaaatataaataaaataaagtgttacctctgagtagaactgaaaatcagaacttccagcatctatggctacagaaataggttggtgagcagctgctttcagcagagcatcctcatcgttttcgggcacattctcatggccatcaattgacactgcgggtaagttttcctgccatgtgacatgtcaactagtattagaacctgaacctgagttttaccttttaaacactgcaacatagcatacataaatgtactcatgtaccttagcagcatcacaggttccatcttctgctttgtaagggtagtgagtttcagttgttaatcctcctcttttcttgatgaactcaaacgcatattccataagccctccattgcatccttcatttttttcagtgtcacaatcaaccaattcttgttcagacaaagagactagcttctttgtcttaatctggtttataccctccactgctacaacggttgagaatgcccagcaactacctataaaatcataagaagaagatttaaattacaacattcaaaaactatatatatttatatactctaaagattatgaaaacacttttatgtgtatacataccacaactgccttggtcctttacagcagtgacagcacctttctttctccaatcaactgatgtggggactttctcaacattctcatacatgaacttcccagtaccatgttgtgatccccggaacatcctgtgatgcttaattttcgagccagcataagtgctcctgaactcatgattggtcatgtctgcaaacttgtttagtttcagtttgaaaggcatgtccttcttgttggtattgtgaacatgcatggcattagccttaaacacattgaaacgctttgccttttcgtcaaggcttcgtgacacagtgtgatggcttctccacctctcgtacagctcccacaagctatcctcggtttccaactccttctcatggaaatcgaaactctccacaatcccaagaacaagagcaagtgaaacagcaaccaataaaaacttcttcatgtctagtaattgtgtgttgaattcgaatatgaaaatgttgaagaccttatagctcccttttatagaagtaggaatgaacacagaagaagaattaagagtgttgaagatgaagaagaatacaaaataaaataaatgttgaagttagaggtttcttgtggatatcaacaacttgctgtaatgatattaagaaaacggtatttgatgagcatttccaaatgaggataattgtgtttggttttttttatattcatagtaagcatgagttaagcatgagttagcttcattagtaagaaagctgaacttagagaagggcacacttaaattcttaatcaacagttactatatgtgtatgcatatttaggatgctattatcttttctgcatttcatgcttgccaacacgttacaacttaccaattttaatgtgattgagcctagttacaactcatatatgcatatggcaacaacttggaaataataaagttccataactgcttttttttttttttacctgtaactgaagccaaaaatgttttaaggtgttacttatggtttgcctagagttgttcttgatttggtaatactctagttataacatgtaccatatacacacaatcaatacaccactaaaattatatgaatggtaataacatttaattatacagccattatatttgtgggtcctaaatttgttggttggagagttcaactttgttgggataagttgagtaatatttcttttttgtattcattaattaaaaatactctcatattatatttcattaaaatctacgtacttttatgagtgggttgcttaatatatcttatcctctacttaagtataacacatgatttatattaatttaagggatataatgggaacattatttataaaatgagtatattttaaaaaatatggaaatgaaggtaaaaatgaaaactaataaagtatgcaaaaatttcacaactaactttggtggtgttgcataattagtcaatagtcattttgaaagtaaaaatataattacattttgtaggaaaatgtctttaaacaataatatgaataataatcatcattattttaagtgtttaaaaattatagtttgagatctgatattatttaaatgtttgaaatataacaatttaaaggagtttataaacatttgtttttttagtttttatttggttatgctaaagcaataagaataacatggtgaattgaattacggaattgtataacattggttggtaaaatttattttactttttaatatttcactaaacataattgtgaactttatgacatcttaatttaaagatttttctagtgctgaaattataatttacttgataatggagggataagaatacaataatattactggagaactattgagcaataataatcatgggaatggatagatgagggatgacataagaatgtgataatagtcctacttagctccatgtatgaggtctacccagattgtaaaagagaggaattctaggaaaagctacaacaa

SEQ ID NO: 29061 - DNA, 2666 bp, Cannabis sativa
ggacactgatagaacaattatttccagtcacaatagactaacatgctagatataactggacataatctgacatacaaaaacttggaccttacaatctcctccatgacagaatatgttcaatgaccacaagacactatgacagttaccaaatactaccacccatagttaaacactcaaaagataaccatcaacagaaatgataagaacataacataataattgtctttgcagtagattaacaaaatgaaacataaccaaattataagaattttaaacagatagagatttcttccccttcattgaacatgagctcaaggtacatcattgctttttggctccccctgagaaagtgctgctgaagaatcaaggtgagaagtagtagcaactgtagaaggattagttaacactggaggttgattagttaccactggaggaatgctagaatgaacctgagacacttgacttaagactggagcagaaatttaggctccccttgaacatgtgttgcattacaagacccatctgaggatgcattaaacgattctcgatgaaactttggaagagatatatcaatggatggagtgaaaggatttccatagtgatttttcaagctagtggtcttgataatctaaacttgtttgtacatagagacctcaaaagccaactgacgcttttgatcctttttatatcttctcacaaatgatttaaattttgaatacatttggacctaccagctaaaatttgataaacctttgaacatagaagattttccttttgacggtttggaagaggaaggagtaatcgaggaagactttttgtgaactactgttacaaactcttgttgagaactggattcgaaacttcataatcataagtcattagtggaggttgggctgccataagcacttgttgaatgagactttggaaaatgaagtttgttccttgtaccagtgatttttgagacttccacaatcctttcaaatatgagagatggcacatcaatggaagcatgagttcccatagcatagataaatctcccaatgtcaagagtgactgaggacaaatgagagttagaaaaccaattgtacaatgcaacccaatgaagaaccatataaatggggttaaatcagtggctaaagtttcttgcttttcccaaagataatcatgccttccatttagcactctacccattatagtttgatctggattaaaatactttgcacaggttggattctttactgagttaacttttaatatgcatgtaaggtagaaggaccaaaaggaatacgtttactcgtgacaaatgtactaacacaacctggatgctcttcatctaacacaaatctgtctaaatttgtataaaattcacgaataaaagtggaatgcgatgtagaaaaattagagacagtgtgaacccatatcctaatctttaaaaatttatgaaaattagaaaaatcttccaaaataatgatttgttcaaaccataaatcacgactaccaaaccaacattgataaacagatgcttttgagactaaggttttaggcaaagctttctttttggattttgtagacaagggtttgggaaatggatcatttgatgagtctggggatgtagagacaggtttgattttggtctttttgggagagggttgataagtgggatcattagaggattttctttcaggcacattggttttaagagaagatgactgaactttttctttacctttaacttgtaaaaaaggacggggtggtcctatgggtttagatttagggttactaactggttcaacagttgacacaggtgacatagaactgtagatgaacgaatgacatgtttggttgatggcttagaaagagaagtggagatagaaccctttttagaaaaagaggagccttaccttgaaaagttcaaggcttttgaccgaccgggggtcacgaaggagactggggaggcagatgagatgtcaacacagtaggaacaataatcaacatttgataagggacgataaataaagatggagaagactcactgaaaaacccctcaattgttccagtcgtgactcctgaggaaataggggcctcaagtggtggaggaatttaagctttagaagaaatcgatggggtaatgacattctccatgattgactaaggcagatacaccttcgaaagctcaaaggagttgaaattttcaaaggttagggttttgtggaagaaaagtgaagtgaaaaatgattcactaccctttggcttttaaacgagaagaaccctaacaatattgaccatgcaaagaaaaaaaaatattatttttaaaacaaactttgcaaaactgagtagtacaagcccaaacaacgtatttttcacctcaatttatggcatttatacaaattgaaaacatagtgacatgagttaacttgatcataattaatcaatgaatgcaaatataccaacaaaaaaaaaaatataccccagaccttaccaacagagatttaaagagtgcaagcttagagatgcttaaaacctaacagagttaataaagcagttagcatatgatcaaagaggagaaaccactactacaaaattcactattcacgtctgtttttaagtgtcacttaaagaatttacgtcagtttataaaaccgacgtatataccgtagtcgcaaata

SEQ ID NO: 29062 - DNA, 1148 bp, Cannabis sativa
aaataatgagcagcatttaaaattggcacgttgcacatgacgtcaacactccaataggcacattgcaagctccattttgtaaaattgcaaaaaagaacttgagggtaaatgttgcctagaatttctgccaaaatacatggcagttcaggagcgagctaggtagtaatggaacccgcgttacaggacacgctagctacttaattactcccagagtctattatttcaaaggagtaataatcacaggatagtcaacttcgagaaggtcgttggacattagatgtctcttgccttttcctctccaagtaaagtcgacccagaaaagggtgggagaggactggcgaagtgtaacacactgtttgaggatgaaaacattgtatgcgcatttaatgcggcatgggaaaaagtatttgacaccttacgttgaacagacgtgcttaagggtttaaacccataattcattgattttacgagaccccacacatcaattgatagatgcataaatgagctatcaaatcataaataagagacaaatctagtctcaccaaacacctatagacaacccaaatacatcataaaaagtaggcaatcatgtcctaagatcaaatttaaaaaattatgcaaatcatggttcatacaaacacgataatggtgatcttttaccactattacgagccgataaatactccaataatgtatacaaattttgtaataaatactcttattatacagtgacttgtggactaagctcattaatgtcttaattacataaaaattctcttttctaatattcattaattacttcatacaactctaattaattagttgccgaaaatttccgtcaacaaacacaattaccatattttttttttgtttgtataagaaaagtgtggatgagctaaaatttgtataaattacatctaataagatataagacaaaaataaaagaaagagacaaattaaaacacgttagaatatatatcgtgaaagacatataattgttaactctcatcatcaaataagtcacacatatataagaaccgacaacttatcaacatgattacatcaacatgtttgcactattatgataagtttctttcttaataattatatcatttttgttatttatataaatcacatgtgcatatgta

SEQ ID NO: 29063 - DNA, 1504 bp, Cannabis sativa
tgcagggcggacgatttcaaagcgaactcaggacctgcgaatcacgtaatcttaaattttctagccctagcttactcaaacattcatataaagctcactcaaaaaattaacattgcaaaataaaacacaaacaaagaaaccaagattgaaaacgtaaaagaagtcaacaaaaggaaaaatcacttactagttcgggtgaaaaattctgggtgtcaaagaagcttgtaatgagaaccctgggtttgagaaatctagatcttggtgattccaaagtcgagaaatacaatcggatgaaatacgaagaaaaaaaagtgaaagacagtgaaggcatgcaatttcagatatggaagtggttgagattttttcaaattctaaaagctttgtggggttgtaatggcgaaagtggagggatgattaaaatttataccaaaaaggcaatactcgttcaatcacaaaaatcatagatcgaatggatgggaactaatggaaagagaacggtcagaacattaaatgttgaaatgatttgcctcgaagttttgaactaccaaaatgaaaccatgcaattttccaatggagaaaatacgatcgtactattaagacaattgaaaaatcttttttatttttttttttaaaaaaaaaaacactttttaggggcaattgttatacccatattttgaggagcaatatgaagctaacacgtgtaacaaagttaaaatatgagccagctcaaattatgcatcaataaatgcatttatatgactcgcctcgagaaatacagttgatagaaatacttgaactcgccatcacatagataatggcgagacatgagtaataactacaaaccgataagaccagcgaggtgaacaagtctatttcgggatagactgaatacattatgaaattatttggaacgggtagataatgagttttgcagctcattgacccacatgcttgtgagtatgcaaccagaataaggacaacttcaacattattcatctcattcttgacgcgttgaagtaagcatctcccatatacttcactcaacatttaaggaagagtgctagatgtactatgattatacacttagacattattccacggagatgtttaaaaaaaatattgattgaatgatgagaacaacaaagcacattcaacacaatcgtttatagataacgacaaagagtaattatgcggctatttataattctctcatgtgcctaaatatgaaacgtggagaatattcacatttcataaacaattacaaatgattagaccccaagggaataattgtcatcctaaactcctataaataaggcatagaacctagtgcacaagggacgaccaagttttggaaaaatagagaatattgtatttattgttcatttttgcaaacagttaattgtattctgtatacaatatctaattttaaataagatagactcgtaaactatgaaaatttaattttaaatcacgtaaaaatattcttatcatttattgttattct

SEQ ID NO: 29064 - DNA, 3082 bp, Cannabis sativa
gaatggtctataaatcatttcttgtcattctatattttctcaataacatatcattggatgaatggtctctgttgcatggtgaattctattgttttgctatctccaaattttttcgaagatgattgcagctccttcaaggaaaacattgaatttgatttcacttgggcgattagcatccatcttgaaccaagccaaccaagaatcccagtctaggaaacctgggatatcggttctcaaatgccaattacatccaaaccataaggccctcgcatagtgacaattccaaaagagatgcaatgaatcctccaacactaaggagcacataggacatccggtgtcgcgaatgtagagcatggagcttagcttgcttcgtgtgaggagattgttggatagaatcttccaccacagcatcttcaatctactatgaatgttggccccctagataattctccactttgcatcgttagaatcataagcctccaagtttttaaccacccgataagtagatttaacaaagaatttaccattgcgctccaggagccaaatccaggaatctggagaggggatactaggcagcgtgatgttaagtattcttttagcgtcatcgtgatcaaaccatctccggatcaagtcttcatgccactggttgtttcagatgaaatttttcactaagcttatgccttctgtagcatccaaacggggttggggttggagaacaccattgggaacccacggatggaaccagattgaagtggtcttaccatcaccaattttgcgacacaaccctttggataagaggcatctcgagtttaaaattgctttccacagaatcgagtccgcaccattagcttggacatccataaaatcatgattctgaatgtatttgtcgttgacaactctgctccaaaggctattgttatccgttagagctttccaagcccatttcatgagaaaagcgacattgatggattccgttgagcgaaaccccagtcctccacaaaccttttggcgacacagaacttcccaggcaattgtatgcagcgatcctctccctgtctggtcaccccaccagaaatcacgaagagccttatcaactttctttgctgtggatattggaatgacatccgaagcaactacatagtttgagatggctgagcctactgatttaatgaggcaagacttcccagcgcttgataacaatttggctttccaaccttggacccgcttcagcaccttatcaacaataaaatcagcgtctttggttcgtttagaagacctgaaaagcggaattcccaagtaggaagcattaggcaacattctcttcatcccaaggaattgggagatagcatgagtcctagctcgaggaatccctctagtgaaggtaatagaagatttcatgaagttgattgattggcctgaccaactacaatactcattgaggcagtccataaaggctttggcctccttcaaagtagcttgcccaaacagaataatatcgtatgcaaacatgagatgggtaaccgagtcaccttgtcttcccattttgaatcccttgatccgattcttattttccatttcgaagaaaagtctcgatagagtttcttccgcaatgataaataaggagggggatagcgaatccccttgtcacaacccgcaagaaggtttgaatttccccatcaccgaaccattaagaagcagcttaatctccttaacggtgatgtaggccttgatccaagttaagaacggaggagggaatccgagagaagagagaacttgtatgatgaagttccaatccaacttgtcataggccttttccatatcaatctttatcatcataaagcctctcgatcctcgtttcttcttcattgaataaacgatttcccttgcaattattgtgttctccataatgcttcggcccttgacaaaagctgtttggttaggtgaaactattctgggtagtaaatatctcaatcgattagcaaggatcttagatatcaatttataggagacattacataatgctatgggtctataatctttggtgtaagcagggccttccttcttaggaatgagcacaaaggatgtgtcattgatatagtgaggcagagttccgtggttgaagaattatgtcaccatctcggtcaggtcctctttcacagtgtcccaatgatgagaatagaagcttgggggaagaccatccgggcctggagctttatcccgacccatctcattcagcgctgtagaaatctcttcggccgaggggattgcggtaagatcgcagcaatccttggttgaaatacagggatcaaagattctattggaggagggcatactggaaagggcattttggttgaacagctgggagtagttctcaataaacgctttggcaatttcctttggctctcttatccagatcccgtcatcgctcttcttaatgcattggatataatttcttctccgtcttatggtcgttgatgccatgaagaatttagagcacatgtccccttcttgcagccattggacccttgatttctgcttccagtggatctcttttcttaggagggcttcattaagttcatgtttagccatatcaatggccaagagatcatcctggttacggctctcagcctcttgaagggccaatctttttaagttgacttgattttgtatatttttgaattagttcttattccataagctgagtttgcgacaagtttgtttgacctttctgtgaaaattaaccaaagggttatgatgaagtcgcttcgcccatgcctctttgaccacccaaaaacaccgtttgtcacgagcccacatattttcatatttgaagagacgactacggcatcgtactcctcctgtagtatcaagaaggataggcctatagtcggaaacagaggccaagaggtgttctactattgcattgggaaactgaattctccaatctgctgtggctaaccctctgtcaagtcttgcacgttttatacaacctcttccagcagccatgcttcgacttgatcccttaacccaggtgaatcccgggccttggtatccaaggtcaacaatgttgggttttatgccc

SEQ ID NO: 29065 - DNA, 1693 bp, Cannabis sativa
ttaatcttattctttaaaaattgtatacgtatctaactttgaaaggatggtatatcatttatacaactatatgtatagttatgaatgagaaatatgatggatgttaagtattattattttggtttttttattatttattatatttaattatttgctaactacataaatatgaggatattactttattactaatattttctctatatttatatataagagttattttattattttaaatatttacattatataattttgtaatataaattaaaagattatttgaaagtattttttttcaaaaatatcaaagtgtcatctttaactatttaaattattgatattacatatttatcacactttaaaactcgaatcgtcatatttgagccttcaaaacttttcttggatggccaaccaccctataccactttgaattgaatatccatcatctttataatgccaaagtaaatcaagtaagtttatctatttattttattaatggaaattttatttatactttaaacgtttttaaaaatactccattttaataatttgaatacaatataaaatttatatttttaattatactaaatttttttaacttttttctttcaatttatatttctaaattattaaataaaattaaattatatttaaaatattacaaaaaaaaaaaaaaaaattactatatggtacctacgtgcgcagaaaagtagcacttttaatggttggttaataattgtaactaatgatcaaagtatttccttgtcaggaaaaagtaaaaaaaaaaaaaaaaattaatttctgatgtgacattatttacctctgcttataaatattgtaaatatgataaataatgaccactaaaaaaacaataactaggagtgcaacaaaaaaacggtactgtgtgttgtataaggaagaaacaaaagatccataatgacatcacacaaatatttataaaaatttgatatgaagtttttctttcttacaaaataaataagtaaaaaactataggactccaaaactatatatagtaaaaaaaatgttaaaggggtactcatttagcagctttgtaaaatataatattattatcaaatctcacatattttattttaataaatattttaaaaaatctcaaactaattataaaacactatctcatatatcaatactctacatagatgtatgccgacaagggtccacgttgatgaatattgagccataattgtgagaaattggaaataaaacgcttaaacggggccgggttggagggcatcatatcaaggttgagtagatatatgtaaaagtccaaaaatgattaagaaagacaaattgaaagaaatatacaatatcatatataatatatatatcattaaacggaatctttgcagccctagctagctaacacttttcgaacatgctacacaacagtgtaatttgcctaccctcatcacctcacctccaacccctatctaatctaatctaatatatatttatatatatataggaactgaaactgatttattatatgttatttttacctaatcttatcttaggaaagtgtatatatacttatattattacacattcgttaatatgtggaaataaattatcatatataaaataaatgagttactcatttaatttttaattggttttgagatgtaactctattggagaacattgtcccaca

SEQ ID NO: 29066 - DNA, 1968 bp, Cannabis sativa
  modified_base (1453)..(1453): a, c, t, g, unknown or other
ttaaataatcaaactgggaatattaaaatacggaatttcatgtttgaagtcaggttttagtgcaatgaacggttttgcaatcgacgatagtgatctctctgaatacttaacgttgaaaagaaaatctgacgaaactcgcaagaagtattgcaaagacaaagatggcatgcaaggcttcaaaaaatctaagtgaggttttttgcagagaagctcgaatttttttttttttaaaatggcaaagataatgaaaaggtggttcctttttgttttatacattaggttgatctccgtcggattaagaaataaatgatccaacgggtagaaattaaaaagaagtggaatagatggttatataatgctcatgatgtgcctcgaaactacaaaaccgccaaaatcagagggcatgcattttttcaaaatggattatgacaaaaatacccttggtaatcatttaaaaagcactttcactaaaaaggacattttaaggggcaattattatacccaaaatttagctgacaatttagaggatgacacatgtcaaccatgggaatacgaatcaatgaatgtaaaggcaattatactaaaaaaagatattaatggaataactcattaaatgcagagttaatagagtatatctatgactcgctgactaaatagtcttaagcgagacaaagatgtacaaactattgattcacatattgttaggaaaccattcactactacaaaaacgccttttagtgacccgttttgagagtgtctaaagtgttttagtgacacttcaatgcgtgttactaatgtaggtgtcaggaaatatactttttagagatacaaaatgtgtgtcactatatgttttttttatttaattttttattttgtatatatagtcactgaaaatgtgtgtcactatattattttttattttatttttaatttaattttttatttcatataaccagtaactccatatgaggtcactgtatagtgtatatatatatatatatttattcactaatcaagattttctaataatcatgttaaaacccaattttacaaatgaataaattcttttaccaataatattttttttcatatacatatacagaattaaaaatgcaaacttaaaccaaacacaaacaaaattatactaattatataaataatttttcaaaattaataaactctcatacatctggaaaaaataatatcatttacagtcaaaaaagctcatttacacatacattttatcaattacaataaacaaaatcacacccacacaaaatgaagaacaacctagatcaactagacccaaaactcgatcaaacacaaagccccgacgaagatagccctttccgtccacatgcacacacagaaacagagagaaataaacaaagaggtgatggagaagaccatcaacgaggaccattcgagcaaaaatgagagagagagagagagngagagagagagagagagacgaccgagagagggatagggtgctgggcgttgccgaccttcagtgcgcaaaaatagagagagggagagacgaccaagaaagatggtcggggtgttgggttcttggactggaggaaggtgacggttgccgggttcttggactggaagaaggtgacggtcggggttctcggactagagccgacttggggttcgtgattggaggggcttggggttctggttcgcactggagggggctaggggttcgcaattggagggggcggcttggggttctctgatcggacgaagaagagagtgagagagagttaggttagaatttttagggtttggttagaaagagatgaatttattactcatctaataatttttcttttttttattaattattaattttttcatataattatttatttatatttatttttatgaattttataattatatattttattttttttattaaaataaaagggtatatatatggtgacacgccacgcgtgt

SEQ ID NO: 29067 - DNA, 1839 bp, Cannabis sativa
ttttagttaaaaataaaaaaaaaaaaaaaaaaaaaaaaaccctttttattattatcatgttttcacaattataaatctaattcaaaacttaaacataagtaataatttgagacaacttatagatttgaaagatttatgtacaagttttttttttttttattttgtttaaacatcatttattggccctaaaaattacaaattctgcatatgtaaatcaataattgttttggcctaatgaaatcttttttttttctcattttattaaaaaacaatatttaacgatgtatttacaatacagttgcaatgatgccataaaaatttaatttcttgcaatcacacaaaaagaaagtaacgatatctaatgatgcatttacaatagtttacgataaaatttgataaacattttgttgagaggcctacctaatttttcacttttaatgtcatcacattgaggtgaaataaaaaagttggtattctttttgtataagatcaacatgtacgtatacaatacgtagatgtccaaattttgaagatgtcgaaggcattaaaattttaattaataatgaagtttgtaattaaaatgttgtactgtagtataatagagtaaaactatagtataatgtttcgaaatgaatttatctaaaagaaagtcgatcttttctctctaatttgtaatgctgttctctctatctttttcttttttcttttttcaatttgtaatgtttatcattatataatttgtattgtcaatagtttagcaatactattgatataaaaaataattttttttaaattaattcaaattacaaatacaattgagaaattaagagaaagttttcaagttcccaattcattcgtctggttcaataaaaagcatactttcgtggcgaagtattaagcctactaatagctagttaattgttagtgattctgttggtataatcggttaggctccactaccttagcaatattgattttacttcagttgtgtaaaatcgatatacggttgtaatgatgcttgtcggcagtgacagacctagaatttttattttgtgggggcttatttatattaaaaaatatttatacttatattataatcactcttattatatttatttaattttgttgggggtttttctactattttaacttataattatcaaattaaaaaagattacatttaaatttttaaaagataatatttttgttatagccctcacattgatacatgtgcgtccgtcactgcttgtcggtatctcaataattaagattattaaactaatcttcttcctcggtctctctccatctccctctctcctaaaatgtcttatgaaattcaatatggtattagaactctttcctccattaatggcaaatagttgtatctagatgttcttgacctaatggttcaaggaataacactagcaatggtgagaagggatgtgtacctgaaaatcagaacaattatcagtcggaaatggttcgaccgaagattaaagatcaagatttttctccaatttattttacccataatatttctatcaaattaaatgatcacaattttttactttagaagcaataaattcttgttaccattggcaacagattacaaccatacatcaaaggcgatcccccaactcaatttatttctaaagaagatggtgttgtaagtacttacaatctggcatatcttgattgagatgtccaaggttaggttttaatgttcaggatcctttcgtctaggactgaaagcttgctcactaacatggtttgatgtgaaacatcaagctagatctggtctctagcaataatttgttgaaaattattttaccaggatct

SEQ ID NO: 29068 - DNA, 1229 bp, Cannabis sativa
aaaaaaaaaaaaaaaattgagtttttactaaaaaaaaaaagggactatttcataaatatacaaaaataacaattttttttacattttatgggtttattgttttttttatatatatatatttttacagttttttttacaaaaatatagtgttgctttttcgttattttgacgttgctactacgagaaagtaacgtacaattttcttacaacaacacgaagtgttatttttctgctgtttcagaaaaatattatttgacgctactgttacagggaaataatatttttctttgaaaaaaaaaagtgaaaacctataaaagaagaataataaaaaaaaatcaatttttaagtgtattgtgtgttaaaaaaaatgtaaggccttgtttggcttttcctccaaatgtaagcccttttttaaagatttttttggtgaagctaatgtcacctaatttctttcaaaagtacttaaatcttgtatgttgttctataacaattggaaccttctattttgtaaaaatggattaaattgatattttaagctcaattttgatgaaataattacaaaatgatatcgtgaggctaatttttcaataatgatttttgaatctaggatgaacaaccactataaatttagtcatttagaaaaaaaataattacataaagtattatttttataaaaatttacatttttacgttcaaagatttttttcttatatttttacgatattttataaaaattacacgaaaataacaagaaaattacataaaaataacatccaaacaatatcaaaaaataatatatagggtaagagtacaacataaaaatatatcaaaaaactatattttctataaataaaatcataaaaatattcaaaattctgtacaaccatatttttttgttatttttgtgtattaaaataatccctttcaaaaaattacctagttggagttgagtttaggagattgatttgaactattaaaagactatggcctaaattatcattttaaaatacatgggccaattgggtttttatgctgaatacagaggctaaattattattttttcttgctgaaattataataatttttattttacacctaatttctttatttatatatttttttttattgagatccaaacacttgaaactttaaggaaaattttcaataaaagaaatttttaataggctaattagcaattttcccccctccccccgaactttgacatgtac

SEQ ID NO: 29069 - DNA, 2519 bp, Cannabis sativa
  modified_base (49)..(61): a, c, t, g, unknown or other
tttaattatcgttttagaaagttcgtatttagggtgttaaacaacatannnnnnnnnnnnnctaagatcatggtaaaataaattttcaacacgaatatctggctgtcttcgatttaagtgttctcaaaggtcaggttgtcttcactcataattactcacaaatctcgtctctgagtagctttcggattgataactccacgaattactaataatttcttggtcagcataacgtcgaggtctacttccccctcacgtttgcttactcgatcgactatgtcctcgagaccttgagcgtccaaaacttgaacttgcttcatcctatattgaccttctccttcgaaagaggttagatacacgtcctctattcaagtatgtgtatacatcctctctctactcgagaaggacattgagggtgtcttggaggtagcccacttgaccttagttgatttccaggatttctctcgttaccacaagggattcccaagttccttagtcgaggctgtcttgcatcttcattcctgcaagacgcttctagtacatcatttcgtttattcccatggttcttaaatcctgtggaaccttgacgaatatctcgtcgttgttcttgattatttgtttaattatccattgggacatcccttgtatccctaggttcttcttcttgggtgttttagggattcccctggtttgtttcttgtctcttggttctagagcctcgaggtcgcccatatggtcttctcggtttaattatgagggatttttccttgtgtcgccctagccgctgcagcctctctttccaacttagcatttcatcggttagattcggctaagcgttgtcgaagttgtctattctctaactccaccaatggtacatatctagttggatcataagcatcctcactcttaggcacatatctggcagaattattggcttctccattccttcttctaggaatttgatcaccaccaccatcgttcctccttgaacgtgatgtttcagtggtatggggtctttaagatcgcattggctattttctagggcgacgagttgtttctctagggtgatttccattgttttgatagtcattagccattgaatatgattagatcaagtttgtaaagagggattttttttgagttttattacgaaggctctcaatgaaagcaccaaactgttaacgcagatttttgttaactaaattaaaatagcctttacgtaataaattccttagaaaaataaatataagtaataaatgataagataactccagatatttttacgtagttttgtagttaaaatctacatactccacgagtccttcttattagggatatttattgaatacaaaatacaatctaagaattttaataataataattatctctcaaattttatgtctcctatttcatggaatctatccctatttatagaaatattgtttggcagttacactttttttgggactgattcaaatacaacagctcatgatatatggataatccccacatttcacttaatcacatgtgggataatatcttataactgcccaattactctttagtcttatcatttagatagttattactgacgcggaaggttacatctcgctcaatatgagtttccctccttgtccatcttaagaaaatatactaagtattgagaagtagttcatctcgtaatattcttttagtggctttagcaatgcgagctgatcttctcgctatatgtaatgtgaggcagcttatgttgatacattcattctgctcgagtggatgaatattcccttcttgtttgtatattctgaggcatgcatatatctcgttagtcttagcttaatagttattagccatgtcttgcttttgactataaactcaatgagttttgaatattatctatcaaacctctatttaataataacgagttatttaatatgtatttattgatataatatataatttataattgattcatatttcttcttttggacatgtgtcaactattaaagtgtagtcaaattttgggtataacaaataattttcaaacttttgtaattttttttaaagattttactctaatcaattgatatatatacagtatatttagaactgcaaagaaagaagaataaaacaacttcgtctgcttgagaaaatagaattacatgatagatggtgaaatgaagtacagatgtgtcgactgcggcaaaaaaaatatctttatttttataattattattatattttaattttttattatttattttttttaaaataatttaaatcacgaattatcacacttatttggcacttaaagtattgataataaaattgattgtagaattacatttaattagatgtcattcttattattttttattaattaaaattatgagtaataattttaatttataagatgttttattacaaatatttccataatttatgtgaaaaaaaaataatttttaaaagatttttatttaataacaaattgtaagaagttaattgatgattattagtaattt

SEQ ID NO: 29070 - DNA, 3221 bp, Cannabis sativa
gtgataacaatgcgaatggtaaccggtttgacaaccggactgaatgtctctgtaaaatcgaatccaggctgttggtgaaaccctttagcaactaggcgagccttgaacttgttgtgagtgccatctgaattttctttgtgtctaaagatccatttgcagccaatgggttctcttcctgagggtaagggaacaagagtgtatgtggcatttcggattagtgctaacatctcatcagacatggcttgattccattgctcatgttgtaaagcttctttgacagacctgggaattttaatgaccatatatatcttgggtttgcgaatacctgacttccctctagtttgcatagcatgagaattggccaagggattaggagttgcagcagcagtttgctgttgtgttgcagcaggaggttgctgttcagcagcaggtgtagtagacaatgtctcagtggggacagatctttcagttatggaaacaccaccatgatcaatgctcagtcgagaattttgttcttgcagaggcaccaaactgacagggatagtggacacacttggtactgctggtattgagggaatggtctgcattgttaattcagtcactggtgcagaaacattgcctgtcgaatttgaaccctgcagaggcacaaaacagcttgccatatttggcacaatatgattagtggatacaggtctgtcattggtagtagtctgtgaatttaaagtgactgtagggatcacagctgaagtgtaaaagtcagagtaagaataggaatcagatgattgttttggtagtgtagagaaggggaaggatgtttcatcaaagatgacatccctggaaatgtaaacacgaccagtggcatcaagacacttatagcctttgtgattaaggctatatcctaagaatgtacatggggaagacctgaactgcaatttgtgtttgttatatggtcgtatgttgggaaaacatttgcagccaaatgttttaagaatagtgtaatcaggtataatggagaacaacttttctattggtgatacattctgtaggacaggggtagggagcctattggagagatacacagaagttctaaatgcttcatcccagtattttaatggcatagaagcttgagcaagtaaggtgaggccattttcaacaacatgcctatgtttccgttcaactaagccattttgttcatgagttgttgggcaaggatgcctatggagaatgccacactgtttgagaaggtcagaaaagggtctaaactcacctccccaatcagtttgaagacattttatttggtggccaagttggagttcagattcagctttgaattgagtgaatgtttttaaggcatctgatttgtttttgagcatatatatccaagtcaacctagagaatgcatcaataaactgaatatagtatttgtagccattgatagatggggttttggcagggccccatagatcagcaacaacaagttgcaagggctgagtatacacagtaagagaggatttgggaaaaggcaatttgtgaattttgcctaaacaacaagctgtgcaaactgaaccagaaattttattgctgatttttatattacaagaatgaagtacagatttgacaaccctttcagagggatgtccaagacgattatgccacaactcatactcagaaatatcagatttattacagtgagtgcaaacagtggtgactggttcattattctgggatgtggatgcagtaaggacacttggaatgacagctggtgtgggctcttgaacactgaactgggatggtttaaaaatatagaggccattctggtgtatcccagtaagaaggatggcttgtgtcacctgatctttgacaaaacatttgtcaacatgaaactcaaaaaacacattgttatcataagcaaaacgagacacacttaacaagttttttgttatttcaggcacatgtaacagattattcaaaatgagaggatgggatgaatttgaattgataaaagaatgacctatatgtttgattgacagacctgagccatctccaacatagagttggtcttgaccttcatattcagggctgttggttaggttttgagcatttggtgtgcaatgatttgtggccccggagtctggataccaattggtgtcttctgtctgagttgtttgggcaatgtttgcctgagcagtaggtgaattagttccttgaaagacccctgtgaagcttttatcgaacctgtaaaaacagtcaatgactgtgtgtcctatcttgtggcatagttggcactggacacgattaacaggtgtgggaaatcgaccgcctctgttcataccagaaacaccacgtccattagagttagcaggaaaaccatagccatagttgttacctgtaagagcaccccgattgatgaatccacggccaccaccacgatttgtggacaagggagaagggatgcgattgtagttggtgaatctgttgattcgattctggtaggctatattagcttcagatgcttgatcagattcgatcgtgacaagattggcactgagatccgaatcttgatctggatctgtcttctctatgcgagactcagaagctagtaacaaagcttctatttctgcaactgagtactcttctattcgagtattggaagagatgataaatgtatcatactcactgggcaaacccttgaagattgttgcaatgtggtctctcgcacttaggacttctccaacactcgcaagaaggtcaacatgctgcttgaccttcaaaaggtactcattgagggacatcgatcttttcgcagcttctgtaatttagttctaaattccaagattttggaggagacttgcaaggtgaagtgtttttcgagggcattccagatctgtcgagcagtattgcaccccaccatgcgtgtaagaaggctctcagtcattgatgacagcaaccaagacaccaagagctggtcttgaacctcccaatccagaaattcagggttaaatgtgcttgagttttgatctgcatcattcaagaactgtggtggtggagctcgatcttgaatgtatttgatcaacctgtttccacgaattgcagcgagtacctgctgtttccacaagagaaagttatgatcgtttagtctaatggaaagattatgattaaaacaaacaggactgtgatcttcagagttgtttcttgggcgattgaaggctgaagctccattc

SEQ ID NO: 29071 - DNA, 2747 bp, Cannabis sativa
catagtcaatttatgaattttaattgatttttttccaaatgaaatacttgagttcctcaagatgatgttatcgtaagcattgtggggaccatgggcctatataatcaagttctgaaaaatttgatcttaaatttaccaccataaattttttaacttattaattcctcatgactccactatagactaggaatttaccactagtctgggttcgggtccgagttcgggttcaggtccaagtctaggtccgggtcgaggtctggggtctagggtctagggatgggtccgattttggggatggggtcagggtccggcgctcggggcccgagttccgagactaaaatccaagtccaggtatgtgagcaaaaaagtaaaaaataatgttaaacaaaaaaaatagaaaataaaaaacaacgttttgatgttttctactttctagttttttaaaactcaattttcaaaaaactatttttaaacaatttagccaaacacctcctattagtttttgaaagttgtcttctgtttttaaaaactgaagtgttaagttatgaagccaacaacctcttagaacatgtttggcattgttttccagttttttgttttcaaaaataaaaataaaaaattatttttcaagttttcgaaacacaagtcgcctttggttaatattttttaaaaaataatttttttattttattttattttttgaaaaataattcaatactttgagatccgttatgaacaagaccagacctagattcagaccctacccccagacctagccttagactcggaccccgaccctggtctagactcgcacctcggccctagactcaatcccggtccaagccccaaacctcgaccctggattcgaccccgatcccgaccctagacttgaacctcaacttgaaccccggccccgatcttgacccctaagcctgacccaaatctcggaccccagacccgaggccgagactaaggctaagctgaaaccgaagccaggtcgggcctggggccgggaccaggtccgagatctaggtctggggtcgagactaagttcaggtccaagtctgagtccaggatcccggtcggggtccagggctcgggtccagagttgggatttgagttcaagatctgagaccaccagggtcctcgggtagcgattcaagttcggggttcggggtctagggccaagttcgggattcggggtccgggtttaggtctagggtcggggacggaggaggggccaggtttggggttagggtccgatctgggtccaggtttgagtctggggtccaagtccgactccgggattgaaaccggtatggggtccgggtctagggatgggaccaagtctgactctggggtctggggctaaggctggggtccaagtctgtgttccgggcctaaggtttggggtcggggttggggcccgggtctgaggtcagggtttgggtctgggattgggaccagtatgaaaaaattatgagtatgatgatgtgagataaagtagaaaaaatattgactaaaaatagattattttttgtaactttattttctgaaattgttttcaaaacaatactaaatgcacgcctaattgttttcaaaaaatagtttttttaattataatatcaaatatgtacttaatttcttgttgttttcttgtaataaaaaattattctaaatgtgtttggataaaaagataaataaataaaatctcttaaatctaaaagtcttttgggagaataagctaagattttgagcttctaacgattggaatttagagaacctagtttctcaaccacatttcacattattaataataatgtttgaaaatattactataattgaccattaacaagtaataatcttgtttgaaaatattactatgattgattagaataatagaagagtttttatatgcatgttaatttggatcacgtaattatctttctaacggtatatagttcattaaaattgaacttatagatcgaaagttagaactaaaatagtgtgacaaaattattcaaaaataatttaattaaaaattatctaaaatattttgttaaatgcttacaagaatttgttgaagttaaaaagaaacaatttgttaaataaatattttttaaaaaaataaataaacataattaaaaatatactctactttttctttaataaaaagttgcacacttcattaatttataagtcgtccatcatatcaaacatcactaataatagaattaacattgaagcaaaagttacttgtcaaatagtgatgagcaatcttatttgaagaacacataataaaaattaataaaatattgctagaatacaaagacttataattctgaataactaaaccaaatgatgaaatcaaaggagttgaagtaagactgcaaacacaactaaaagaaaattcaacctcgtcgcttgatccaactaagtacctcatttactcttattgtctctgctcgccacctccgtggatcccaaccacatgtgtttttaagaccgtctccaatggcactttaaaaatctatttataatgtagttttttttcagaaaaatgcatcctagaaaatgtctgaaaaaacctgctacggaactaccgaaaagggtgaaaaaacctataagtataaatataatttcaactgtaatcagacaattggaaatcagacaatgacagagcacatctgtaactagaaaagctttattttgttttgttctcattcttcagttccttcttctcgcat

SEQ ID NO: 29072 - DNA, 2275 bp, Cannabis sativa
  modified_base (447)..(447): a, c, t, g, unknown or other
tctttagaaatggtcatgataatgtaagagattatatatgttcttttagaattggtcccaacaattaacgcgtacccttcatgtggtttataaactgttgtttggaatggcgagtcccaacttttcaatcaaccatacattttaagtcaatatggaaaggaaaatttgagtttgactaatttttccacttctcattcacacttaaatactattttagattttgtgttttacaaaaattattgatttcactttttattttgttaaatgataaatagacactatattttccaaaatagtaaaaataggtaccatgagctcaatttttcgataattttattttttttactataatcaacttaaagacaatttctaaaatgaacagataaagaaaatataaccattttatcataatatctccagatcgtattattattaaattttattttnacaaaaaatcagttcatggttctatttgtactattttgaaaaatacagagtcaatttcgtcatttaaccagttctatttgtactcttttacaaaacacaagatttaaaatggtatttacccttattttaaaggttatttaaaatttttacccccgagctatgacctatgcattattatgctccctgaacttttcaacctgttagaaatggtccctaaactattcacagtgttgtaaattggtcattctgtcaagttttatcacacgtggcaaacaaaataataatatgactctttagttagttgccacatcagcgccacatgtataatttaaaattataaaaaaaataaaaattacataattttaaaaaatcaattagtggtgattaagaaaaatatgtaaaataatctaataattaataatttttttttttcaaattaattacatacgtgatatgatactgacgtgataactggataagcagtcatatcatcattttgtttgtcacgtataataaaacttgacagaatgaccaatttataatactgtatatagtttatgaatcatctttaacgtgttgaaaagttcgtttgcttctcgcgacttcttttactataacttattatttatttccaaaaaattgatgtttaatgcataagttatagttcgagaggcaaaaatcttaaataatgaggtaaagagaggcatatcctaacaatgagataaattcctctatgcttgtaagttgtaataaggacagtcacttacctacaaaactttaactttaaatcaaatttttttagacatgtgaaataaggttgtataatttttcaccttaatgtgtgtgttatttttaaaatttaccttgggccatttattcagctttcttaattttgtgcagattttggttatttcaaatcatagatgtaaataacttctaatcagaattaccataaccggttgaagtagcatgatcaccctcttaagttttgtaaagatatcaattaatatcatacaaaccaagcaaacaagccatcacttaaaaaaaaaatttataggtaagaaaacctcactacatcccagaaaaagtgggtgaataaatgaaaaattaaacagcctgctcatcaaaatagctgccaaaattgcttggatatctaatatgtcaaccactttgtctctgatatctacaataaatattcagagatatcttactaccaactatcttgtcttcttggctttagacaactttttctttcttttcttcaaagccttgggcactttattctttcgaccctctctcttctcttctttcaccttctttttgtgctcttttctagcagctttcttatcagcaggagtttgtgactcagtttccgatgaatgcccttcagaatctgtcgagtcttcttcgtcttcatcactactagcctcggattcagtctccgcggaatttcctacaaggttcgcttcattttcctgtggctgatccccagatagagccggttgctccttggaaagagcctgctttagtccggtgatagtctgatagtacatatcgcctgtgtcctgaccactagtcagccgaatcacatcctcctcaacatttttcacatgatccaatgtctttggaatgtatgactgagaaaagtaccaacataaaatattaaccacccaacattagcttaaaaactattatctttgtatgatattattgataccacaaagatttttatagcttgtcaaatatggtacctgcacaaatacagaatctgcaatttcttgctctgcagttacatcccctctcgacatgattctttgttgcagctgat

SEQ ID NO: 29073 - DNA, 1675 bp, Cannabis sativa
  modified_base (37)..(37): a, c, t, g, unknown or other
ttaggatgttaaataacatacgtggtagtaaatctanatcctggtaaaacatattccaactgttgccccccatgtgtgatgagagcaattcctttaccaaaaagtttattgatgtgatttgtctacatgtaatttccagatgggcttgtcttcattctcttctggtagggagtcctattctagtcctttgtctggctcgggactatcttttgaattgtcttcctctttgcctgtacattccaccacaaagtccgccaaattctacccttttactgctctgtagggttgaaaaattatttcatacaaacccaactctatagcccactggagtaaccacccagaagtgtcgggcttttgcaatacttggcacaagggttggtcgatatatacccaaacaagttgagcttggaaatagggccttaactttcttgtgcctaagatcagacagaaagttagcttctcaattaaaggataccgaccatctacctcaaccaattgtttgttgatatagtagaatggatgctaggcattattctcttctcttatcagcacgaagcttacagcgtattcaatgactgctaggtaaatccctaattcttcaccgactaaaatttttgagagtacaagaagctttgagagtttcttttttagctcttggaaagcatttttgcattcctctatccattcaaaattcttgttatctcagaggatgttaaagaagggaacacacttgtttgttgactttaaaacgaatctgctgagtgcggctatcaaccaattaagtgttgcatttcctttatttttgttggcgacttcatatccaggaaggcttgtattttctctcggttggcttctattcctcgagcattaacataaatccaagaaatttacccgagttgaccctaaaggaacactttaagggattgggttttatgttgtgttttctgaagattttgaagcattcatccagattctctatatgcccccagccttcctagttttgacaagaatttaatccacatatacttccatattatgtccgatctggtttttgaacattttgtttgctaagctttggtaggtagctccagcaattttcaaaccaaacaaaattactttatagtagtatagaccaatttttgttcagaagcttgtatgttcttagtctggtggatgcattttgatttgattgtaccccgaataggcgtccataaagcctaagatttcatgtccgacagttgcgtcaacaagctgatcgattcttaagagtggaaaacagtccttgggtcacgccttattgaggtcaatgaagtcgatacatacttgccattttttgtttggcttgggtactagtacggggttggctacccaagccgggtagaaagattcaataatgaacttgtttgtgtggagcctttctacctcttcttttagtgcatgtacacattctttgtcaagtaatcttctcttctacttattgctttctctggttcctgctctctcagctcctgagctggcgccatggcacgaacgagatccaagaatcatggaaagcatctttctgcaactaaaattaccaaggcgttgaagaagcgtggaccgacttcgtcgagtgatgcaaagaaaactaaatcaatggatgaaattttaaggattgaacccatcgttttcactg

SEQ ID NO: 29074 - DNA, 24089 bp, Cannabis sativa
cccattttctgggatcaatttttaggcaatatttgaatgccaaagataaggtatatgtatatacatataattagcatgtatgaataaattttggtattttctttggttaatttgatgagaaaatatatatatacttgttatatattacaggtgatttttccagctgtcggtgcacgtgtgaagaatttagatgaaacgtcgtacttggttgttcaaaacaaggatgaaaatgatgtttttgctaaattattcgagcttcttaattctagattaactttaatggcccaaatccaaatcaatcatgaagctacgttccaaacagagttagcttccttgacaggtgttttgaagttattggctgttcagaacatggctaaagttgaggagcaggtaaatcatttgataatgtgtcttaactcttaagtactcatcaacgaagtttattatctattgttttaattttatagaggatatccaaatctttaactcaaattaaaacatgataattaatttaccttatattttatgtatatatatagaaatatatcatatagttctaaacacaaaatgccaaaatcgatagaccgaacaaacacatgattcccttgcatgtttgtgtctatattatataatatatatctacgtacgtaatatcctacatcactaaataaagtcaacgagcttccctccaaaaaaagtcaacgaagaaaaattaataaattgcatgaaaactttgtattatgtaaaacatgtacgtacaagggtgacgacgatgtaaattattaccaaccgataaaacttgcatagagtccaatttatggtatatatatcaaaccatttttttttgtaataatgttgttaatattgatactttgctcgtctcaataaataaattttttgtataagataagatcttataattgctctctaaattacatgatagaactcatcttaattaaaatatttttgaaattatatgcatgctatagttgtaataatattatacttctgaaaaaaaaaaattgataaaatgctttatattacatattcgaggaattttttctttacaaatcaactattttgactattagatcacattcaaaggtaaacaaccatttaacaaaaacagaagtttgaacatcatgatttggtctattttttgtacttaattatagaataaagtttgcttaacataattggattttgaatttagaaactatatataagaaatattatttttattattatagtgagacatatattataatctttctattcaatcgccattaacattttattgattgtactctaatatctatttatctattgtaatgagaactaaaatgagttttttaatcatcatgttaggtgtttcccttgcttattgaaagttactctcgtaaagagcaggcctctttggtatggcagttcttgaatgacatgcccacatatgtgctagctaaggtactttcatggctatcttcttctctttcaattgatgaataccaacatctgcaaaactcattaatcagaataattccagaggaaaagcttcttcaacaggtaaaatttcaaaattatcccctacaaacaaatgaaattatttcattttcttttataaagaaaaaactaattatatgcattaattgtttgtgtgaaggccattttcaactggattaaaagaaaagattctcatgacactactgcaagtccaatggagaaagcaaactgtgaaagtgaaactggttcacatccaataaatgatttattgctctggcataaggctatcaaaagagagttgaatgagacattggaaaagatcaagaggacatatgtttctggtgatttttctaatcgatcagctttcgatgaaagtctcaagtttatagctgaaatttgcatttgccacaggtattcttttatttgtatatacatgcttaagatcgggattgttggattggaatttcttccatggattttgttctggtagtttgaaagtattgtatctttggttgcagcattgctaaagaaaaagtcttgtatccagaaatatatggtgaaacttcaattttccatcagcatagtgaagtaaagagtaaattcaatgagttttgtgatttgattgaaagtggtggaggaaactcttctacttcagctgagtttctttcaaatctatgttcttgtgctgatcaaatagcagaaaccataaacaaacacttctacattgaggaagtacaggtaatttttcctttaagactcaataattttctaaatagaattaatttccatggtccaaatagtaaatggttgcgagtgttcaaatagattgctagagattcataattctcatattgttgaagataataacttagaaaaaaaattattgaagaccctatttttttttgagttagcatacctctttcattcctgaaattgactgatctctctgttgtctaggttatttcacttgctagagtgaacttaaatgtcaaaaggcaacaagaaattttgtatcaaagcttgtgtatgatgcctttgagattgattaaacaagtcttgccatggctgattggagtgatgactgatgaagaagctcataacttcttcaagaatatacagttggcaggtcctatatcagtcttttgagatttagacataatattcaaagaactaattttattttatttcttacacaagtttcattctttctttcagcaccagcatcagatgctgctctcgtagaactcttttctagttggggttggagggcgcgtaaccagagtttatgctcatcttcaagagcaaacaagagattctttgatgttaatggagaagaaacttttcaatcattctcaccatttcatattgctttgcctgctggagttgtctcccctgtttcctccaaagatagcaactctttaagatctttaatgattttggcagatagaagtgaggaacaaccaatagatattctgtttaaagtgcataaagccatacgccgagacttagaatatttaagcattgaatctgccagagttagtgattatgatgagacttttctgcatcagttcattggaagattttctctattttggggtttgtatagagctcatactgattctaaggataatatagtataccctgcattagaatccaaggagggactctataatgtggctcactcatacaaggtagatcataagcaggatgaaaaaaagttggagcatatttcatatcttctttctgaaatctcacaaattcatacaagcttgaagagtgttcgtaatgaaaaggactcgagtctaagtactttcggagactatgacattgaatgcatcagacagtaccacgagctatgtggtcggcttcaatacatgtgcaagtccttaagaatgatgatagatcaacatatgtcaagggaagaacttgaaatgtggccattgtttagaattcagttttctagggaagagcagcatcggattattgggttcatgttagggacaactagtggtgaagtgcttcagttactgcttccatgggtactttctgctctttcacaggaggaacatgatcaaatgatggaaacattaaagcatgtaacaagaaatacaatgttcagtgaatggcttaatgattgctggaaagacacttcaataagaacattcccaaatggtatattaaattctgatatgcattgaccactagaagaaagaaaatgtggcacttacataagatttatcactatttgctgtatataataacattaattcttcttaactttgtccaattcaggtgaatttcaaagaagcatggggatcagtatgttaaagcctcgtaagaatggcactggaaaggtttgtctagactcgaattctgagaatgtgacaaagaaatacctacagaacagtatgatcaggttggagccaaagagtttaatttccctgaagtttatttcactactcatacttaattagcactgagttgtaactaactaaagttgtgtaattttaaatgttctacttgtagttactggatgggtgctcagcaaagacttcctcaatcattgagttgtaaagattgcacaggtgaaaacttaaaaggaagattcccatcgtttcgagatcctgagaataaggtatttggttgtgagcactacaaaagaaactgcaaaattcgggcttcttgttgtgacaagctggttacctgtaacttttgccatgacagtataagtaaccatgcaatggacaggtaaattcttacattaactattaagcatcaagttttgacaacttcctatctcattttattttttggtggggcttgcaggaaagaaacatcagaaatgatgtgtatgagatgcttgatcattcagccgatcgggccaatatgcaagacgccttcatgcagtggatttccaatggcgaagtactattgcaatatatgcaaacttttcgatgatgaaaggtacataaatttgtgattgattggttctttctttctcaagtaaattctccacaaacaattgccaaaaagtaaaaacacctaaataaattgataacagtttctctaagtttcaaaagctatgccttataggaagcctttggaagaaacccactagcctaaacagtatgcataatgttataacaaatattttatgcaatgtgatatggtcattgatgataagtgtaaagcaaagcaaacttgtataagaactggtcttaggttataaagtctcagtttttttcatgctactaactcattaatctaagcattgttttctcggcacaataattagacgggtgactttctaatgtatttgttaaagagagcaaaacaaaaagattttttcccttaacttcatagtttaatggttacaatctaactaaagccaacattttgatattataacttcacatactaaaccttattagcaatctggaatgatggtttgagaagaagtgaaagtaaaacaagaagagggtgaaagagatattataacactaaagacagctttttctgtcatgaagaacatagtttgagaagattaaaaacttcttaaaaacaaagatttctgatcttaaaagcttaaaagaagacatataccctcgcataagcttttaaaccatttttcatgtctttcaagtaatgataaattgttgtaattttctgctgctagcaaaactgacctttcataaaatgtgagagcttgcatgaagtttgcaatgatcttttgtcactacagggaaatttatcattgcccattctgcaatatatgccgggttgggagggggctcggtgttggctattttcattgtatgtcttgcaactgctgcctttcaattagattattggatcatgagtgcaaggagaaatgcctagagaccagctgcccggtctgcgacaagttcttattcacatcaactacagcagtcagagctctaccctgcggccattatatccattcagcttgctttaaggtggtacctatgtctgtctcaaggctgatttataatatatttcaatagagcacactctaatgcattgtgttatgctatctgctaggcatgcaatccaagtccttatacatgcttgatctgcaaccaatcttcgggaaataccatggtaaaagaattaagtttattcttattttcaaaatctgtactacttttgcatgaaaggaatttctagcagagttcagtattcattgtttattgcccttttgcacaatatcacatgattcttcaccaaaagaagcattttaaatctttgggcaaaatgagatatcagttttacaaatttagactctacattaaggttttggcatctattttgatttgcttagatgtactaacatccataaaaacgtatttaacaacaatgcagaaagcaccagcagaatcaaaagttaccgtgggtggtgatggtcctgattggaatatgaaaccatacagtcatattgaaaatgggaataaggaaacctcgccatggactgaggcaaactctcagaagaaggattttggattagcaaggttttgggtaaggaaaactggctcattggattgtgaatagttcttctagtataactgtttaaaactttcccttttacttgcagacaaacaggttatatcctcttttgctatggtttgtaacaccatttttcatcacgggaaaagctcaaaagattggaaaagattttcatagtgcggttgaagggaacaaagcaaaagacagattctttctatgctttgttatggtttgctctttggtggtgttttgtgtcatgagcagcctcgtagttttgctttgtcttaagattgtgggacaagacaagtatgttttaccatggtagattaattttctgttcgtatcccaggaaactgaacattttctggtattcctgtttgttttttcaataaagtctaagaagagaagagaataaatgttagagaactgctatatggaatttgcttttgagattgtcaccttcggagtaagataatgcataagtcgtcttttttttttttcactctctctgtttatatgtattcataatgcataattcgtagtgtgaactattagctcaaactttaacttgatcttcaatacacgttgacagcagtataatgtgcaaattgatcaaaaagattatagctatgatcatctgatctctactaataatattagtaaattttagaataaccagatactgccacatctaacaagaatttgttattcctgtgaagtagtttctagatgttgcaatagatcattttccatcactaagtacaatttctctgatgcatatgtactgaattgcatgaatttaatatataactattgcttcgtttgagtttatactttcatatatgcatctagatagctacagttgcatatcacaccttctatagtcagctgctaaaatattaaaaccaagttaaatcacacctttataattcagcagagtattcatccacagaagagaatcctctgagagttagtccaagcatcactatggttacgcacaaaggggaaagaaaaaattgatagtcacagtagaattaaatatttatatcagaaattagaatcaaaattatgatgcagaaacataaacatgatacaacaaatggtttcactgtgtacaaaaaccttctccctctaatggaacagaaactagaacctatctataaaaccaataaccaattctaagatacagttggaaaaacttaaaagagtagatatagtataatactacctatacatattaggtccagcttgatcactatataatggtgatccatctacaggtgactcatatggcctactgctactgggaaagggtcttagtaatccttcatctgagggtatatgccgcattaaatcagggaaagggggataggggggatgggaagtatagttgtatctattgaaaccattattcaagtaaggatcgtaacgtgaatttaaagtagaagctcttgacccagacggtaaagagccacttgagaagaagcgatcatcagttcgaaatcctgcttgattttccatgtaaggcgttgaaacaaatcgatcaggagcagttactgcaactctattatcaggataatatggtgttaagtgagatccagaactgagaaagttgactcgtgtatttacttcagcagagaaatcagttggtaatctgaaaagtccactacacccagtggggatctctgttctgtccccgattcttgtatcaaatggagattgttcagtggattttttaacagtaattctgccgtctggtggcaatctattgattttctgatgtagtgataactttgcctgtttgagtgcatccaacacaccacctaaagcattaggtgggttgtgaggtactaatgcatagtgatcattttggccttctgaagcctctctttcatgggaactgctgcctaactcggatgaattgctaactaaagaccggttgctcagtggcccatgcaaaggtgggtcctggcagaggatttctgatggttgacaatcatggttatcctcactctgttggattcccctttcgctagctgtaggaaatgcaaattcttgagctggagatctggaaccagcagaattggttctgctgcttgtttgatcctctaccatctcagcatgtgaaggtgctaaaataccattaggctgcattttggataaatctatttcctttggctttgcctcttcaggttctgagatatctgtctcattattgggaagtgttagaggcttgacctcatctctttcctcagttatatctgagtggtttccagggtcatatgaatcctgcatgtcccaataattagacagatatgattataaaagatcccaaaatgactgataacaaaaagcattgaagttctttatttatcattactaaacacttaatccagaatagaagcaccaaacagatgtctaattcaaaacaggggacagatatagatcttcagttgaaaaaggtattataaatgcatgcattgcatggcaccacttgcctaataatatgcttatgcttttaagtttccttgcaagagataaactgaaaccaaacgaaaaagaaaaggctgccagttgctgcttggaaaaagaattcaaaatatatcacatcaaagtgcacttatcccatttcgcatttattcttggtcagagaggagaaaaaaaaatacactaatatgaatagatttatttatattgtcaaccccaacagcccatcgccagagcatataaatttgtttttatgaacatcaataaatttcaggtgtcatgagttcaattatatgtgttatgcctatgtaagatctctgactacattaatttgatttcttaataaactaaatttcagaaaagggtgaaataataattattatgtcataaatggtcctgatatagcttaccggtgtgctaatgttattttctctgaacttctcttcccattcattttgagccttttccatctcttcatattggtcaataagatgtgcctggtcttctaatgcttttttcatgtctctgtccttcccatggccattgacatcaatatgattattgattcgttgactttctacaccaccagaaagaggaccctctgataataccttcttgctttcagaacattttctcactgttcctgatcttgaatctgagctatctagaacatcttctggtggggtagcactagcaaatccattttcttgagaatcaaacttgataggctctgttttgtgctcctcaaccactgtcctgtgaagacaaagcagtaaaccactggaaatttttaagactaatcaagggatgccgcagagcagaaatcttgtgctcaaagatgaattttttaaataaaatctggtgctcaaaacgaagattctctttcccagtgtttaacactcttttttattcatagtggaagctagaaaggcacctattacacaagggatactggaaatttataaaggtcccatttaaagtctaagttccagttactagcctacagcacatatgacacactagctaaaatcagtgaaagaaagagagaggtcaaactaaccttgtttctctgcgtcttatttggcggcaagatttaccgaaatgatgtctcgaagaagaagaagaagagcccagggatgaaaaagcattccgccttcttgtagatggattcttgtatttttcgtgggaacgtggagacttactacgacctttccaagacaagcttctaccagataccggagatgcatcacgatcagaaccagaaaactcctccaagttactttgtctcctagaagtgaagtgttcctcttgagttgggtaatgatcaccctcatgggattcccggtgggcatcctgatcagaacttgaatcaaatgcctcagaagtgtcactaattccctgattctccaaaatggtgaggacgtctactgtggctttctcagccattcttctttgaatagaaacaattctaagttgttcctccagctcctctacctaagttgtaagaaaacaaacaaacattgtagcacatgaagcaagaacagaagtccatttctttgagcatcaaataaaggtaacttcgtagaatttcctagaaaagcattcagcataccctttttgcgagttcttcagctctttgtctagcacttttcgacacagacctctcagcaagcaaccgtgcacggaggaattcaattgtcatagaggaatcctccatactagaattactcctgattagtaaacacccaatttattcaaacaaaagaaaaaacaaaaccaaatatattcaataggcaatctgaatgcaccaccaaagggggtatatcacagaattcacttttctaatcacatgtaaaacctaacagagacatggggaagtccagtcctccaaaaataaatatgcatctttcttcaagtatctatcaatcatgagaagacaaaaaataaacagtagagtatgaaaagtgcagaaacacacacacaaaacaaaaaataaatagtagagtatgaaaagtgcaaaaacacacacagagcaaaagattaagaaaaggtgttctgaaatattgtttcaaagtttaaccatttcccagttgtcctaaggcatgagtagccgtttaatacacagaaaatcaacacacacgagtagccgtttaatacacagaaaatcaacaaactttacaagaaacataagtgttcacacacaactaaagccacaaaactacataacccaaagtcaatacaaggatttaagcaggaacacttagaacatgtgtacaaacagttcagagtataaaaataaagaaagaaacaaaaattgctaaattaaagaaaacaaagatagagagatgatctatacctttgatcttgcttttcgtgattggatttaggcattgtcaagaattaaacaaaaaagtcaaaactcccagcttgagaaatcagcgtctacaacaccaacaaataaaaggcagaatcactttgaactacagtgaattcagcctcggaaacatgaaattgaactgtgtaagagtctcatgaaaaggcaaaagcaaaagcaaaatggaaagaagagaggatttggccaatcttgcagaaaaaatcaaaataaaaagaagggatatagaccaataaccctaacggggtaccctgttttactctacacactattgagttgagattgagaaataagacaaagagagagagaaatagaaagagtttgggtttgggttttggggtccgttgagaatgaacagaggaagcttctgtgggtgaccaaccattggaacacatcaatgatggggccaatgccagctaaccagtggcaaagcagtcaggtcttttgatgtgggcacacccccccacattttattaatacactcatctatttatttattttatttttgttataatataaatatttttattttcctatttgaaaaaggaaaattacactaaagtcatcagctttggcaaaattcatcacttttaaccttatttcctcttggagagtgacacaggaaaatgcatcactgggttcgagctttggcttctgacttccatggaaatcttccacaacctcgcaggtaatcccttctctttattgttcctttctctctcagatttttgatcttctcgcttgaaatgatcttcttctttggattcacagtggtcatactgccgtcaatattggaaaatcgaagatcgtcgtttttggtggcctcttcgataaaaaattccttagcgatatcattgtttatgatataggtacttcgtttttatctgcctttgtaaacgattttgcatattcttgattcaattttacctcggtatggactcttgattggcattgctcttttgactctttattagtttgtataatttcttaatatttgaatatttttatgtataattgatttaatttagtatttctggagtatgcagtcgagtttgttactcactatcactaaaacttaactgcattcacagtcctaatagtttaatacattgactgcaatttgcctaattcatcgtaagtgcacgttacactaatgtcgacaattatatcattggatgaaaattgcaaaatgatgaacaaatcaagtatggtgatatattgatttagctaaaatgtaactgatgtttgccaatttcttctaaactttatcgtctagtgaaaattccacaattataaactaatcaagtatgtgatttattgctttagctattttctctgaactaagttttaggtacttgtgtttttaagcattcctttgtatttgtttttctattcttttgagcaacttaaatgccttagtttttaaactttgttttcaggtaatgaaagtttaatttagtaagagggataatcctcttgttttaaggcaatgttgatttagactccgttaaatgttttctcactgtgaggtttagttggtttttgatcttcttattgtttatcagagaaaagattatggtttcacccagagtgcactggcagtggctctgatggacaagtaggcccaagtccacgggcatttcatgttgctgttgctattgattgtcatatgtttatttttggtggtcgtcttggtagcaacaggtatgttaatatcctctatattttctgctcaaaactttttatccctttttttcccctctccctctctttgctttcattgaaccggtgttaataacaagattgcatattcactatttaggttcggtgacttttgggtcttggatactggtaagaatatatttaacttaacatgcaaaagaaaaaaaaaagagcctctcctttacaatttgacttaattcttttaagcatcaaggatcaattgaatttgatcttttttttcttccagatatttggcaatggtcagagttgactagttttggagacttaccatcaccaagggactttgcagcagcttctgctattgcaaataggaaaattgtcatgtgggtattcatgtattacatggttttacttataagttgttgtaaggattctctagtatttacttgtataatttgttttaaatgtcaggtatggtggctgggatgggaagaagtggctgtcagatgtatatgtcttggacacaagtaattattttctctgtcgcttttgatacatgaaggagtatgcatatgatcatggatctgaaattagtttctgttatgctcttctttattttacagtgtcacttgaatggacggagcttcctgtgactggaacattaccgccgcctagatgtggccatacagctaccatggttgagaaacggttactggtttatggtggaagaggtgaagtagcataatatttactttttggactttcattcatttaactaatataatacagattaagatggattcctttaggtttatacctcacatggctaatgttactgtggtagggggtggaggtccaataatgggtgatttatgggctttgaagggtcttattgaagaaggttaatagtcaaactccttaattattgtatttcattagttgttaatacatgcaaaattttctttatgattttgtgaatgtaagaattcttttggtagatgcatatctcgttttcttttgctaatgttttgctctggctgttatatgcatcatgcacatatatcatgcaaatactcttgtcacagagagcaatatgtatcgtctatgtggtattatgtgtacattgcacaaatttggatatgaatagctgtgttagcttcatttagaaattgaagaagtacatttttttttttgtttgactctatactttgaaggaattacttgtgagcaagagtaggaccaagggagtgctgacctctggaagttcaggttctaaggttgtctgtttgttcttatacaagttattaaggaatttgtttaaattgtgataaatatggtcacggggaagtatattagatgaaaaccagacaatttgagccttagattttataaattggattctaatagtagaaaaaaaacatttggaaaataatttagtaggattatcttgttggttagccttttttttccgccctatcttttctgtcttgtcttgttttatttttgttgtttacacgttcattttataatgacattcttttttcccttgtaacaattacattgacaaccctgatttatattaaaatagtaaaattacaagcaacagctgggcaaagcttattaataatacatctcttagtgctgagaaaaaccttaaaaatcaatcaaaatttcaccacctagctaaaattcattattaggctatgtttggtaggaagggagggagagtaggatggatggagagcttaaagaggattaggagtaggagggatggagaagatagatctcctttgtgttagaatgatggagagaaaattaattagtaaaattacaaaattatccttttgaatataaatatttattaccttttaaaggataattgttatattaacaaatttgattttgtctaagggagaatgtctccctccatctcttctctccttccttctcttcctcttgccaaacaagagattgtgtctctccttccattactctccctccacttctctccatccgcccatccgcccatctctccctcctaccaaacatagtgtaaataaaagttttttggtcaaaagcaaaattttagacatatttagcctacagtgtgtgtttaatagaatttatttggtgtttaacatcaatatttttagctcacggagtattactttagatttcattaatcaggtgaggtcaccatgtcagcataatttccctattgtatatgatccaacttgctcttttaagaattaaattgaaaaacgaattgtttctttttgatacctacatgtgtctattagtcaactaagtcatttctttgaactttgttgtggaaggaagatagtgaaacacctgcatggacacaactaaagcttccaggacaagcaccttctgcacgttgtggccatacaattacatctggaggacatattgtaattgacatttcagaactcttactattttttttttctctgcttattacaatttaattttgcttatgttaattacatcgaaaaggtaaaaattgtgttatggttaggttgcaatgattaattaaaagtttttaacagtagttttggtaagatctatagttctttttctgacatagatatatctgccttttaagcattcttcatacaaccgtgtaggccaggataatgtacactgtttatgcctcttttctgcaagtaactcgggcaataagcatcaactattttgttgaccatataaaataatcatcatagactggactgaatttgaattttgttatgcttaatttgccctaatgaatctctgattttatttagcctgcctaaggctgaaatgtttcaacttatttcttaacggaagaggaaatgtttgtaataactaaccttttatgtactttggatggtggtatagtaatttcttagatccaatcttaaaactaaaagggaagaaaataaaatcgtataattagtggggtgggagggcattaggtttatattactagaaaatgatgaaccatgctatataattccccacactttatggaggataggaggaaagtcatactaaagcctaatacctattacctatatcaaacctggtaaacaaatctttctataaaacttatctagctttgtttagtcatgtcatgtcactctaccaagtggttggaaactattattgaagatcgtgctaatctttttatcatctattctttttaaaatgtcacccgcaagtgtgtacgcttgttaatctactgtaacagaacttgactataatcattccttgcagctgctattatttggaggccatgggactggtggttggttaagtcgttatgacatttattacaatgactgtattgtcctagacaggggtgagtaaaatccatatggtagaattctggaaggttttgtgccttatatgccgttacaaattttaatagctatctttgaatacataaagttctcagcttcctatatatgcatacatttttcatttatgtatacacacttatttatgtgtataatctgaatgcagaaagtgatttaaattgtgcaataatagcgagtatgaaacgcaattatgcagcatatgaattctctttgcatcatttgttctgctgtccttagaaagtggcacacgactacaggccacagttaaatgaacaaaaacttaaaacagtaatagaaaggatagaaacctattgtattgaaaatgttaatgcagcagaagtgttcatcacttttcttattggaaactagacattggtgtgtgcagaagatagttttaatgttctttgcttgttaatactcattgagttaatttctctctttctctttagaatacaactcgttctgactattaacacaatacttttaattaattttgactttccatcttctatcttctcttatctttccctatgtttccagtatctgcacagtggaagcgcctatcaattgcgaatgaacctccagctgctcgagcataccattccctaacttctataggttcacgttatctgttatatggtggctttgatgggaaaacaacgtttggtgatctatggtggttggtacctgaaggtaaaaaatgctttcctaatgtctaatcttgaatttgtgtagacttcaaatgagatatttgacccttgggagtttttacacatgatatgaggtgtgccaagtttttattacgcctttaggctgaaaccttggaaagaaattcttcattcacttgattcttagaatctcaatggcttatttttttctagctattgctattgttgttgaagattcctaactatatcttgtcaatattagaaataaagttatgggaatcataatttaaaaagcatatttttctaatggatttaaaaagtatttagtttactgggagaaaattctacatcagcttgattcattaaatgctttaatacttatatttttcagctgattatatgatggtaatggtgatgatgatttccttattatcagtggaaatgaaaaggtgtttttaatgaataggtctatctttcagaagcatatattagataagataaaacttggaggaaatattcaccaatggtatgaaatagccaagcgtggtacttgtttggagggagggattgttcagttttagtgttgtttggttgccaatggtagatgatttggaatttagactcaacttcaaatagtttctctttgtcagttattttattttatttttatataggggaccctattgctaagagatggacgtcaataccaaacaatgttcctcaagatcaacctgttgcaactggagagaattatgacatggcatctagaatgaaggttgctgcttttgatacataattttcttattgactattaattaataattgtactgctcaataaataaataaatattactgctgcttcatatttaactcatagttgcttccatttcaccggatatcttgttttcctatgagttagaatgaatttaagcattttttcatgattttttaaaaaaagaaatggaagtaacgatcatcttttttgcatgattgaaatctgattttgcagatttctatgattaaataatgaccaatcctaagctgaattgtttattataataatttgttggtctgacatagtttaacccatattctcattaatacaactacttattcacaaacctcctgtggctagcagtttcatttcccatcacatggaagatcttttttgctccgcttgctcctatctctctcttttggcattgcaccatattggcagatttgatgtattattctaactttgtaactgattttacttcaaatttgccgatttcctatataagattttgaagttttaagtaccacataaagataaagatgaagttaagttgggttttacattacttccaatatacttggacctcaacaattgcatttattttatgtacactgtttgtgctgttattatccaaaaggtctacactaaatatactgttggtgttgattttctgagatgaccctcttttcatttaacaggaaggccagcaagggcaatctgccatctcagagttacaacgagcattagggatatcagcttcactgtcttgtgatagggatccaattgtagatgaactagaagataaagaatttactgaactagcatctagtttggttggagaaactgtttccagcaatgtaaaacttttgcatattcaggtttgttttggtatacatttatcatgcatctaaccatctaaaattaacttcaacttacacccttctttgtgtgaatattatggcaactcaggctctacgtgagcactggagaaaagctacaccaagttcaatacgacttaaagagctagggcccttgcttcgtgactaccaacgattgattactcgccaccatttgtaagaacaacatctctcagttctatttcttcttgatcgtatatgatttttgttgttgcaatgtttaaggagggaaagccaactaagttctgggaaccttctgctctttttctttcaatctttattattaatttctacttataattttattgattaattttctttttgacaaatcacattctcagcccaaatggtggatctcaaatgcagtcctctgtgattactcttcctgaaaaagaggcttattgcttctatcatatcagaaatgttcagcaggtacaaatttcttggcctatgtatgtaaattattttcgctgctttatctaattacatcccaacttgaacatgtttctacatgtacatatgcaaacatatactcagaactttccgttacaataatttgtgtagtcactcataaaatttttcatctctgcttaaatatgtgtccaaattctgtacttgaaatggacaagttgcttaaatatgtgtctgaccatatacaagttgctacaagttcatcggtacttaattctagtttctcacttttttttgtactggagaaatatatgtgtggttatgtagccttaataataacatatcaccctgtactatgtttcgaattccccttccctagtcaaaaaaaaaaaaaaaaagaatgccccttctgtacttgttgagatcaacttttttctacgaagtttaccgtttgagcattttttttaaaagctttcctttttaccatttgctgtgttattactgaatggaaaataaactatcaatataatattcttaactacatacttgcatactgatatttttcttttgtccccatgccatgcactcgttcatttttatttttctattttgctctttacacattcttactgatcaaattatggtggtttccagttacgaatggatgacatcaaaaagcttctggcagagtataaacagctgcaaccagatttgagggtagaagtatgagtgtcttgaaagtttactctcatgcttgacatttctatagatcttgtacatgtaatatttgttctttctacatactggccttgttatggcttctacaaatcttttacaaactaaattataaataataaagatatcaatatatcaaatcttttgatccatatagatgctccattttttttttaaaaaaaaaaaggtccttatagatgttaggctgagcctgtgagtgagccaaacgaaaattgtatgctaaaatttcaagacaaaaatttaagcagggaatgtttgctctgcatgcatatgtccaatttatttttctgaaacaacatataattaaagaatcataatcaacacacatctgaaatgaataaaatgaacatgtgatctcattttagagatgatacgtgcttgctcagctcctctagctgcaccatcctcagtctctcactctcagccaacagctggtgaagaaaatttaatcaaaacaaaaccattagctaatttcatatacaaagaaaggagtcttcagaaatttgttgataatggagtctagaaaatagacaatatatacaaactactcacacacatatatattatttagaaagagagagagctttacctcctttaatgtgctgacaagctgagccttttctttacttttctcattgaacatatctaatacttctttatattctttctcctgtactcacaaacaaaatagcattttttttcattaaaaaaacaaaagaaacttctctaaatttgaatcaaagcaagcattattataattatcaaagatttagtgagtttaattcactcacctttttctggcagcttagtccaagaggctttagctctcgattcgccatgtcgattttcttcctcacattagcaacttccttccttaatggatctgtcatttcttctagttgctgcataattaacattccaatttccactacttcaaaaacactacattcaaatttaatctctagacttgaccaaagttgctactacaaaagcataattgacttcatcactatgtggaactaacttgacttaaaaaagaaaaagtcagcaaagaacaaagctagaaaatattatgtagtgaacttacttcccaaatcctagctaagcgtttagtttcttcttcagcacggcctaactgaagctcaaccttttccttcacttccatcttcctcctctcaatctcttcctctctagcttgaaaagttgaaatggccaatcttgatatctcttgatcatcatccttgatctcctccactgattgtctcccattgctactcatgtttccagcactactgctactactactaccaccaaagttgttcattttctgcattttttggggggtttcttatataactctcaatagcaatttaattaatatcagttcttaacttaacatctgtttcccattttgtgtgttgcttttgcttcactatttagcatactttgtaaagcaaaagaaagatatatcataaggcaattaacaagttatatagttcaaggcctcttaagtgttgttgtctttatctcttgaacttcttaccttttcagaaaatccactactaaagtactttatagaactaaccatctgattacttttctcagttattctttctttttcatatgttgaagggtggttgaaatgtcaagtagttctggttaagggaatttttatttatttatttatacatatatataggtaggtggagtataatttaatgactgttcaagatatgcttgaagcaagaggaagtcatgtacatgttgtagcttgacacttggtccttttatattttctttgattcttatgcttgatagaaatttaaataaataaaaatgaagtgtatttcaagcaataatatctatggtgggtatagttgcacactaggtatatatataattccagtactagcttttgttgttcagttcacacatgtctatatagcttgataattactctagcttactttcttttaccaattagtggggtagatgtagtaaattttccactgcaaggtcgattccactaatgtcatactgctccttgtcaaattccacttatgttatattgctccatgtcaattttttcataatatatggcctaatattttactcaatccaattcaaagataaatcaaattttagaaatctccatcccataaaacccaattatcatataattgctcagtttcacatttttattaaaaaaatccaagatgtttgtttcatgtatatgacattattttcacatacatacatttaactaattagtcttcctcaatagaatagaaacattcccataaaagtccaacaaaattagttttcccatctacttttgcttctttcctaaatcccatgctcaatgtaaactcctccagttttctttacaacctagttgaggttaatctagtgagtaattgagttagtcaatagactagtgagatgtacaataatcttatgacactaaaaaggcacttaaaagaggatattgcttttaattaacattaaatgtgagtaagagaatgaagccattactcaatatgtcaccagcttaaacttttcatacagcacaaacagaaactttggcataaacaagttttacacctttcttaggagaagaaacaaaagcgaaccaagttcaactattcattccaagagaccattatcttaaactactgaattttacaccttcctcatgaggagaaatagcctctgatcaagttcatacttcttgaaataagatggatcacccttcatcatcatcaacagcccgccaaatgaagcatctatctctgccttaccatgatgtcctttaccttcagaaatcttgaacagcttcccttgcatgacatattcatagttatcggcaagtgtcttgcgattgcttggagtgaagtaggcactgtcaggtgttccatcctcattcagtgtggggctcaacgccattgaaaatttctcaccttccttcagtgggtacacttctgtgttcacatctaggtgcatgaacatatcaaacttctcactctttgcctctattctagtgactttgtcaaacttcttcccatcggggttcagtcgatcaatcttgaaaacatcttcaaaaagaaactctgccatccttgagagtattttctgatcgagatttttagggtaagatggtactttgggtgtggatagaccagactccctcagtaatcagttgtttctgtgaaccacactagacactcactttatctgatgcatacaggaaatttaacattgacacttcagattacttgttttcacactttctcaacaactaaacagatatcatagtcaaaatacagttactttcattgaataacaagtcaaaataatcaatgagagagatataaattagattcccctgcttaattggtattttttttacaggtttcctgctttttaaaacaaaaacacaatattgaagctgaacattcccaaccaactgaaatagaaattgacgaaacaacacaaaccaatgtccatatgcaacaaataaacaatttacagttggttcttagataattacacactacccaataacccatgaaaggaatacgcccaattacaaataccaacaagaacaacaaacacagaaaacaaacccaaaaccataaacacttgaatagcatttcttattgataaccaagcaatattaattaagactaaagaaagataacagaaaacccttttagaagaaattgtgggcaatattttcaagttttggttcacataaggcaatgcaaaaccaatcagcccaaaatttgatttgacaaataaacacaaatgtatcactgattggattaacgtcatttacttcatttttcaacttcaatttctcagtagccaaacactttagctacgactacgagggagttgtactaacaaataatcaataaacataattattacaaaggtccagaaagctcaaaacatattactcaatccccaagccaactatatcgaatattattatcatcgataccatgtatcacattctccacttttttcaagcaaaagtgaaattatcacaccaagtatcgaggaaggaaatttgttgaatgataagttataatctgtctcccaaaatcatgccctaattccaaaacaaaataaaaacacaactatcattacttgcatgtttcgctgagttgatcatactaacaaactacatggaagaaacctaattaaaatcaaagaaaaaagagcaattttctcactgcccggaaaaagaaaaaagaaaaaaaaaagtaactccatttcacccaaaatttaaaagaaagtagatgtatgataaattcaacaacatgaagaaaagaaagatgaattcagaaacaaactaagagagagagagagattttaccaggaaaaaaggtggaatgcgttcactgagatttctcctatggacgactggtacgctggcttagactaaatggatgggcatagccagcgtccgcccgtttgggcaaaaaaaaaattgaaggggtaagttgaaaaatgcctcttttattaatcaattaatcaaatttgcctctaatttatatttatttgaaatatacctctttttat

SEQ ID NO: 29075 - DNA, 1859 bp, Cannabis sativa
agttggtgagagtctgaacttataattacttaaccataatacaatcacaatctcttttcatatatgagtatattccaaggtatcccatataatctatctaacgccctatcacaaattaatccattatttatagaaataaaaaagaagaatattttaataaaacagtttcatccaaaagttctacatacacgcgataataatttagtgtcatattaagttttcactccctagcgtaatattgattataataatatataataaattttgttaattgtttttttttaaatatttatattgaaaaattatggttagtaactaacattcattttttttgttgaagaatgaacttatcattcaaataagaattggagagtacaaaaatgatggaaaaaatccatcaaatcaagttcttaaccactctgaatgtatacacaatttcatgagatgccataaaataaggatatttcaagaaaattggtacgtataaacttgtgaaattatataaagattacatcggtgtaaatatagagaaagcaaagcgcaatgccaaattacaactaatcttaaagtgtaaatatagaccaaacaataagcagctacttcaaactctcatctataaatttgcttgaatgattgtaagagcccctacaaaaatattatagcaaaaataagagtccaataaattaaaatataaccataaattaataaatctaaattgatttgatatagacgaatagtgaacttatctcactaacaagatttatgaatcttcattagaatttttgggatatatgcaataaatctttaacattatcccaacatcaatttttttttcataattaacaaaatttaacttaaacaaaacaaaaccgaataataacaacgtatataattacttttaatcacacaaatatataataatatatgaataattataattcatttaataaaaatattatatatcaaattaatatattattaatctgaagatacaataaaatgttataatacaacataagtaatagtaaacaaaattattgaagataataaaaataattaatacaattaatatgattctataaaatggtaaaaaaatatgagttttgaaagtagtttatatggctttagatattaaattaaaaaaaaaaaagaaaataaataataataaagaaaaagaatttaatataaaatataggataataatttaaataatttaaataataatatacaataaagtatcaaagtaaattgaataacaataaataatacaaatctatatattttactatatatctaggaaaagtataaggcggttaatctctctgaaattatttttcttttttttccttaattttctcaatttttttaatactttattaaagtataaatttacaaattaatattttactattattttaataaatcttctataaaaatatctatcttaaattaattattttttaaaaaacacataataataaatataattataaattaattaattattcgattatttatatagatatgtatttatagctatatatatgtgtgatgttttttttacaggtgtgagattaagtagaagaagaaacaggtatgagattatgaataatttttttttcataatgtattatttttatattccaatcatataaatttgatgtcaacattgtagttcctatttatatcctcaaatttctaaacttaacactcaatttgctgttctgttagttgatcaataaagtgccacatgttaatatagtattggccaaactaataatttttttttttaaaaaaaataatttgaaaaaaacaaaaataactaaaataacttcataatattcaaaaaaaaaatatta

SEQ ID NO: 29076 - DNA, 4969 bp, Cannabis sativa
  modified_base (3022)..(3031): a, c, t, g, unknown or other
tccttgtaattttgttgcatagagttgtaattttcttggtctctttattcatcttattgttattcttctattgatatctcatattttcctaacaataacattacagccaaataaagattacaaagtagtgtgtacgtacacttgtgattatattttttttggttaaaaaaaagcggatgctgtataaaaaaattgttaaaaaaaagtaggaaagataattgctttatatttgtcgtgtgtatgtatcattaataggctttatttatttggctttaagttaatggactttgttatttttttttttttgttattgaaaaaaaatatgtttttaaaaaatacatatataattttaaaaataaaaaaaaatattagaatgtttcataaaaattatattatgttcataagaatgtgttaccaggtgcaatttatgatatttggctaaattaaaatttaagtaagaaaataacattgctattgggcaccagtgatgctcagtacctgctataggtggcgccccacgattgattatcgatattccctaaaagctattctctaagttatatagaatttgatacttaattataccaatagcgctgcagcatgacaccgaggagggtgctagacaccaatgatgcctttagcaattctcataagaaaaagtatatgaattcgagttgtattgaagtagcattaaagagagcctcaaaaatagatttaatcttgtatagaaaagaaagttgtctagtatagataaattgttcttaaaaatgtgaaagagttgtaagtttttcttttgaaggggaatccctttgtggatgtaatggacttggtttgattaataaaaattatctttcttgataaaaaataataataaaataaattaatttaaaagataattatggtcaaattatgtatgtaaataaattagtggcgaaagtatctaagtaatcaattttgttataattaactattagtataaaaaaaattaatagaaaaattcgtaagtaaaattattattttttaaaataaatacctatataaaaataattcaagttaacttaaaaaaataataataattcaaattaaaaattaaattttttttaattattaatattattttatttttttaaataaatatataattaaatattattataatatgtataaagttttaattgtatataagcagtcatatcgtaagagtatataccttatatcttaataaccacatgatttaaaatcaatggtcaaaaaagcttccctaccagtaggaaacttatgttaagtcctaccatagtcttgccttatatatataaaggagagatatgaggcggtgaaatgtcactctcaaattactctaaatacttctatttaatctctttttaattttctcaattttttattttttatttaatttaatttaaaaaatatttatatataaatacaattgaaaaggtaggtgaatagtttgttcaaaaaaaaaaaaacgtacgtgactagtcatagtaatgggatatttggttcctgaaaacatctcagtcacattgtaaaataatttcaatttgtcacacatcaattttgctaaaatccaatctcgatcactaggtgcttgtttatagttttctcagtttatactaggtgattgatgacatccttatacacagtgacactcataagcatcaaataagtagaattccacctagttttacaatcgagaactaactttctattatttgaaaactttaatccatcgttagcctcctcaaatttttttcactcttaggtgttgcggtccaataaactacactctcatgaatagtttctatcccatcttgaattgcacctaaaccttgttgaacaatcaaattcaagatatgtgcacaacattttatatgaagtaattccccttgtaacagtaaattatcatttctcaatttttctttcatcttatccatcatcgaaatattaacactacagttatctaaagtcaaagtaaataactttataatcaatggaccatgcaaccaaatactccatcaactcttttgttagtattttcacattatgtggggcagacacatatataaacctataattatgataaaaataactaattagtaatagttgttgttgaaggaatttcacaacaccaaaataaataataacaataattattataataataatatgatgaataagtgcgagtattcaacctagaatagcgagtactcgaactgggaacacaaatacttaatgaaaactggaaatacaaagaacacgagggaatataatggttcagtcagatcacggtctgcttagtccactattgcaaagattctgtaggtgtcccatttcacggtggatcactcctttatatacaaagtaagtgttcgattatttacacaacgattgcattcgttgtcaatccgtttgtacattgatttacaataattaagctgaaaaacgtaaacatttaataaagaaagaatattttctattcactaaatacaacaacatatgcgacttctaatgtgtgagttagctgttcatattcttgcataagcttgtggacttagaatacacctaacacttagttgagtttaagatgtctgcgtccttgtatagtcgcatttacggacattgtataacgaactgatagaaccaagacatgggagtctatattggtttatcgaggttgttgggtcatcgggaccagctcgctttatagaggatcgatctctatgttttcgcaggaggattgagaggatactcgcatatattgtggtatatgcgagttaaatccgttccttggtcctacataattcaagccttgcgaatgcgattagacttggtcatattcgcatcatctcgctgagtttagctcaagcgaggtttaaactcgacaagtctctcattgacatctcaacttttcttggggaaattgagtacacgtgtccttcaaataggagtctggtcttgagtttctaggtgagaaatatctcactataacacatgcccctannnnnnnnnnttgacaggtgcggtcatgagggaaactatacgcgagagacaggtaaaaggttatcacgaggtggtgacctttggttgtcccatcgagggtttcgaaaaatgacggctgtaattatttcattttatcctatttatggtgccacgtcatgaaattcttcagttttcatgtaggcgtgcccatggctggccgttggatgggatgaccttaggcattcctgttgccacgtgtcacaatcccaatttatgaggggtattggtatttaagtcctcagatacgaaacaattttcttactttccctctcattttcattttctccattcacccgaagcttttcaaaggcaaaaaaccccctttttcaaacaaatttctgttctgccccttttgaattgtcacagcttctcgaaacgatcgagactatttacagaggagcattgaatcccaaggttagtctttcgaatcttcttttgaattttttgtttctggagttgagaaaaagccttacacttttgaatgtttttggaaaaaaggttgaaaatgcatgcttagttgtaggaaatacacatagagttttaccccttgttagaactaggtaatccgtaggagaaaacagacctgtaattggcataactgccgattcaggaagaatattttgaatattcgcacctttttgattgcttatctctggaatactcgcaggtatttggatgagcatcttgaatactcgcatatctggttcctttaagaattctgaggattttatcgcttttaccctttgtttagaacttaaggttttctctatattctctgtatattttgttgtggggataatggttaagtttttcaaatggtgggtgtgtcgccgtattccaatgctcatgcgtgcgatcgcattttccttaaggtactgcgatacacccagccatttgcgacatacgcgagcgttccctgttcccatagaaccgtatattttgactagtaggtttgctcgaaacagtgaggtgtttccgttagcccaaggtttatgcgagaaaggcatgccccttgagatatatgagattcctcaactgtttcttgagatataccgctagtcggatatgcgtgatatactcacaggttgtgattggttagatttctcgaaacggtgggtgtttcccagtatataacttcagggtcatgctcgtaaatgcatgccccttgggtcactgggtaactcccaaccattttttgagatattcttttcgtcgcacacttgcgattttatgccttggtgggctgattaggttttcgcgagaatccgaattagccttccagagaaattttttgaatttcttatgcgggtgaggtcacttgtattgttttcgcacattcaccatactgaaaagatcttttatcttttagatgagcaacttgtcggtaagccagatgtttggctctggaggcaatgcttttcgatggcgaccaagacgaggaggatagcttcatcccgacctcgatctcagaagtggagactccagttgccgaagatgcggagctaggcccgttgtcctccgtagatatagaaaggatggtttaggagctcgctgaaccaaggaccatcgagattcgtgatagcgagtctacggtgtcagctcgtgaacaccttgttcattctaggcatgctcctgatgccgaagtcgaggagatgggcgaggactgggaggctccagaccgcgagtcagaggatgaggaggacgcaaaagggagcgggactgactcagtggacaacactcaactggacaagcccttctcatgtgaggatttggttttgcaagtcaccaagtccgacctaaccgcgtatacaaggttaaatctgctacgcctcagtaccatgcgtcctcgtcctacccagagaccgcatctacctttcaccaatcctgcgataatacctatagagaatgt

SEQ ID NO: 29077 - DNA, 2195 bp, Cannabis sativa
ttgaaattatgtcttagttttgtgagtccgtgaggataatttgggtacaatactcataaaaagaggtatatttaaattaaattttatttagagataaatttagttaatatataaaaaatatatatatatatttttcaacttctcaaaaaaaaaattactttaattttgaaatagtttccacctgtacacatataaattaattattagagttatttgtgtaatattttctaatattaagtatacaattaaaaattgccttaattttatttatttttcaaacaatgaatatatttgtcctataattttttttttactaatattagtttaccctctcacttttgatatgatatattattttgggtagtattactttaccgcaagctttaaccacttgaggctagctcaagtggccataggagggtgtgtgtgttggaggtcctgggttcgagtcccagattatgcaatgtaatatataaacgcttaaatcaaaaaaaaaaattaaccttattcaaataaaacctcaaattaatatattttttataaaaaataatctaattatactcttaactattctgtatgcctataaccaaatatatatatatatatggatattttttaatgggttttattcatgaatggttactaaacaagtttaactataaatattaattttaaaaatattaaatcatcaaattttgatctaataacgaataataaaagataaatttgaatttctatgcttagtttaactacttaattagaaaaaatattactttttatactatatcaaaaatatgttcatataaaaatatttaagtgaaactcaacttttacttatttatttttttttttttgctaaattttttttttcaaccgatggaacaatcttagctcatatgatgtaaaagtgagagatttttctatttagatagaaaaattaagcataaaaactcaatttttttctaattttacccattcaatacccatgaatgggtaaaattagaaaattttgagtttttatgcttaaattttctatctgattaaaaaattttttcatttttatatcatataggctgagattattccatctgtaaaaaaaaaattaacaagaaaaataagaaaagaaaaagttgagcttgagttaaatatttttatatgaacatatttttgatatagtgtaaaaagagatattttttgatatttttttaattgagtagttaaattaagcatataaattcaaatttgtgatttcattatagtttattagatcaaaattcgatagtttgatatttttaaaattaatatttataattaaatttgtatagtaatcatttaataaccatgaagaagtgttccatatctaggtgattttttttttaagttttctattcaaaaataacagttttttattaatttttaaataaattaatattactctaatgaccatcatcttttctcacatggcacacttgagaagttggagttagaaataatagagcttcttaagtcaagaagaggaattcttgtttcgattgcttctctaccagcgatgtactatgagaaatatgggaaatatctacaatctgatggctacctcacagtgagccagaggcatggaaaagttgggtatagtttaacaaagcttctggctcgattgaagaacaatattcggcttattcacaggtaaaaatctttgtcttcggctttagtttttatagatgactattatatgagtactaaaatatttcactcttgtccatgattagcaggcctcatggacaacatgccttaattttggctgaagactctgctatgtacatagatcaccggaatgaaaagattgatgcaggtccaattgttaacgggtcaaggcagatatatctaatattttcagctgagagcactttcaccgaagaagatgtctcaatctacttgtctatgacaaatattatcctataactttgattttacttttttttttgtctacttcgtttgtactgttgatatgctaatactaaaattacagtcacattgatgaaattttccagttattgtatttcggagcaagacgaaaatgctggttgttatggtttggtttggccctacaggttctatatcttctaggggtgttcatccgatccaatccgacttttttggtcaaacaacatccactccgcactaagtgcggatttcat

SEQ ID NO: 29078 - DNA, 1686 bp, Cannabis sativa
cattgaagagaaaagaacaacacacagccattgacttgatatcagaacaacacaaactcttgtgacacaatgcctatagttaaaagtttttggtggttttgaatttctcaattgggttccaaaagcttaattctttgtaccttgttaggtgggtaaactttctccttgtaccaggcaggcctgtcttgtagatcaatgggaaccagttctatcttttccagcaattcctgtgtacccaaaaaagatagtaaccccaacagtacaataagaaaacattaacatttcgtttggtcactcagaaaggaacaaaacccatatcatagtatgaattgaagacaaccttacagttgcgcgtaatccagacgcgctgtgcatatgggcacacataagatatatacaaccttcatcaacacagaaaaattcaattcaacaaacacatcaatgagttatagtcacacacacacacacagaattatatcaaaacacaataactgaaatagtgtgtggtttttgtctaaccttgttttgccatcgaagattgttgggggatcagagctagaagtaagagcaggtgtacgaacctcttgcacactccttcacaatcccaaaaaaaaaaaaaacaaagcccacatattattatgcactttatttcatatgggttcaaaacttcaaatataaaagagagaactttcacatacccagtagccatggctgcagaagagacccaagttcttctacttgttttaccaccaaaataaagttggaattgaagcttgggagtgggaaatttgttgggttttggaagtttgatgaatactgaaaattggatgttgttgttagtagtggggatggatgatattatcagaggagatgagcctgatcctaaggctgggctagtagtagagctaaacgtggccatttgttaatagtaagtagttcaatattattggttagtggcaagaagaaagaatagtttttagtcgaaatgaaagagtatggattggaaaaatatttcgataattttttaaaaaaaatacaaaaatacaatttgtacagaattttcaatatttttttacgattttcagattttatttacataaaatatgatttttttttttttttatgttatattcttgttattttaaaaatacaacaaaccaaaaagagaaccactattaattccggcgactcgaccgtaatcaattaaaacatgggttatttcaaattcatgaaaaaaaaaattcagaaaaactactacaaaactaaaattcaaccagaaatctagtttaattcgcataaaattaatgtcctgacttcaattttcagatccatgaaaggcagatctcaaaaagttaaattggagtttctaaacaatccaactcatgtataattaaaaaaaatacatcaatactatagttaaatatttatctcgatgcatttttgttatttttcagatttccaatgttgaatttgttcatattaaatcacgattagaatagtaaattcacatgtagacagagttacgtacgtgcaaacactattctaattttttatgtttcataacagtttcattacagttgcaaaaatattttgctaactctctaaaacttgacacattaattattataaattgataacgatacaatagattttatcatatttacaagtgtttcatatcgtcaatac

SEQ ID NO: 29079 - DNA, 3739 bp, Cannabis sativa
  modified_base (2991)..(2991): a, c, t, g, unknown or other
  modified_base (3489)..(3494): a, c, t, g, unknown or other
tttgtgtgtgatggtttttttttttaagaaaaaaaaagtgtatgataattaattaattaattaattggaaaatgaaatgaaacttttttttttttaagtgtgggtttgtttttgtcttgggaagagtaaattttagcgtacaaacaagaagaaactggagcctaatctatctgagagagagagaaggaagagaaaagatctaaaaattaggttgaaatcgtaggcgcatcttggggcgcgtggagtggacgctcgatttttggtcaaaaaggaaagcccatgttttgtcaacgatgctgttcccataaaaactgaaaacccccactccactttgctccccaaaaataaaacttaatacagctctacactcataacacactgaccacacataacgcccccctggccccttaaatttagtgtggctatagagaccagattaagtttgtgagtttgtttctaaaaagactctaccgagtgtgacgacatcaattataagaaggtgggtgtttaaaagctgtttgttaaccaccccatttcgaagaaaatagaggtcaaatactatatgtttggttggagaatgcaatataggattagcagccataagaacaggttacaccacattgtttgtgatttgggaagctgacaccaatctctcaaatagtaaagcttgaatcgagttgaaggagttggtttcggttcgaaggttataaaatgtgaaggctacgatattcaacttctgtactgaacttagacattgttctttgcttcttagacgacctagagacaatgttgggccaagataaatacaaaaactagaatgtgctaaaagtagagtcctcgaaagttttgtaaaattttagcgaagtttgggtctttaaaaataaaaaattttaaaagattgagttagcatcattgcatagaaattcaatgccacaactctaaagtggaaaaaaaaatggtagttgtgacacatgagtatgacacatgtacataagatattgacttacggaagcatctaaatcttattttggagaaaataagaccaatgctcagagcagaactgtgatagacggaacactgagccataagccaaatgtcaattaacctaaacgcccagtgtgcttgcatgtttgcacctggtgatgcatgggcactaaatcactactcagatgatattttctcgcgactccacttatcatatcttatttttggagttaaacaagaataatgcttgagaaggaatcataatccgatcgatgaaaccaccaacggaggtggttatgtcaacttgggcacccagcttttcatctggtgcttagatggctttgtttgcttcccaaaagcacttgtatctacctcgtggacaaaaataagggaaattctcataagacttcttcggaaagatgtctcggagtgccccaagttgaaatacatcaacgtgggcacccaattgaggggcaacaactccaaaatttgtctcaattatgtttaaacttctttttgatgaaaattactccatgaatttcaatttctttagatttgcaaaagcgtcactcagtaaaataaaagcggtgcacaggtcaaaatgtcaacggggcgcctatagttggaaatgggctcttttcaggatgacattgatgaaatattaggtcgtggaattgttccttgatggatttaaggaatcagggtccaaagatgtccctaaaaacttaaaccctagccacggtgtgcccagattgactgaatgtcaacctaaatgcccattagggctttatagtgctcgggtgtcgtttctcgtagacttatctccaaagtttgaaacttggttgaggcatgtctctcatgtattttaggataatggctagcagattgcccataagaagatgataggaaccaacactgatgtgagaccgtgcgcacaatgttaacttgggcgccaacactaaagttggacccaggttgagccctgggatgtccacttgacatccttagcttcatgttcttcattttagggtcatggcaacttgtttgttgaaggatagcacttagaaatgacttcgctagatcttgatgcttacttgggtccccccagtgtgtaggtaacactgctctatcttgggatgcaggccctaatgttgtttccttcgtgtcacgtgtcaaaaacaatgtccacgccattcaagccaactttttgggtaaacagtcactttcatagatgattactctagatgctcgagtatttcgtcactttattatatcagtttgaatatttcttaatcaacacatgattatgatcatagtgggagcacataattatttgttattttaatactcacaaatcttcactttaaatacaccttattttaataatttttattttacataaaaaaatatctctaattatattaactttttcttcaattcatattcttaaaaaatatacctatcaaacaaaactaaattatatttcaaatattattaaaacaaaaaaaatgtgaaattttattaaaaaaataaaaaagatatacttgatttttttaaaaaaaaattataaaaataaaattaaaacgagtattcaaattaacacaagataatatgagaaaaaaatatattaagagtgatttttaaaaattattttaagcttagttcttttgaaaaaaaatattagaatgtatttatcatttgatttgatggtgtgcaaataaaatttttctcactttaaatactaatttttatgatggtttcacaattttatccttgacataaacactgtataatagttatttttttttttttacttttttattgggatttttattttttttactttactttatttaatgaaacatatttttttattagtaaatatacaaaaattttagtgaataactaattgtttgctgcaaaaaaatgtcattatataactatcaattagttgtttttcaaatctctttaaaaaaaaaagtcatttttaatttagttttttttttntttttttaatttttacatttaaaaccattttttttgctacggaggaactcacggagcaacctaaatcataatccaaatccacattgcaacccacgcaacaaccaccaaagcaatctaaaccataaaaatgaaaaataaatggtatatggagtgatttctcttttaattatcatttaaaccttttattatttcttactttttggggatcattttatttattatatcagtttaaatatttcttaatattaagtaaaccacaaaatagtaagtacaacccaatgtataaaaaaattaagtttaaagtcatttttaaaaatcactcttaatagttttaatttttttctcctattattttgtgttaattttaattcttattttatttttcataatttttttaaatcaaatatatattattttctaataaaatttcacataattttttattttaatttttttaatatttaaaatataatttatttttgtttgataggtatattnnnnnngaatatgaattgaaagaaaaaaataaaaaaaataaagatacatattttatgtaaaataaaaattattaaaataaagtgtatttattataaatttttgaatgaaaataaaactgttgatttgtgaatattgaagtaagaaataattattttattataatttttgtaacttcttttttctattgattttgattccttaattttttttagtcaatgtacattcttatttttttatgtatattattaat

SEQ ID NO: 29080 - DNA, 1287 bp, Cannabis sativa
tttgagattgaaaagagaaaggaagatagagaaatggcaagcacaagcagggtgcatctaattactagtgtccaccacatttatgattctgtaacatttcatattgaacttacttacacatataatcttaaaggattgagatgatgatctttgaattttggctgaaaaagacaaagtgagaaagagaaagattaacagtttgtttactgtatggaagtaaatgcaggagagtttaggtagtgataatctggattctttatagtatacttttataattgattaaagcaactaactaatctgtcttcttgtttttctctataataattgtttgtccacgtgaccaagtcagacactctttatgtttataattggtttcaggctgtaatagagtaatagaataaggccaaatattaagcactaaaaatagtggaaaacaaattaaaagcaagaatataatgtttttttttttcatcctactaaaaaaaagtttatgtaatgatagatgtgtaaaaatgtaatttattagggcggatcgcggtgcgaatggtgggggttctaatatttttttaaaattaaattacatatacgatttttgtaatttttcaaactgcaaccgcattatgagatcttagaatcgcaaaaactacattgcaaaaatacagtgtggtgcagcacagtttgaataatttacactattatcattatcaaactttataatgaaaatttaaaaatcaatctaataaaatttaaacaataaaaaaattcttattaaaattttaataatataacatatatatatatatattaatcatcatttcattttattgaattgtctctaaaactaatgtactatacatatatatatatttgttcttatatgaaaaaaaaaatcatattataaaaattagtaattttgtaatatatatagtgtgatgtgatttgaacctcaattattaattcaaaactgtaaatcacaccgtactgcatggtttagcaaaaaatgcaaaccacaaccgcaccacaaaagatttcaaactgtattttttatgcagtattgtgcagtgcaagtaatttgtacggtgtggacggtttaatgaataccccatctttacttagttttgagaaaataagataagctacgagataaaccatctaattgaagaacaacatatacaattcaaaacccattaaatcaaaattattacttatgtattttctagaagaaaaaaaagaaaaggaagtagaagagacacataggaaaaggaagtcaataaggtggtgtttgat

SEQ ID NO: 29081 - DNA, 2137 bp, Cannabis sativa
tatgaacgtcatatacatttgataggaaacaaatgggttcataaagtcaaggttaatgttaatggtaatcttgatagattgaaattaagacttgtagctaaaaggcatcttcaaaaacttgaaattgatttcgaagacacttttagtcctagccctgtggttaaaccagtgacagttagattggagttaacattagatattttatttcaatgtggaatgagacaacttgatgttgcaaatgtatttctcgatgggactcttcaagagacaatttatatgattaacctcaaggctttgaggatccacataaacctactcatgtttgtaaacatcacaaggctttatatggccttaaatagatccctagagtatggaatggcaagctcaaatctactcattttaactggggttttattgcatcaaagacagatactttcttgtttgtttatggaactggctctagtttggttattctcttggtctatgtggatgacattcttgtcacatgcgttaaggctcaattgattcagaggttaatcactgatctaaatactacattttcgctcaaaagatttgggccaagtgcattattttttaggtgtttagattcataaaagctctgaaggtctttacttttctcagaaaaagtatattacatatctgttaactaaagttcttcttgagggtgccagtctaacttccatatctcacaagctttcacttactgaaggatctccatttgaagatgtcactctttatcaaagcacctgaggatcacttcaatatttgactcttactagacctgatgtagcttacataatcaacaagttatctcagttcattcatgctccaacacatgtccagtaggaagcttgtaaaaggctccttaaatatttgaaagctactatttttgatggtattcttctcaaacatgttctcagaatgtctcttgaagcatactcagatgcagattaggcaagctgcattgttgatcgaaggtctattggaggctatgttgtttttcttggatccaatcttatttcttggtctgcaaagacacaacaggtcgttgctaggtcttctattgagtttgagtttcgagcattagctaatatagttgctgaaatcaagtggctttgatctttgcttactgaattacaagtcaagttagcagatgtccctatcatttggatttataatcaaggtgaagtttctttacactacaagaaaatagggtcattacctacaaaccataaatgtgggtaaaactcccaaaatgtaggccattacctacaaacaatcatagcagctaatcccatcttccatgcttgatgcaaacatatagaaattgaccaacattttgttcgtgatcaactgctagataaggaaattgactaatattttagttagttcggttagtcatgatcattcattaactaattctgttttataacagaattcttgttttgcatttgtacactttctaaagctataaataaagagttggcctctagttaaggtaagttttgccaagcgtttcttgtgttctctttctatctcccctatttcatcttcttcactgtcttatataaagttgtaaaaatctaaaaaatttattgcaagggaaaaaggcacaaaatttgtattttttttccctattttacaacgtaacgtcaaaaaagaaaaccgacgctataaaatgcaaaagttttgatttgtagccttcactattgtaatgttaagttcaatgcaatgatataactcaaacaccaataacatccccttaataggttttagctataataatagcccaaaatttaatggcagtcaacacatgtaaaaatataaaaaaatcatttattttagtaatttttatacatataattagaagaccacagtaacctttggcccctagttccctcaataataataataaggttatcagaatgttgattatgtgtggtgtttcacacactatttacaacaaagtgtgttcaaaaaatataataatttcaaattgtaagcaaagtttaatgtaataataatgtatcaccaccatcacacatagtagcctcttagagatcaagttagaaattagcgaggttttactgagatcatttttttttaaaaaaataaa

SEQ ID NO: 29082 - DNA, 1596 bp, Cannabis sativa
tttatatatatacaaagaaaaaaaaaaaaaataaagagagagagagagagagagagagggaaaataagagatctaagagtgagaatgaggttgaaatgaattgaatcaaagggttttatattataagaggggaatagccgtcgatttttagtcgtaggctaaagtatagatgatgattctgaactttcgacaataatgcaaacctcgtttcatttttaattcaatatcaattgaaaattgacgctgattcataacaaacctttaaaatcgacgggtattcttaactataggcgtcgattttaaagactcactagagagatttaggggagttttgtagagtttgatttcatctatgagtaatatccctgatgattttggctttgatttttcagtcctttggttttggagagaaataataagaaatagattaccataacaaaatcatatacatcaacatgtagcataacaaattgaaataaaaaatataataatgggagactacaccattataaagattgaacgagttatatttttgtcgagtttttcaatttgtattttttgtcgggttattcggtttggtttgggcaaattgtttggattgggaagtttataaaaatatatgtacatccctagtttgcatatgcaataaattagtaacatgagatagcaatgatcatggtattcgtcaagaattatcgacatacattctatttttggccaaaataatataacgcagtccagtcaaatttactcacataaagtgaaatgagacctgtagggtgtgcaaataaatatttctaatgagaaatttgcatatagtatttgtacacaaaatgaattgttctaaaaattttgcatagacatgagattgattaaaataaggcctaaatattgagaaaatataatcataatttgattatggcctgaaatatattttatgaggatttataagcatcacaaaaatattgcaggaaaaatttatttatttgaagctcctaatttattgaaaatttgaaataagtcttatctaaaaattctagaagaagttaatacgtgtcttaagtgatataattcaaagttgagcgcactataagataaagatctttgtataaaataaagacatgtaagtaaattattattttaaaaacatgtatgattgtctatgcaatataaatttgtaaattatatgttgtaatagactcttaaagagtttttgattatattatattgaagaaaacttttatttctgtttttatattgagaaatattaaatttatatagtttgtttataagaagagaagtcctgaagtacttcacatgcattaaaaattataaatatatgatcatttgatatgaaatttaagatcatacaacaagaatagaacaaatatatgggcttggagtactatcattatcgcaaaagaaaatttatattattattaatgtgttatgttcatattacttaaaatttcaaacttttgtatgaacaacattgcatatacacatgcatgaatattccataagttagataaatattgatgttccaggaacccctcatctataatgtagaagtctacacatactctaaaagagtta

SEQ ID NO: 29083 - DNA, 2330 bp, Cannabis sativa
  modified_base (1663)..(1667): a, c, t, g, unknown or other
  modified_base (2289)..(2299): a, c, t, g, unknown or other
cccatatcagacccaattttatcagctaagactttgcttttgctgagaaatgggagaccatgaacctgaacccaaaggggaatgtgaataaagttagattcaataggaattttaaaattagaaatagcagcaaaaataatgggctgattattgaaatgccaaggttgatgataaagagtcctctgcatatcaccagcacagccaaattgaaccagaaaatagccccttcgatctgttatggtgacttcaaaacgtttggaccagagatcagacatttgaagaatgaacacctgggttgatttttttgtgggttagaacataggcaaaaacactccattcagagatggtaggaatggcagagttgcttgattctccaatttcatgaacaactttttctttctcagtgagttgaatttgggaagacatatctttgaggattcgctccataggtagaaagttagggtatgagtgatttgtcaagactaagaacctgtatatatggtgattttccatcgtggagatactgatggagaattggtaggggatggaaatcatggggtcggagtggaggttgaaggtgggatggcagtttaatggaggttacgcacgatcggagaagaaggagagactgttaattggataaacacgattaaggaagaagaaagaaaaaaccgccacagagcaaacagggagcggacgctctttttgtacttatgatatattgaatacacttgatataacatacttttactaaccaaaataattgtaactcaactaaaaattagaaaaagtttaaaattttgttctatcttcacttttttttgataattattagtgttaatttctaaatattcaaataattataaaaactttaacataagtataattgaataaacataaaataattaaataaatatacatataaaaaataataactgtatagatcctaataaaaataactgtcatcttatacaccgtaaagaaaaaaactacgtaaaatatctcgtgttcattaattattattattaaattctataatacatttattacgtaaaggtattaaatatttaattaacaaaaatttgcgttaataggtgtccattatgattttgagttatggtttctaaaatagactatgaaatttaatttgattcttttcgttataattcaatcaatttaattaattatagatttgttttatttatttttgttctaggttttatttatttattttagttattagttttagattttaaaggaaaataaaaattaaaaaggctgggattaacgtgtttcaacaaattttaaattttgttttagaataaaaagtaaaattaattttaggctatttttttattatcttttatatatatttatgttttttttgtattaaatgtgcatgagtaatgtttattttttttaaaaaaatattataattcattccactcatctaaaaaaatagtgttattataattttttatccaatcttcatatctaaaaaaaatattttaaatttctttcaaacaataaaataaaaaaatttgtcatattggttttttttttttttcttctaagaattctagtaatatctttgtttggtaaattagtaaaaaaaagataaataatttttacttcaggattttctaataataataataataannnnnataataataataataaatttaaataaattaaacataaattttatcctaattagaatttttataaactaaatttgataataatttagaaaataaatagtaaatgttggttaattagttgcaccttttgttaaaaaatcataaaaatctgcaactattacctcactctaacaaatcataaataactcgatccgatttgactctcaacttcctctacgactctaccatgttttgcacgcgcctacttgtttaatatcatcccctaacttctatcctatttttccttcaaaaaaacttctatcctatttactatttacttaataattgccaaaaaaaaatactgttagtgcctactattttttttttcagtgttatatggaggtgtatttaattatcatgtcaaaataaattttaagcaatattgctaaccaattgtgaagtgctacctattggacaccaataatattcaataataatactcataaataaaattagcaaaataaatattttagagagatatatatctattctgtaacagaattcttagtttaacgatacggtttctacgttaacttaacaaaatatcttattaattaacagaataatttttattaattttataatnnnnnnnnnnntatttaaaaataaaaattatgtaaatatttt

SEQ ID NO: 29084 - DNA, 2415 bp, Cannabis sativa
ttatgcgtcggtttagaaatgacgctaaattttttatcacattttaaaactgtcacaaaaaacttattatgtctgttcaaaaatgtcatatctattatgaaattaaaatactttttttttaacctattgcgtcacttataaaatgaagcacaaatataagtaagggaaaattgcaaatttttcatgcaattttccccacctgcataatacaacaccaagacaagaacactcataaatatagaacctaactatgaaagtatgaaaagaataaagactaagaagaaagtgagtgttagatgcttaactatttcctctcttagtgagtctgacatcattttacaagattataacccctaagtgcctatatcattgagtgaaattagaactttgaacgctcaaaattacaaaaaagtctctctttttttcaagcaacaatatttgtcataattgtaatgaccgcaatggtgaaaatcaaccatgtagattactacatgtgagagtgtgtcctttttataattttggacaacttctatgtgatgcagtcttgctgtctcagtctggtatgctatgccaactaattttaaacaaaaatgagtggaaaaatacaagcatatgacacaaaaaaaaaaaaaatgagatgcagtccaatcaagccacttgttctttgccccaaaattaaactactttgtcaattcgcatttccaattcagtgattggcattaaaacacacctcttctgtgcacactcttttttatggtttgactgtcattgccttacaagagtgtaaaattggtaaacatatgatcatcttgttatttattttagacatgccatacattcaactttaaagtagatataaattacgaatgccaacaaacccaaaatatatatatatacaaaaaaaacctactaagtgtgaagagactaaccaatcaataataaaaaaaataaaaaaaaaactataataatttattgtttgtgaacctcatgttaatattgaaagaaatttctttagtacctcttctactgccttatccttaagagcttcagttgcgctcttagtgactttatttcaccatgagcaatccccaactcccttccctttttctgcaaaatatagtatcactataaatgcctctccttttatttacaacgttctaggaacacatatacagatggaagctagtcctaataattaacttgttaaaacaatgaaatacatgtatatatagtattctcattgaaaaatactaatatagaaagataattatatacatatattgtaaaatagagcataactaagtattcaatttattaaaacagagttcttgaaaatagtttttcatcataaaaacatatacttaatatagatacaagattattaaatcttataaaaaattattcatgatattaaccacagaatgtaaacatcataatctttaaatatagatacaaggaaggagacagagagtcaaagtgagaacctatgagaagatttttcaaacgattgagttttgagacaacagggtccgagtgaagagactcctcagaactgtagtgttcttcatgacccaccatggttacggtcttgtagttttattggtaatgaaatgaaatgcttagaccaattaataaacaaaatttcttagaataaaatattaatttcaccaacagataaggattatggtatgatatacataatttcaccaattgagagaggttatggtatgatttacatgatattatatatatattgcttttattaatttgagttatatcatgaaaaaactattgaattctcaagaatcgatagaatcaaagattctcattaccttcgggggtggagcacaatggttggtgactcgatgtggagcacaacggttggggactcggggtggagcacagcggttggggactcggggtggagcatggtggctggcgactcgagttggttacattccagttttggccctctcgagagggaaagagagcaacagtgagagggggtttcgagagtggtgggcggagtagaagtcgaaatcgctagaggtgggcggaggagaagtggaaatcgacataggtgggtggagaagaactcgcagtcgctagaaataggggctgggtttcgaagatgataaaaagttaaaactatactagggcttcgatatattctatctaaagagagggaaaatacattgcaatttgtgtcagtgggaaaccttcataattacaataagcgtcagttataaaaggtcgaatatagtgtactgactttttataaatgacgttaatactctattacatttttagattctttacgtaggagtttttgcgtcatttttgaaccgactcaaatagtcttacaaccgacgctaatcttgcgtcagtgaataaacgacgtaaaatttatgggtt

SEQ ID NO: 29085 - DNA, 1605 bp, Cannabis sativa
aaaaacatagtaaaaaagtaaaaaataccgctgacagtatttttataaaaaattagcaaaagttagtataccatgtaaatttcccttaatttattcaattaattttaagagtaatatgtttggttgtctaaaatagaagcaatatgtacctttagttgaacaattatacaatgggcctggaagcccatttatagtataagcatctgatacatttgggcctccaccagtttgcaaggcctggctaataactgcttcaggatcaacattccaccactctcctatataacaattactctagttattagttgattcacttgaataaagatatttatctacttataatcttaattttgttgattaccaaatataatgggaacttgtttgtaaggtttaggaaaggggtaaggaatgccacgctttggaagaataattatgggaccataaagagtagctctgagccatgatatatgggcatgccagaaaagagtgcctctctgtcctataatagtgtaattatacacataactttggcctgtttgaattgggcattgggtcacatatgcaggcccatcagcccacccagttcgaagttgtctaataccatgcctgttatatatacataacataagaacatatcatatgtgatataacaataatatgattatattttcacatttaaataaaagatatattagtttaaataccaatgaatggaaatattgttttggacatggttgaccactttgataaggagacgatcaccctccctagctataattcgaggtccaggaaactgcccatttactgtgacaatgctcttagtgtggcaaagtcttgttacattttgtagtttgatctgcatgaaaacacattattattaattaatcaagtcattaaataattattcgtgatatgacaaatcaaattatagtaggagtgttatgtttatctctaccagtattatttattgagactttattatttttatactttaaaatagtgttttttttggtatttttacggaattctatataaaaatccctataacaactaaatgagcaacttaaattacaaccataatctacataacaactcatctagaacctaccagagaaactacacctgaacaatacaaaacgtaaattttaaaaaaaatatatttaaattaaaatagtatatgggataatttaatatttagaaaattttatattaatctaatttgttttttaaaaattttaaataatttataataccaaacataaagttaaaatatataatcaattacatgggcattacaaaaaacatacacgtttacattaaattatatgtgttattagatatctatcaccttctagcaggaccggccctgacttttagtgggcgaaagaaaaaaaaaaatttttaggcctttatttagaaaaaaatatggtatttttcaaaatcagtaaaagaaatcgtataattttaaaaggtaaatatttttttgggcccctgggataggtgggccctaggcacaggtctagcccgcctatgcccagggccgggcctgccttctagatatgtcgttttacgattggttaccgatactccttaaaatttattaca

SEQ ID NO: 29086 - DNA, 1349 bp, Cannabis sativa
cgagcaacataatggctcgcattcgagcccccgaggctctctccttgcaccacgactcgcaacctccacaacacacacacacaacacgcacgagcaacataatggctcgcatgcgaccccccacatgggctcgcatgcgagctcccgaggctctctccttgcaccacagctcgcatcactttctccatgcaccaccagggctcgcatgcgaggccctgtcttgcacccctacttctgcacacacccgcatgcatacaccgaagtgcacatacttgcattcacacatgcatgatttctccttcttacgctcgtactttcgtctttagatcaccacgaggtcagtcatcaaatcatacgggtgaaacccgggaactacaagcatcgacaatgactttatgaaatacctactgagtaggtaagcttgttgaatatgcttccgttaatcgctttgagattagttaactaaccttggaagttaacaacgctaatttttagggttaacattctttttgagacattatttttttcaaaaatatatatgtaatgggtacttgatgagaatttttctattgttgagtaatccctgcgccgtccccgtttttatttaaacgggtattgggtgtatggggtgagtttagaaagtaggtataggagtgggggagcaatcttcgcccctaccctgccccgtttacatccctaagaaaatgtatagttcatttaggaaatctttaggttagtgtagtttttttttttttttttttgttggggggtggggtatgtttgtcctaattatttagttgattttgttgtaatagtaattgtggtggaattggtaattgaattaattataatggaattatgattataattgtgatgtttggtttgtttctaaagatgatttaataaaaggataattgcggtaaatgtctccagaaatttagagtttatgtagattagtctctaattttgaaaattagtactaatagtctccaaggtgacattttctgtaagtccgttggtcgctccttctaactgatatgttgaactcaaataaagtgccacgtgtcaatttttttattaatccaaataataattataatgaaaaaaaattaaaataaaatagaaaactaaaaatatattttaaaatcattatgttattttatttattgtattatatatattttttttcttgttcatctttttcatgaacccaaagttcgactgaagcacccccacgaccccaattagaaagagaaactaacgaacttacagaaaatatcaccttaaagattattattgccaatttttaaaattgagaactaatatgcatcaatcctaaattcttagaa

SEQ ID NO: 29087 - DNA, 2252 bp, Cannabis sativa
aaatgagattgggtttggagtttgatggactgaatttcggggagaccttcgtgactagttgataatcaagataagaaacccctgtcacctaaggagactaggactactgacagcaagaccatgaacaagaaataaataagattggctatggagtttgatggattgaatttcggcaacaccttcgtctcctgttgattcattaaatattttggagaaatttttactttattttttttaattctttcaaagcatatctttatgacacgatgacgatcattttatttttgtattttcattttatattagtttattttaattctataaacatttggaaatttatataatttacacatgttaaaaattcaccattttatgatgcgtactagtatcaaattaatttttttttttatttatttaacttgagaaagagcttgttattataaattatatcattatataacaatagaaaaagttgccgagggaattttcttctcaaagtaagtaaaattattatccaaccctaaataagcttgttttgtgcttggtttgtgtaataaggcatgattaaacatcaaaattatgaaattattagtaatgtattaaaattaattaataaattataattatatctacattatgaaaataagttttttattaaaaataagaatttgtgatacaatttttaattatagaaattgttagacctattttttagactattcaataaacaagtcgaattgtattgcacgtggcataaaataataaatcttgtaacaaatgtattgtgaaactagttgaataaacaaaggactactcaacctgtgaagtgacctcatctatataaggagcacaatgttcatgaagtgagatatatttcaacattgaagggattatttcgataaacattcaacatctcgtaatacaaagattttatagctagtcgtaagcaaggatctagtggctggtcgtaatacaaagatcttgtacctggtcgtaatacaaatatattgcattttctcatattacacattgattatatagtcaggaatgcatctcctcgtattaaacagtcatgaatgtatctcctcgtattacatagtctggaatgcatctcctcatattacgtacaggaatgcatttcctcgcattatatagtaaggaatgtatctcctcatatcacacagtcagcaatgcatctcctcttattacacagttaggaatgcatcctcgtattagacaacaacaatgcatctcatcatattacatagtcaacaatgtattttctcataatacatggtcctctcgtaatacatgatagtccacaatgcatctcttcttattatacaatagcaatgcatctcctcgcaatacatgctcatcaatacatctcctcgtattacacactaagtgatgcatcacctcatattacacacacaataatacatctgctcacaaataacatggtctaaccaagtcaaaggtcatttctttgtatcttaaataaaaatagttatttatacttatctaaatgttcagttatatgtgaaatgtgggcattaaccaccctttaattgtaatttttcactaagataaggttgagtaaccaccatcatattcttataaatagactcaaaggagaagagaaaagactgatatatagaaattttactaaattgtaaatacagcaaaaaactcataaataatgttaactcgtggagtatgtaaatttatgataactctatggtaaacatgatttttagtggctttaaactagatgtatcatgaaaagagtaatgaaagtgtatttgtttgttaagttgattagtttgtatcttaatttttctatttagtatgttagctttttgagtcttgtaaattgttagttttagctaattcttatttaattaaatcttgtttgttagtatcttatataaaaatagttatttgtacatatctaaatgttcagttatatgtgaaatgtgggcattaaccacccattaattgtaatttttcactaagataaggttgagtaaccaccatcatattcttataaataggggttcactgaaaagagaagagaaagactgatttatagaaattttgccaaatcgtaaacacaacaaaaacctcataaataatattaacttgtggagtatgtaaatttatgataactctatggtaaacttgatttttagtggctttaaacttgatttattatgaaaagagtgatgaaagtgtatttgtttgttaag

SEQ ID NO: 29088 - DNA, 1923 bp, Cannabis sativa
ttactaaagcggtcattacaggcacataccaggtggctggccaggttgagggagcatcgcttggccaatttgatgaggctatggccagctaacctatggagataatggccggctaggttgctaagcctatggctggccaacctgctaaggccatggtcggccagccttttggaggttgtgtcaatgctgcagttcgatcccacctacactcagttggctttgcccccggcatgaatgtcgtacaacctttatgcactcctatcaatatatgtttagcttctttcttggtaagacatcttagaggtggtattggaataccatgtttgtgattatgatgttcgagattggacaccgagcaactattccccttactttccaataaggtttttgttttgaggtatgttgctataggtgtcatccatgttggatggtttttaagcatgtctatttcttctgaaatatagatgctcagttcctttagaaactaaacgggtaccaagtttgacttggctgtcaaggcattgctggccagtcaagtgagtgcactggttgttgcgtcatctttggggacttgctttttggtataaattttgagctaacttaataagtcttaaatctagctcaaataggtcatcatctttttgcctttaagctgcgtattcacctaggacatgacctacgactacttgagagtcatagtgtatgtctaggtattcagcatgtgcttcatgtgctatcttgaggcccgcaatcagagcttcatatttagcctcatttttagaagctttgaaattgacctttattacctcatgcagccattgccccacaggtgtcctaagggccatgcctgtaccgagcaggtattcaatgcatcttctaggttgagttgtcttgctcctgctctcgcttcttctctggctctttcttttctctcaaattttgagatatttggggagatatgcttgtatatttagccatgaagttggcgtgagcttggccttttattgccatgctagcttgagcaataagtggccttatgttggccgagcttgatagcctacttgagtggttggtcaggtgcttcaagttttggtgacacatgttgccatggccggtcggaatgcgttgctttgggaattttggtaggaaagataagcatgtgcacttctcctccttctcccttagacttcatggcgtaagggaatcgttgaatttccctttttttccattcttttggccagagccataattgtttccttcgcctccaatattctcattgttggagaattggtagttattgtttgcgctggcttgcatgtcgaacagcacttggggcagtatgatgccctgtgtcttttcaacattgaccttccctcttgtctgggcttgccgatcatcttattccaactttatgaatccatcagcttgctcaaggtcgcgtttttaaggttgggtccgatgggcccgatacccatccgatgtcgtccgatgggtccatcgaacccaaccttaaaaacccaaaaatttaagtggtttttttgtgcaatcggacgggcatcgggcccatcggacccgaacttgaaatcccaaaaatttaagtgtgggggttcgcgagacagagagagaaagagagaaagaggggaaagagagaggggtttgaatgaggggggtaatgtgaaaattaataaaatgttgtcccatcttaccaatgtagggtatttagggtttaagggaaaaatttccccctaatgtaagcataaaatttcaaattttccttagataatcttctttaagccatggaccatacaacagtaccttagttccatcaatattagtctcccaaatttgatccgcatcacaatcttcatcttcatgaccctaaaacccacactattaacataacataggcaatctttcaaattt

SEQ ID NO: 29089 - DNA, 1422 bp, Cannabis sativa
aacaagcttttcccttttagttgacgcctgagtttagaggcgaaggtggttgaggtggtttaggcgcgagatgtgggaagctggatcgtaatttctaggttcgggtctcaggtgaaggtgaaaaagagtgagagaaatgttgaaaattataaaatatggtattttaaatcttttttacaaaaatatgacatagacttacccataaaaatataaaaattgctaaaaacccataactaaataaattaaaaaatatgtcataaaaaacaaatttttaattttttttcataattcgtgtaattcctattttctttaattagcttttcagcatctattttgaactgatgctgatttgtgttacttttaaaaccgacgcaaaaatattaagtgtcgatttattaaaatagacacaaaacagcattagttcaaaaccgatgttcaatatattactttgaccgacgttttgagtgatgctgtatctttttttttagtagtatcattgtgtggaggtcctagttccccactagttctaagaacaattaataaattaaaaggcacgcgccatggattatgtttataagaagctaattttttgagtgcatggagcacttttgggtgcatagttgaccttcataacaaacaaaattacattaattgtttagtgcctaaactaggtagctttacatatatatatatatatatataaatacctaaagggaaaggatgggaatactagctaatcacaaaggtgtctatgtagtatagtggaccgcttttgcctctcttttggattacctacctaccttaattctcccttctaataatttatggttggatttcgcggatcttttacagtacgtatacatatagtgtgtgtttcattaatattttaagttttttttttcctatattatatattttatatatatagtgtgacacataggtggacctaaaggcgttgagggagagctaaaagaatcaacagtatatcattactccatcctgagatttaaaaatatattaatatacaattgttattttcatacatacatcgtaattaaatataacaattggttaaaatactttaaatttatatagaagatcatgttttgaattttcttgtccctttttttctacatgtatttacattttatttattaaaaaaataaatgaagtataaagttcaaactaggatcaaattatgaccaatagaatatataagaaatgctgttaaaccatcattctacttaaattgagctagttatttattatttttgattatattaaatgtataactaagttcaccataaaattcaatcctatggccaggatagtgaattaattgggaacatgtatatatgtgtgtctatgtcaaacgccaattaatttaggatgagtggcatatatgatttttttttttttttg

SEQ ID NO: 29090 - DNA, 1960 bp, Cannabis sativa
tgttatatgcatgttgtattatgtgatttgtatagtaccaacactagtacggttgcggtacaaaatgtattagtacagtatatgatgttaacaggatatagcatagtgttaccaacactagcacaggacaagtgcatagtgcatgtggtacaacactcaacggtactcgaggtatggttagccctaccaacactagtacaagacgagtacttagataatgtggtacaaaggttgtatttctgttaagaacgtttttgatgcatttgaagccttgtaaataggtgtatgggcacctagatacaattcgattttatattatatgttttgtgcttttcttactgagtctgtcaactcacaattattgtttacatgtgtaggtaaaagaaaaggtaattaagctcaccaccagtgagtccaaaactcgaagatggttgtacgtattaggatggttagacctagagcgtttggtctgaggacaacatgggccttcattttgtagttacagagcatcacttttataacaaatattttgaataaagttgttaacttttaaatcaggatcatcacctttatgtaaagttatgtatttgtataagtttaaagtttaattttgtagttacagagcatcacttttataataagtagtcgactgtccatccgcttacaatgtgatattaggtcacccatggatttgtgacatgaaagtagtcgcgtcatcttaccaccaagtaataaagtttccctgtaaagcagagataagtgaaattagaggagatcagttgagcgccgagaatgttacacttcttcaatcacgtgcaagaaaaaattatagcaattagttaactcttcgacttttacagaaaaccaaccccccgcggttgaggagttacgagaaatgttgatccacccgacagatccaaacaaaactacctatattggaacggggcttgctaggtaaagtgaagatgagattgtgaaacttctaaaggattatcatcaaatctttacatgggatcactatgatatgcccaacatagaccttgagataatcacccacaagttaaacatcgaccctaattgtataccaataaaacaaaagacaagaaagattgaagcagatagaaacaaatagaaaatgatgaggtcgataaaatgttaaaaatgatactatcatggaagttctatacccaatttcgttgtccaatccggtagtggtcccaaaaaagaatggaaaatatagagtttatattgattattacaatgatgtaaacaaagcttgcccaaaagatagcttcccattcccacactttgacatgctaatcgacgctactgcaagccatgaattaatgagctttatggatgcttttttgggttataatcaaataatgatgcatccccccgatggagaaaagacgtcttttatttctgatagagggacttactgctataaagtcatgtcatttgggctcaaaaatactggagcaacttaccaatgtttgatcaacaaaatgtttgcccaccaactaggacggacgatggaagcctacattgatggtatgcttgtaaaatccaaggatggctcagaccacgttgagcatctttgagaatgttttcagatccttttagttcattcaatgagactcaatctggcaaaatgtgccttcctagttggctcggggaagttcttaggtcacttggtaactcagcgaggagtagaagtcaacctagagcagatcgaagctttccaggcaataggcaaatccataaaagacattcataaattgataggaaagattgcagccctcaaccgtttcatttcaaaactatcagacaaaagtctatcattttacgatttgttgagggggaaccgaaagtttcattgggattcaaaatgttaagaggcgctggaagcccaaaagaagtacttaagctctcatctgtttgtgcttgcattgccaca

SEQ ID NO: 29091 - DNA, 3869 bp, Cannabis sativa
  modified_base (3316)..(3317): a, c, t, g, unknown or other
tgaaatataattagtttatactcagtttttatgatatataaaatataaatttttggattgtttctattaataatgtttgtattatataattaattaatagagaattttatcgttatcgattatagaattaattactaattttataaatattattttaacttgtttttgtattatatatttgcgtcatttccaaactgacacagaatattaaaaagaacgttgtacgttttgtgtcgattttgtcaacgcaaattttcgttaaataaatttaagcctcgcagtagtaatttcacatagaaaaataaaagctatagaaaaaaagatatgaacacagggttttttacgtggttttgttgttaaaattctgtatagtccacgagtcaatcttattcagatttctgattgtttttttaggagctctctcgtatgaatttttttgtcccctttttcatcttgcctgccactatttataatttcatagtaggcagtaaattacaaaagttgactagaatatgtttacaacaatcatccctaaaatcttgggatttgattacatatcacatactgtaaatgcggtttaggattttgaaaatcatatagctgtgatttttccactttaattgggtcaaaataatcctgtattaaacacgtctttagttgttgtatctggagatgtctcgacagaaattggttctagtgatctccatagcgagctgaaatcattcttccttccaaggataacgatgtatgtctggtgtcgatcacggttttgatcctcaaagatttcttcgagactcatttgaacgctattttctagctcgacaagattgtaagcctcgctgacgctaatgggatgaggttatatgaagtcttcccataacgagacggtcacctcgcttacttattcttgagccgatttgacttttacacttagtttgttcattgtacgctaaggacattcgtgattgatacgtgtcactttctttggtgcttcgctattcacatgtagcaacatatggtttctcgctaatatactaagtgccagtttgtacattgatttcttgcctaagaccttacagtcagcaaatatactttgatacttacgtaattaatgagttattccataagaagtaattgcatcgattcacattccctttatcttgacacgtatcctccagccaaatttcgggtataacaattacccctcaaaaagttcttttttagtaaaaagagctttttaataattatagagggcattttcgtcaagatctcttcttggaaaaatgcatcctttgattctggcggttgtacggtttcgagggtcattatgaattctctcttcatatttttcccttctcccaaccgttggatttctcaatactgagctttcttgcactagactttgtgtataaaagggcggctcaagcttgtcatttttcataaacctctggctatttagtaagatccattttcagaatggatcatctctttcctgccaaaatgtcccttctgagttcagaagttcatccttcaaactcataatacctagatgcaccaaccaatttccagttgtttccaacgacttcaaacctcaatcggggccggaaatgatggattccaaggctgaggagctttcgaccaatccagaccacgggaaccccgtagcccgccatgggcgatcctcacaagtgatcatagatcttgtgggtgatttaaatggtcctcctcaggctgataaataattctagagggaagttggcctggttttagataaatctaggaaggaggttggcgtggtttctgtcagagaacccagccaacccaagacccaaacctgtaccagaagatctttgtgccaacctctttctggtattgaggaattttctaaggatgcaaaagagatttcggcttcaggaaatgggatcttctgatgatgaggagaatgaggtctgtgtagagatcaaggctctcaacatgtagctggtctttctctagctatgtgtagtcggtctttctccgggctacgtgcagacggtctttctttggctatatgaagaccgtctttctcgagtttatcgacttcccctctcatcctttgtttaagaagatgaattaatggttttcccctagtggtatttttgtaaagacaagtttgtaaccagttttaggttttttcttatcttaaatgccttgtactattttaattcgaactgaatacaattgtgtttggcagcatttttattcacagtgtaaacaactatattttgatcaaatgtatagtacttttgggttcttccattgctcataatcttcctatttaagtagtcagtgatctaccaaatttttttattttcgagcagtttccaattctgcctcgctatagcagttataatcttccaatcttccttaagcatacttaaatatactttaatggttttataactttgtatatttttaatttgctcatatgaatagttatattatctatccattttctaagttcaagtacttttatcaaggcaccgtgatgcctcgttttgttctttcctagctcgcgagaaccgttagtattcagttttatacatgagttataacttttgattttcctttcccgtcggataggttttaaataaaaaattatagttgtttgatcccttcttcgtcaaaaaggtttgattaaggtgttataacgattcgacccctctctcgtcaaaaaggtttggtcagggagttataatagttcgactccactttcatcaaagaggtttagtcgagaacctttgaatttcaatttttttttttgaaatggagggttttcattataccaggtatttcaagatgaattctagttaatcatacataaatgccccttaagtaattttaaagactgaaactttgtaattacttaatataaatgattctctttattcataattgaagttttaaatttacatcagtaatgcgagttacatcatttatttattgatagtagggtcaaaaatgttctgcgttctagtagttttttattagcgagccatcaggtcgagccaacttatagactctgactccaactactgcttcgatgacatatggaccctcctagttcgggttggacactcctgctgatgcatctctcgtatttgcaaagactcgtcttagcaccaagtctccaacattgaatagtcttttcttgacgttttgttgatgtatcttgtaactcgttgttggtatgctgcgttggtgattttcaactctattcgtttttcctcaagtagatctaaggacaattttaaaagttcctggttttcttcttgannataaaactctcttctgtgagtcgatatgttcacttcaacaggtagcattgattccaagccaaatgttagcgagaaaggagtgtttctggtagctgtcttctcggtagttctatgggcccagagtacctgaggtagctcgtcaacccatctgcctttggtagcgtctagcttcttcttgatggtatcctttagggttttattcacagcttccacttgtccatttgcttgaggcctggaaactgacgacaagattttgataattttattcctctcgcagaattcagtgaacaagtcaccatcaaattgggtcccattatcggatactatcttcatgggaattccaaccctacagataatgttcttaacgaaaaagttaaggactttcttacaggttatggaaacgaggggctcggcctccgtccatttagtgaagaagttgaatgctactaccgcataattagttcctcctagcccagtgggtaatgccccaattaggtcgatcccccatatagcaaatgggtagggcgaggtcatcattctaagttctgttgg

SEQ ID NO: 29092 - DNA, 1813 bp, Cannabis sativa
tttggagaatctcctcttaatccaaaccaacaaaatattaaaacaattagaatatatgtcttgattttcaaatccaatgatcaaatttgctatcattaaatacttaatgtgttatcctatcacttaattagatcatttttaatggtaaaatttaaatttgatgttaaagtgatactaaaaaattattattttaacattgattttttttcaatttcaatcacaatactaaaaattacaccaaattttatattatttattattctattattttattgatataatacaaatattttaatactaaatatatataataaattagtttttttctttaaaagtattatttaattattaaatttattttaaaaaaaaaaattaatgtagtctacagtgtcctatttaatttagtgagacactgtaaattaaaatcatttatgagtataattttaatattgtattggaataaatatagttttaaaggccaattggagatgcccttaaaaagaaaaagaaaaaagagaggaagttaattgaaatttatatatttattgcaaattaaatattgaagtacaagaaaaaattgtcctttacctcacactcacttggctctttctaactagtggacaacatgcaaaaactatcaattcgatagcttttgtaagttgttgaccagtttttattgaaaccatggtaaaattttaaaaaaatagagcatttattttaaaaataaaaaaaaattaagtaattttttaaacattttttctactaagaaaataaaagattaaagatcttaatagactgatgttaaaaaaaattattaaaagaaaagaatgtgaggcctcttgaatcgaggggccttagctccaaactaaagatgaagctatctattgtcgatttattatttaaattatcttaccaaaattttattttttaaaatttatctcgaacttttatgttatattatgcattaacttttttatttttttacattcatttaaatatttttttaatgtacatataacgcataataataaagtatgaataaaatattatttgaagaataaatagtgcctctctacatgtagacactgttgatattaaacacagattatgagcattgaaacacaaaagattgtacactaatcatcatcactcataatcatcaaaccaagatccaagtatttatttagagcatccaaaatatataataagcagggccggccctgaaacaaagtgggccacaggaaaaaaaaaaattgggcccttatgtaaaaaaaaaaaaactgtagtattttttgaaaattagtaaaaaaaatatgtaattttaaaaaggaaaaaaaaaaattgggctcctgtgctaggtgggtcctaggcacagacctagcctgcctatgcccaaggccggacctgataataagcatacatacctcccattaatgcatccatgtgagccatctaagtccaaaaatctccaacaagaatcaatccaatctcaagactagagaggagcacaagagaggagcacaatgtggagctatcccctcttctctacctattaccattaacctctctaaaccacttcttcacacataagacatatatatatatatatatctcaaacccttataaccctaaagggttattgatcactaattgggcttaagtagttcaataatggtatactataatttaatgggccaattatagttttaagggtgctctcatgtgcctctaacttaacatataattattaaccatcccattatggtagaaaacaaatattgggcacatagttaatgattgtgtttatggtatt

SEQ ID NO: 29093 - DNA, 1265 bp, Cannabis sativa
taaacatattgttgaaaaatatttttacttttctacttttaaaaatagaaaactgattaaaaaaatgttaccaaacgccaccttagttaatggtacacactatcatatgaagattaaatttaaaacataaatattttaaagcggatacatcatgtttattattataaattcaaaattaattacagataatagtgcataatttttgtttataaattgttattaatcttactattataaaagtggcatgttggagttatagttggagactattttgtcttcacaaatctatttatgacaaatctattcttttgtctttttttttttcttttcttttctttgtggattttttatcattttaattacaaataaaccatagcacatgagtcatttctctctcttaagtttttttttttttttttggtttcaaaaaatatttttttgttgttttgttctctttatgtattttatgcagtcacaaaattacaaatatatatttataggaactaattcatttatgaaaactattttatattaaacataaaataattggaaaattatcttatatatttatttttattttttttttaaatttgcgatttgggttgttctagtaatttttatgtgagttgctatgtgaattttagttgcgatttaagttgctccgttagttgctatgaggatttcgatgtagaattccgtaaaaatatataaaaaaaattgttttgaattataaaaataaaaaaaaaaaaaaaacccaaaatagtttaatgtttatagctatttgattattacatatttttcattctaacactcaattttcactccttacaaaaatcaatttttttttttattttataaacgtataataaaaggaaattatagataatttaacaaaatatcatgtatttttcatatattgaatcttactaaaaaagtagtcaatataatgaataaaaaaaaataagtggggtaatagtgtcatagttgttggactaattttaataatttaatgtgaacttataaattaagataatttatttgagctaatattctaaattagactaaataagtgatccaattaaatgagttcaataaacatcttatttagtatgagttttgtaatgtgtaatagtaaacatatataactacgatttatgtgactctaattagtttgtgttagaatttgactcaaattatttatttctttctttatttatctatatttgtaaagttgcaatttcttttgggtaattattaattatggg

SEQ ID NO: 29094 - DNA, 1168 bp, Cannabis sativa
aaatctaaagctaaaatgtaccaaaccaaacaagaaaaatggactaaaaaactttagatatgcaatgcaagaaaaaacgtaagccaatatgcttcaaaattacgcttacattttttctctcaccacaaactttaagcagcacattaaataaataaataaaaaaaaaagtgagcaatcactaatgtttctcaataaaatttaggagcaatggacaaataaggtcaaactctacagcccatctgagtgtaaacaaaagcaatggtgcccgcgaaacgagcactggcgacattaaataattgcacccttctacaagcatgcaaaatacagtatcaatacgttctcaacgagtcgtcggacagtcttctacacaccgtttaaaccccctccaaactacgactcgattggccccttctgtaactcctgcgtgtgagcaaaaaaaccacccgccctttaattaatgtctcggaaagaaaacctcaatttcatggataccattttagttaatgttctcaccttatgtcaaaattgttttaagatgaattaaggtccatgactatacccacagcaactgttttccctgtaataatatagaacatatatatatacacattagagaatatctcaaaacaaaaccaatttagcaaatgtgtagagagcaggtaatctgattgttaccttcagaccgaagcgtaaacctcccaagttgttgaaagtctgagaacttttcaatgcatatcaagttgctcacctgttaagcaaaataaaagagcatgaagatctatgaatattaataattgaaccaatatcttgactaaaaacaggaacaacataaacctggactcggcagagaacaacagcaccgttcttcacaaaaagcactttcttcttcattggtttctttgtctttggatcaatttgctgtagcagctctacaatttcacactcttcaacaacagaatggatgtgaagaacggctttatatccagccgtgaagattgcctaaacaaccatattttgtcagttcacagaaagaaattctatgtcaaagatatacaaagagtagaagttcatttgcatacattgtccagtaactcaaggatctgcaaccgggcaataaactcggttgttgctgctactggttttgctgcacgaaagatcaaacaaaaaa

SEQ ID NO: 29095 - DNA, 2921 bp, Cannabis sativa
  modified_base (2531)..(2561): a, c, t, g, unknown or other
aataataataatttataattagttataattttttttacttttagtcataaattttgttgtaactaaaattaagtaagattttttgtagtgttatattatatatatgcactgatacacttaatattcttatgtaaccccttctgcatatataatttatattttgtttctagatttatttattcttatattcaagtaccaatatgaatataaataaaaatatgaatatgtttgtgtaatttttttttattttcttcataattaatttattatgatcattagttatttgtgtttgtcttatattaatgcttagttgttgtactgtaattttgttatacacttatatttttctaatatttctattataattttcttcatgaaattttttgtaaaacttgactttatgacatttgatatttccgaaaaaattatttatcataaattcttgatcctgaaatttacttagatattataggccttgaagacaccattaaagatcgaaaattgaaatgaaataaaataaggccacgattataattttcattcgtcattattttcatgaggggttaaaatttaaatatttaacagtaaaagattctctcgtgctttagaaaaatttaaaagaaagatattaccattagaaaaatattatattgttaaaggctaagaatgattagttgtacctgaggttgaaagatttattttaaatttgtaactaattataactgatctgtaatatttaatatcacttctaaattattattgcatggagaaaaagttactacgaaattagaaaaattatatcctaatttgcatgcctcaagtgtgctcatgcaacaacaatatagacaacaaaaattttaaaaatatcataattaatttcatgtcttctagtagctgaacaaaataataaacttttgatgaaaaactatgaatctcgcccaactgagtctgccccactccttaaagcgaatgctacaatttctaacaatcataattatggttgtggtcatgattataatcaaagtaatagatgtgatcgtggctattgtggtcacgatactcgaaacaatgtttgacatcgtaatggttagaataataaaatttatactccaatgaaaagaaaaactacttagaacaagggaaaatgtcatcaaaataatagtcgtaaaaattgtaaaaacttatgtttcaaatgcggcatattgaaaggacactagtcatgtacctatcgtatggggaaacaccttgttgatctttatcaagcatcagtaaaagggaaagagaaattaaaagcaaattttgtctatcaagatgatggtcttttcaaagagcccttgaatattacatacttggacgttgcaaattatttgaatgaagattccatcacagcaagatgaagatcccatattttacaagatgaagattggtatttaagacatatgtgcaaaagtcttcttaacaaaattgatgtcaggtggcgagtttcattattggtggcacttggcagcaacacaaggtaattttactagagggaaggccatgagtatgtggtcttttgtgtgaggggaggatattgttagggtatcaactcaagtccggcccacatcaaaagattaggtcacattttcttttttgaatataagtattctatctattctattagtatgaaattttttaggaaggtgttcaaaaataaaattgtgaaagcttagtttaaaagtggataatattatactaatgtggaagttaaaatgaggtgacatgacagcccacggaacggaaggggcctaacaaaatgttacaaaagacaataataataaggtgatattataatatactaatgtaggagttaaattgatgttcctctttactttgctttttttgaaaaatgataaaataataccaacaataatagaagaacaataattataaaaaaagcaatattgtgtttgggtgacaagaggagagatgttggaatatagatatatgtagtatgtacataaatattagatacttgctttcccttggtgcaggaggatatgatgagctatataattaatgtataatataacatcgaaggagctatagatatagtgattagcctttggaatgaactagacacaagataataatgatagatgatcacatcacaaacaattaatattaagaataaatgctgttacatatgtcaacaaatcaattgcaatcttaaaaattaacatatgcaggattttaaattaattttcaaaatatatttttttatacaggtacaaatgaaaatataataatgatgtgatcatgtaatattaagaattattcaaaatcaaattgggacactataaaaaaatcttatttttaatcacaacaaaatttataattaaaagtaaaaaaattgtgattaattataaatcataattcttatgttgtgactaaaaaatccgtgactaaaaatattagtcacaaaattacaatttattgtaactagctaaatgtatttttattcacaatatttgttgtgactaaaagttacnnnnnnnnnnnnnnnnnnnnnnnnnnnnnnnaaaagttgtcactaaaagtagtaatttttttgtagtgagaatcatttttgttgaaaattcgttttctattgagagaaattacattagaataaatattatttaaatattgtattttataaaaattattggtagattattttatttattaaataatacattagattttgtatttttttaaaattatgtaaaataatatcctgagtttaattttgttaaaacaactagatatagaagtgttatgactagagtgactatatttttttatatctatttgtgctaaaaattaactttaagtttgttataataaaaaataaattaacatataaaaatattggaattagtgcttaagactatttttat

SEQ ID NO: 29096 - DNA, 1890 bp, Cannabis sativa
ctttctttctttctctgtttacatccttttaagtttcgcttactagaaaagtcggttacttggaggagttttaggtttctcttataaacaaatttcagaatcgaaaaggtcggaccctggagatgaggagtatttcattcatttctctgctcaatttgtgatttttgacgactatgatgaaaagagtatctgttaattctcgtcaatctcaactccagaaagatgaagctgtaattaaccttagacatcagtgtcttttgcaagattacttggagcttcaaaaggtgaggaggcttttcatgttttaatctaatgaatgtttgtgttttggggtttatcttctctttgtttggatttggctttaatttgttgctacgtgtttgtttagtatttcttttcgtgaagatttagcactcatctgtttgtgattgtggtttgataaacatcaaagtatattatcagtatatgttatgtgcaatcgaagttgatattcaattaagtcaaataaactataatataaggctaaaatcagtacagtcctttaccatatgaattgaaaatctctacttttttctgattataaagggaagaactgtttaaaattgtcttgtattgatttatttcaggaatttgtttcaaaaaagaagaaattgaaagttgtcactgaaaccagagatacccttttagctgaagttcggtatgtatttttttcttatttatttatgtatcaggaaaataaaaagaaatttaaaaaaaccatagaaataccaaaatcagctcaatgaaatgagactggtatggtagtaccatgagaaagtagttcattctagaaggataatattaggaccacacaagagaaatacataaacttaacttgtgtgtgtgttttgttggagtttcagatttttgagacaaaggcttacatatctacagaatgtgcaatctcccaaaataactcaaactgttgagaatcaaaactctcataaactgtctgcaaagaagttgaaatacaatgtcaatgaagctgttcaacaacatagccacacctcaattttggattcaaatcccatttcggtaattacattagaagctctataaaatatagttgaaaatgaacatttttaatacaaacaagtttattatgtgctcatttttatttaacatgacagggtctggtagagaatattgttggaggaatggaaaaagaaaccaactttcaggacctcaaattgaaattactgaagaagccaaaagattggctgatcaacagccaaagggtttgaaagaaagaaaagcctgctgcaagatcagattgctttgaagttctaaattacttttatgattgataataaaatctcattgtctctggaaatttttcattttttaattgcaaactgtatagaaaagaagatttcagtacacatgtgatgttgtgaaaggtctttcattgtttgatcaaataatattagaaagtctcttattgataactctgtgtgtcttgttatctatatatatttcaaataataaaatatttttaggtgttactaactcaaaaattagagaaaacaaagagttgcaaatatgaagtaataacaaatttcattttaaaaaaaataatgtaatagtatataaagataaatcaagttgtcaaaacttattaaaaaataaatttcgtaatatagaaacatattgaagagttaatttttttacgtattgcaatgaggtcaatgctttgttatttttttgtagaattgtagttagtgacgggctcagaatttttactttgttgggacttatttatcattcaaaaatatttatacttatattataatcattcttactagatttatttaattttatggggttttttttctacgattttgatctata

SEQ ID NO: 29097 - DNA, 2455 bp, Cannabis sativa
  modified_base (2403)..(2412): a, c, t, g, unknown or other
tatggccggatagatatataaaaaaaagaaagataaaaagagaagtatttaaacagctagagtcccaggctctttgtacgagtcttcttgggtggtaggagctggaggatttgttgtctgagcggggggcgcgccaatgttatggacagaggtagaaaaggtcacctcgggttcaccataagccacttgagaagcgcaatactcgagaaacatgtctttggaatcacccaagtaatcaaaatttgcctcgagattagctttccaaaagtcataaaaaatcttgagacccgctgtctctaaggcatgtactttctcttcaagcctcgtaacctccgctctgttgctcagcttctgttctctgttgttcagccttcgatttgtacttcttaacctaagctgtaagctcctcctccttagacttcttctctgcttccaactgatggaagacagtccgaagaactcccctttcctcttgaagactattcacttctgctgacaaggtggcgatggtagcttcaagttggtcaggagcctcgaggtccttagtcaactcggctaccttcctctcggcattaaaaagtttcttgttgactttacctagttccattcagatagctccgagttccaccctggtgtcatcatcatccttcctggccaagtccactttcgccctcatggtgttggacatggtagtgttcttggaggcagcagacttagctcgggaataggtgtaagccatcttcagaccagtttgtatagagaaaaacattagagtctgagccaagtaaaagaggattaaaggaaactctcaagaaagactcacccttgtaaattccttcagaactcctcccatcaacagctccagggaagattcgttgtcagctccggccagttgctcattcacctcaggaaccaaccggttcatgtagtgagtgagcatctccttgccttatttggcttctggatgcaatggcagaggtggggtaagagcccgcatctactcagaaccgctattggccagctcagatctgtccttcgactgttcaagcctgttcaagcttcctcctcgagaatctttggacttagcagcttttggagcagaagggtccacgacagttagctcctcagaaagatcgataacctcctcggtcggtgccttttccgtggatggggtcacctcaccgcccctagatttcttggcctgaggagatgagcttcagcttcccccaactctattcttcagagcatcgagcatcttctgagacatgtttgcacggaataaaagtaacgtggttagacgaaaaaaggcataagaagtaaaaagcataataattaagaagcttaaaaataaggtggagtatcttgcgtttcacgggaagcatttgcctaagcaagactcgaaggttcatcatcacttgacatgagaggatggccgagtaggtaaactgggctccctgatttgaattgcatgttcaacgggcctgggcttggccggaagtttcttcctccttttgagcggagtcagctgctcttcctcagcctcatcttcaggatccaaaggctcatgagcatactatttggcccttgcacctccctttaacttagcttcacgcttaagttgaataagctcatcctcctgatgagctccctcagcccgtccaacattggatttcctcttcttctccttcataggctggggaatgaaatccttcgggtaaagcccgtactccataaagttgtcatcggaggtcaagaaaatgatgttccaggcatcacttggcagctgagtgagtttttgagctctatccctgagagcaagcgtgaagggtggatgattatatataggaatctgctggaaccgagtatatgtggtactcatgccttccaccatatagtatttgttagcaaaattcccaattttgctaacacccttgtccgcagtgcccgtcaaccacttgaagtctggctgagaaaagtagaaatatcccaacctaccttgtttggaagtagacttcaagtcgaagaaccagttaaccttcctaaagtacgggtgcaaaggcagcagtgccccttgtttagcatgagcacctgaccaggcacacatccccttctcaaggtttgtggctcggttgtttgaggcaggaatgtagcagtccagctcgcccagttagccgccctagtcaagatcccgtaagcgtgcctagtgattttggacggagggctcacccatctggcgcccaaggcactttgcctcctttgaggaattgtagcagtaatttccttcgtgacgtaatccacgccctcaaccacgacgtcgccatccgcatcgactggctccccagcctcattctaattgtttaatttctcataatggatttcatatatgtgttgctcacatggaannnnnnnnnnatgttttaagaccaaatatacaaatctcactaaatactgaact

SEQ ID NO: 29098 - DNA, 1864 bp, Cannabis sativa
agaaaagtcattccattagaatgatatttcaatggtttaaaatacaaccaaacaaaaaaatggaataaaaattatttcccttccatttcattccattcattacctccaaccaaacgcggagagtactagacaccaataaagtcttttagtatttttcaattaaaattaggtatttttttatagaacaccctttaaagagttatttcagtagatctctatttattttgacattcaaaagagttttttaatttatttttttcttcataatcatatacgttatagatatttaaaattttaaaaaaattcgattagtttacaatgtcgaaaataagatttaaatattttattgcatacacgattttttttatatatgcatggtaattaactatttgaatcttattttcgacacaataaaacattcgaaattttatgaaaattaaaaacttatcctaaataactaacgtacgctattataaacaaaaattagaataatttttttttttaaaatactaaagaaaattggaataaaatttttttttaaatactaaaacttagaataaaaattgtgttgtcaactggattactacagtattgaggttgagttcgattgacaaattattgcaaagcttttgagtaagaaagatttttgtatggcaatagtttgattttgagtgatatttgtttgatttgtagaagttttaatgtgtttaaatttttattttgtacttgcgctctctgaatattattactcataacattgctaaattagcactctcttaataatgaagttcggtgactagattatttgatttatttttagcattagtctaataataattatctttcattaaaaaaattaacaaataaattagagagtttatcaaaaaaaaaaaaaaaagactggtgtactacataaatttcgaacattataatacatatatttatataattagttaaaacaaattgtgattaaatttaagtttacttatttttgatttagtatctcacactaataaacaataaacaaactaaataatgttgaaatttttgtgtagatccttaaacgatcgttctagtagatcatttatcttttagacatttagaacaattttttagtctatttttttatgaacgcataaaatttaaacaattacttaccacacgtaagaaaaataatcgttagtacaataaaataaataaatcttattttcagtattataatttatttgaaattttcttaaaatttacaagtggtcctaaatatctataatatatacgatcatgaaaaaattaaattaaaaaagttcgccagtatgccaaaataaataaaaaatttaagaaaacaccctttaaaagatgcaatgtagactactcaaatacagtttttgtttcaaattaagtctactacttcgagttacatggttctataaaattggtcgtacattatagtcacgtggtctttttggtacccaaattaacaacacctacaacaaaaacttaggttttttgggatataataaattagttatttaaatggatcaaatattaataagtatgtcatagttgtcatatttaaaaaacaaaaaaaattataataaaaagacaaataatctaatcatataagtataaacttaacaagaacaacacttctactgaaaattcgatctcaaaaaaataggaaggtctaacaaatctataaacaacactcttcactaaccgataaacaaacactaaaaaaactccactcatacaatctagtatgtcataattaatagttatgttatgtatgaaaggagatatgaatatttagacctttgtttattaatattagcaagttaaaaaagaagggaaataacttatatgt

SEQ ID NO: 29099 - DNA, 3415 bp, Cannabis sativa
agaaagagaggacctacctctacaacagatgtgcgaaagactaaatccattgatgcatttattggtgccgaaccaattgagttttcggaggaggaaaacgatggtgaaaaggaacaggacaatgaatcgaacagtgtggaaaagaattctggcctggggcagagtagtgcagatatgtttcaggcgcctctctccccaaagtcatcgttgcaagagatcataagacaagaagaggtttgcagggattttgactatttcctacaggccaattgcaaatgctataataacgttcagcaaggtaatcctataactcctcccattttatgttctggttcagtggtgaggaatttagattcatctttcaagaactctgagagttataacaaggtcaaaatcactatgaagatattgaggatgaagttcatttatggagttcttctatagtttgttatgtccttggtgctaacccaccattgacagttatagaaggatttatcagaagaatttggaaagaaaaggttgatagtgtaggtacactgtcatatggggttttcctggtgcggttcgactcattagaaaccagagatgagattctaaatgggggttatgtgtttttcaacaatcggccagtggtgatgaaagcatgggaacctgatgttaatttcaaaaaagaggatattagatcaattcccatttggattcaactgccggatcttgaacttaagtattggggtgagagatctttgttcaaaatagtggggcaattgggaaagcccttgcaagtggataccatgacaaaggaaaagcataaattgaactacccgagagttctcattgaggtctcaattcagcaggagttcccgtgcgtgtctcttttgaggatgagcatggctttgatgtttttgctaaaattaaatatgagtggaaaccaatacaatgtaaccattgaaaaggtttaggacactccacaatagactgtaaaaagaagcaaggaggtcagcagcaatgggtggtgaaaaacaataaaaagcctgctgtgaatgaagcaggcaacagtaaacaacaagtagacaatgaaggttttcaacaagttagtaaggggcccaagttaagaagtatctcaatagctgaagaaccaggtagaactaatccgtatcaagtgttagcagataattttgaagcagtttccactgcagaagcaccaaatgttcaggctatggctacaactgaagaaggagcaactgatttcatcaagattgggctcaaccaagttgccacagtagagaaaacaagaggagggggagatcctcctcgaggaaatgaatagaataattagttggaacgtccgagggatcaatgaccatagcaagaaaaatctagtcaagaacatggtacatgttcataatgtcggtcttgttggtctcctcgagacaagagttaaggctccaaagcttggggccttatatgtaaatatgtttaagggatggtgtttgacatctaacatagcttggcatgatggaggtcgaattattgtggcatggaatccttgtagcttctcggtgaacatactcaaatgtacaagccaacttatccatcttcaagtatcaactttgtatggtaaggtcaacatctttactacctttgtgtatgctttcaatgagatagaaggtagaaaggaattatgggcagatttaaagttgctagccacctaagaaccatagatggttttgggagactttaatgaaatattgtttaaggaggaaagggtgggaaaaagagttaaatttttggcagcaaatgaattgatggactgtgttgaggcttgtcaaatagaggatatcaagtatagtgggagttattatacttggaataacaaacgacaaggaaatgagaggatttactcaaagattgctcgggttcttgctaaccaacggtggatggacagtttttcaacagcagaagcagtgttcttagcagaaaaactctttgatgatacccctgcaattatctctttttatcaggaaacacttaatgggaaaaaaccctttaagtatttcatgtggacttctcatccacgatactctgagatagttaaaggtgtttggaatcaaagagtgaaaggcaataaaatgtaccaagttgtttcaaaactgaagggactcaaagtggcatttaaagatcttaaccgaaagcattactccaatattcaagtgacaacagatgaagcaaggaaagagttgcttgaagtacagatgaagctccaaaatgatcctttgaatgttgaacttattaacaaggaggctgctacccgatccaaatatgcttagcttttgaaggggctcaattcattcttgtatcaaaaagctaagctaagttgggttacaaatggagatgataatacatctgtttttcatgctagcatcaaagagaggagaagagcaaacaacatcctatcaattgaagatcaaagaggagtaagaacagataatccaggggaaatttttgaggcctttctttcattttattgtagtttactcggttctaaaatggaaaacaggtccaagatcaaggcaggagttatgaaacttggtcctcttgtctctaaatctcaggcagaattcttgatgaaggagttcttcaaagaagatgtcaagaaggttgttttttcaattcctgttgtgaaggctcctggtccaaatggctttactagttgcttcttccaagacaattgggatttaattggaaatgacatttcagaggctatcctctcttttttgcattcaggtcagatccttaaagaaattaacactactgttttaacacttatcccaaaatgtaagtgtcctaattcagttagtgatttcagacctattgcatgttgtaatgttatctacaaagttgctactaagctaatttgttccagaatgaaagtcatcttgcctgagcttatagcacagatttaggggggatttgtttttggcagatttattgctcataacattatgatctgccatgatttaatcaggcattatggaaggaaaaactcaaaggcaagatgtatgattaaacttgacttgcagaaagcatatgacactctggattgggactacttggaagaaatgcttcatgctttccattttcttgataaatttgtctagttgattatgatttgtgtttgcactccgagatactctcttatgttcaatggctcaatgcatgggtattttgaagggaagagagggctaaggcagggggaccccatgtctccattactttttgtgctaggtatggagtatctttcaagaataatgttgaagataggagctagacctgatttcaaatttcataatagatgtgctgaattgaaattgaatcacttgatctttgctgatgatgtcatactcttttgtcatgg

SEQ ID NO: 29100 - DNA, 2283 bp, Cannabis sativa
  modified_base (2028)..(2028): a, c, t, g, unknown or other
tagatcaattcttgataatttataatatccaaattagtgtgatgtcgttatgaaaaacaaacatgcccctattaattatgttctcttattatttggttaaatgatctattattatcagtataatgaacattccaataaaaataaatttgaaaataaaatattttaaagtgtctctaattcacccgtaaagacattttttgcggaattttttttggacgtaatctaatctaaaaatctttaaattaaagttagtatgtaataattgacctggaggttttaagatcaaatttgttacatttttttttataactgtttatactaaaagctggcttcaggtaaattatattaaaaaaataaaattgaagaaaatttattagttcgaaaaatattattttgtactattttaaaaaaagtatggtttaatttatcatttaacaaaataaaagatccaaacaatacttttaacaaaaatacagaatctaaattaatatttacctttaaatctagtatgataatcgatggcttatacagatagtaagtatgctagctcgttgggttgaagatccatgctcaaaagccttcaagtgtcacctggaaaggattccagattatctttggattgctgaagatggagccaagtttcaggtaatttttaaaaatttatattatacacatatatataaagagcaagattacccctctacaatattttttacacttcaagaaattataatagtaaatttgataattcatgcttaaaaattgttcatggtcttttagtatgtcacattaaaatgtatatgaatttaatactctaaaattaatcaaatcccaaaataccttcctcataccttccgtctttctctcggccctctctctctctctcatgaactctcaccaaacccaaccgatacccatgatcacagaatcagactgatctagaccatgaccacgtaccgcaccacctccggcaaaacccactttgaagaagaaatgtaggacaaaattgaggagaatatcacaaaaccataaagagaaatcgtgaaacccaaagccccaaaatctaagagctcaaccacctcgaaatccctacccatcgttggagttctcaactcgcttgttttccgcatttttttttgttttcgacgatgtcgcaaaacatcgctaaatgtgtcaattaattcacaatatcactaaacacattgctaaatgtcgcgaaattatacacatgattagggatgtttagcgatttgctgtatattttttagtctcatatcacaaatacatcgctaaacatcgctacgcaaaacatcgtcaaatatcgcgaatcatcgctgaacttcattcctaacctcagatttattctatcattgcaaatacatcgctaaatatcgcaaaatattgcaaaaaactggtaaaccagaagaaagaaacgtaaaaaacgagagaggccgtgatagaagacggcagtgaggccttgcgaccgaggttctgggtgtgtgtgttcgacggtaaggattttgggtcggggttaatgccggagagtgagagagttagagagaaaagtttctttttgagatgtaagggtatttttgggaagaaaagatattaaaagtatatatatatatactatttctaattaagtagtatattaaaacaatatattttacattccaaaattttcattataatttaattttttttaatggtctacattacacagttgtaggtatcttttgaaaaattctgaatatttaaatttaaagaattagttgtattgtacatgtgtgcttgtttggatatttttgtacgaatgccgttgaataatgtttaaactttatattattctataaactattctaaatttttcggacgaaatatctactataattacaatatacaaaatcatataataaaactttaattataattttttctaagtactaaggaggcgtttggttgagtagaatgaaaatattggaataggaatgggaatgggaataagaataggaatggaatggaataaantttaaaatgcataaaaaaaaattgtttcctttccattctattccatttcattacctccaaccaaacgccacctaaaaataaagataattgaccggcagtaaaaagtgatgatgtctctacacactcaaattataattttcctatataaatgtatattataaaatattattcaataattaattctttttaattacattttaaaaaattgcaatatggagagttcacatttttaattttatttatatatatatatat

SEQ ID NO: 29101 - DNA, 3329 bp, Cannabis sativa
gcctaaatcttcttgacatgtggtccatacccgagttttattatacctctgcaaggctcgggtacaccttctattatggtttcatcctcaagtctcaattcatgtagaaaataaagttatttttacttgacatatgctcggaatctttttagcttttaaaattttagctcgaacatcctataataatattgatgtcacgataattaaactatctagaaaaggtaaatatatgattaatttcagtaataataaatacaattgtttaatgatactcaatactactaatacttttgaacaattctcattcataaaatgtaattcaatatataatgaaggcaatttcaattgatccacaatatcatatagacaacgagtttaacaagtttgtaacattgataatgtgattatcaatgtgtgatttgatttgtagtaaatgttaatataaatgaaaaaaaatgatatatttgactattataaagtttaaataattaatatatttgaacatggtgatcatcaattattagattgaaaaaatgttttatgtgattgtcttttgtgacatattcaccaaatttttgtctacttaattattactagtggatttatatattaaagtaaaatgtgtgaggaaatgtttataaaatatggatttaagattatatgctttttagacaaaagttttcaaatttaataatctcgatagtttagggataatttttaacggctaaaaaaacttagagaacatgatttagtaaacgtcaaagttcaggaaaaaaaaatcttaattagccaaaaataaataaataaatatttaagattatatgctacacatttaatttagtgcatggtttataaaatgtgtgagggaatgtatatagatttgagtagtaataatataatatttttataaacgaaatatttattttaatttaatttaatatgatttaatataatctaatcatgttttcaaaaaaatatatatattatctaatcataattatgtgatgaagtctttatgtggatttttgtagtatctgtcaaaaaaattgtacagatatgttatgaatagatagccatgtgatgtgaccaactcaccaataatatataattatcattattaattaatttattattttattatattaacaatatctttttgtatgttgaatattaattgtagtctttgttttcttagatgtgtgttttcttttattattatttattgagatttaatcctaatgattacgaaacacataatttaaaatcaatttttatatttaattagataaatatattcatatttaaaatataaataaaacttaaatgtaaaatagaaataaaaaaacaagaagtgtacaaatctaattacaaatttgtaagtcctactaaagaggattgctattaagtccttttcaaaaattttatttataaagaaattaaatagtgtaattttcataatttttattggtttgcttttaaaaaaattatatttacccccttaaatttttataatttttttttttgtgcacgtaggcctctccaatagttgaggattgccttcatttagtgttgtaaattcgtacgtgtcgtgttagtctgacccatatttgtatgtatttttcaaaatatgggtcgtgtcgtgccgtgctataaaaaaatatgagtcgtaccatgccgtgctaatatttttaaaagataggcccagctcggcttgtaggcccagtatttttgcaccgtactcggattcatattgtgctttgttcgtgctagaccaccccatttcttaaacaggccagcctgtttttagatctggactcaaatttgtgctttattttttcatatttttttacaattactaaattatatatatattttataattttagttatatttatataactttgcaacaatatttcacacacaagaatcatatacaaaaattattaatattataaataatcaaattttatatcaaactctataaataaattgatatataattttaattttacattttctaatagttttaattataaaattataatatttagtattatacttaagttttattattattattttaaattatttataattaataaatatatatctattattattgaatattaacaataataaattttagggttttctaatggattataccatattttttgggcttgtcgggtgtcatgttttttgggctaatctattcgtatttacgtgtcgtgcctttcgtgcttctcgtgtcatgcccaagctcatattttttcgtacctaatcgtgctcgtaccgatttcgtaccgtatcaaaatgttcagcaagtatttacagcactacgtccatccctaagtggcgtccaacacctccacgaggtggtactttgtcagtagttattagttaacgaattttcaaaataattgtatattaaattaaaatatacaagacctgatatttaattacaccaataataatatgaataatattctatacaatttctcctaataaaattaaattattaatgtcttatcaatgtgtattattttttgttacatactttgaatttaattttcatgtgccattgatgaatgttagagatgctattttaatttccaaataatagtaagttgttggaagttaaaaaattggcatggggagagatttgatgttattggaccaaagttgaaattattagtgggcaacatgagccaaacatgagattcatgtttttagcattttataatgctttgaataatgttggtgaactttatgtatattcccaattttctttctttaatttcataggattcgtgggatttagaaatgaacatttaaaaatgaactatttgtgtgacaaaaatattgttctttctgttatattttgttcatttttataaattaaatggcatggtcacaaattatgatattgtacttattttatttgtaattttattctaatcatctacaacatttcacattttttttatttatttatttacaactgtaaaattgtaacttaatttatcaatcacatcttgttttattgtattattgtattggaatcttgatttatttttttttttttttttgaagagggaatcttgatttcttattttcattaaatatattaaatattctccatcatataatgatactaatgtggttttgggcttcctacattaaattacaaaattatctttatttactttgttaattaccattaaatccaaataattattgtagtgagttattagtaaaaaaaaagaattattaataatctataaatatataaaagaggaaatgttgttttgggcttcttaaattacaaa

SEQ ID NO: 29102 - DNA, 2079 bp, Cannabis sativa
agagtactggtatagattctatgcccaataatattttgacagaatttcaacaaactaacattaatattaaaacatactcaaaataatagtaaaacaactataaaaaactacacactgttattattttgttgcggtagtccattttttgggtgtccaattattttctatatccttaatttattatacattgaagataaatgaccaagaacaactctaaaactacgttgaatctgttaagatttaatgagaattattactaaatttattttcatcccagtaatgatgtatatgaatctttaatttgttccattacccatatatataagttatatttcagagctgcatatcatttctataattgaattcaagatcaatgtatgagcaccatttatattttcagattcaaacaattttgtgtgggtttaagattcttacctttttgatccgtttaattctggtattgatgaagattttgtgttttgttttcacattgactttagtgtttatggtttatcttatcgatataattaatggtagtttttctgtttgttttggtgttactttgatgtttcagatgataggtgcggcgttgctatttattttagcctctgtacattataaaagaaagaatattagaagaggacagtataaatgtaatttttaacgcattacagtaaaaatgtaatacttagcccattttatatttatatgtaagttttttttaaaaaaatatatttataaatatttactaaatttgtagataactttttaattacaacataaatgttttgtgaataaatattacttttaatccaacaaatattacttgttagtaaaaagtaacatttaaatataagttgtcattaatttaattttaaccacaacaagttattaataattataatttttgtgattaatatacttttagctataaactttttagtgataaaataataacttatgttttatcgcatcttttttttattattatttttagtcacaaattttattgtggctaaaaataagaattttagtagtggatatagatttatttatttattttatttttcattcttatattaatattattcatattattttattttaggagattcatgattcatgccctctggcgtattgtagcattatatatagttcatacatatgtctatacaaatatatatatatggtatatattctcataagatagtgccctaactaaccattttttcataggattaatggtactagtaataaaagcaatacaagaataaaagatggaagagtcaaaaaagtgtggcatctagtaaaattgaccatttttgtcaatcatattgtgggtcaatcaacacaacatgcatgattatttctcttgcaattatatcttcatcaatgatatttatatgtatatatatatatatttggagcatatagtattggaggtgttctcaatattcaacatatcactattactctcttttgttgtttttacataattatcatcttattccatatgtttccacaataaaatcatttcaagtttgccctaataaacctcaaaacgtttgttcgatttgtctttctataaggaaattgcatgaccttcatttatttatttttcaactctgatatataaggttgttagcatcaagacaaagaaggtgacaatatacatattaggcatggacttgtttttgtttatattctcatctcctaatgatgcccttttctgaaaattactcacattttaatatatgcataacttttcaatgtactaaaaaccctatatataaaccaattgccaaaagggtcccatctagggctagaagttggagagtggtcctttatcaaagaccatatatattatgtggggctaataagcttaattattatttttaactctttatctttccatctttccataatgaactttttttttcttttttctttttaattaataaatacattgttttgctaaaattaatatctgcatatctgtcttggtgtccttctagatttattctcttttatggatatctatattttagggagatggaaagcattatttagtagagagag

SEQ ID NO: 29103 - DNA, 2211 bp, Cannabis sativa
aactattcataattttttaaaaaatttacgttacagtcttgatactgtaatgataatgaatacttctatgcttatattttttaaacaaaaattattaggggttgaaataggatgttcacgtcatcactcctcaaactaattaatgttaaaagatcaacatgaacatgaacaagccgaataatcactttccaaaacaaaaaggaagccaaataatgagggtaaaaataaacgataaaacgatcacaccatattcataagtcataacaaacaaaagttcttccgcttcatcaatcccaggcaggtgttgttattcactataattaaaccaaacataaatatatatatttttataatcctaagtccagagagtaattaattctacaaaaatatgcaaataaataagtttaaaaaacaaaattaaaattttatatattatcactgctcatggccatattaataatgatgaactggaggcggcggtggtgacggcggaggaggagaagggcttctacgtgggcagttagcgcctgcggcggcgcaatcaaccgggtatttatagaaagcggcacattcctctttcgaacgctgtaaaggcctataaggaatacagtttctccggtcatctttacttggcaacttcaggcaagttcccggctccgagcagaagaagttaccggagtaggtgaaattttccaacttgggcaaggcacaaatactcggtggaatatacccggaaagcttgttgttagccacgtccagttgctccaagcttttcatcttccccatcgagtccggcaacgaccccactagctggttagaactaacgtcgaagacagtcaatttgtcgagcaatccaatatctgagggcaaacagcccttgagaccactgttagtgatgattaactcgttaagagtattcctcatttttactaagctcgaaggaaaacaactgttgagattgttattagccataactatgaccgaaactggggagtttcctatgttttggggcaaattagagctgaacttgttattgtttataaacagagcatcgagttttaaatcgaataaggcagagggaatgtcgcctttgaatgagttaaatcttatgtccaagaatttgagtgaaggcaaggatagaacaacagttgggaatttgccggtgaaattgttgttacttatatcgaactcgaaaaggactttgagatatgaaaagcttttagggatatttccatagaagcgattggagttgatgtggaacagagctaagtcagttaactcaccaagctcttcgggtaatgtgccttgaatgttgccgtggttaaggtctataccggccactgtggtggtgttgtggggatcgtttggtgtgggtgcacagtacactccggtgtagttgcacacatcatgaccccaccaagtttgagtgatcttttttgggtcagaaatgatttgatgtttccatatttggagaacttcgaatgctttcatcagttttgggtttgggaagccgtactgcctgtctgcttgttggtgagatggtttggaaaggattataatacagaaaattgaaaaaatggctaatttcaaatatgagttcttcatttttttttttggagaaaaaagagagattgattagtgatagatgtttgtgagaaatgagctgaggtgttgagatttataaatgataattttgtaaggtttggataacgcatatatagtttgtgtgtgtatgagtgtattttattttaaataataatattgatttacaatataattactagtttatccttgacttgatcctatcatttcattttattttttaaattaaatattagaaatgaaaaaaggatcctaatgtaacaatgattattggagtacagagaggtgtgctttatattttgattttgactattcactaatcgagttggtaaagcaaattaaataaaaacaaaattaaaaatttatttttatatgacttcttttctgtttttatatattcttccagggaaattaatagtgtaaatattaatattaaagcattaattgtgttacatgtttcttgtggaaggttggaaaaaattggtgactgatcttacttaccaacaacgcggttttaccatatattagcttaaattaaatacttggaattaatcaacaaagcatgtatatttatataaatctagtgggattataatattaaacaaacat

SEQ ID NO: 29104 - DNA, 1325 bp, Cannabis sativa
gcagaatgagagcctagccttttgatttccttcttacttgagctctgataatagcacttatcttgtcttgtttagccttttcaacaacgaatttagccctctcagcttcttgtacaaccacttgtttggcctcaattgcatttgtaaattccctcccaaatgttacagcaatgattgacacattatccagagcgatgttgaaattggcagccttctcagtcaaaatcttccttatttccctactcacatcctacaaagtataaaaaatgagggcaatcaacagttaatggcaagtgaaattaactatctcatggatcttgttctgttgtatagaaagtagagactcttttagttccatgttaaatgagaagacaaagcagggaccctttaataatggtatggttgcatatgagtgaataaaagggaaattgtttctacataagtgaggataaagtaacaatcgaaatttgtagacaacacagctttgaaatgatggtaatgacaaagatatccccaaggcataaaatttaactaaattgtagaacatagggctttaaaatgttatcccaaggcataaactttaacttcaaaagcattaccttcggtgttgttcgttaagaagaatgacgggtcacttccgatgtgtatcgactaccggtaacgaaactagttgacaattaaagataaatatcctttacctaagatcgatgatctattcgatcagcttcaaggaaaaataatcttcttcatgattgatcttcactcaggctatcatcagttgcgaatccgagaggaggacattctaaagattgccttttgcattaggtatggccactatgaattcctagttatgttttttggactaaccaatgctccatcagcttttatagatctgatgaataggaaattcaaagattttctcgataattgtgttatattatttattgacgacatctttgtgtactctcagtcagatgggaatcatgaacaacatttacaaatggttttacaaagattgcgggaacacatgctaaattcaagaaatgtgagttttggttatgacaattgtccattttaggtcacattatcagtaaggatggaattatggttgaacctggaaggatcaagttagttagagactggtcgagacaaaagactgtcacggaagtcagaatttttttgggtttagctggatattatcgttgttagtggaagggttttctacgatctcaattcccttaactgagttaactaagaagaattagcagtttatatggacagataagtttggaacttgttttcaatggttgattatagctcctgtg

SEQ ID NO: 29105 - DNA, 1794 bp, Cannabis sativa
ttatatgaggcttatttccaacatgtttgatcaatgatttaatacgttgatagaaaatagagtacttaggaaaaatgaaagtagatgatgccaaaacaagcaaatacattcaaaaatccaatcattaaatgtattcgattctgcaaggggatttaccaagtaatatgttagaatttcctaccttcccaagattaaatgttcagccaggaaacaaatataaatacaaacttggaagaaacaaaaaacggcaaggcttatattgaacagaatcttagcataattaattgactgttaataatctaatgaaaagaattgctgctggaaaatgcccaagcagctagagatgtaggagttagcacttttattggcttcctagtacttttttccttgacagtctatattaacaagagcatgtaattcagggaaacactccagttatattttgaagaacgtatacttgcaatcgtactattgttctgggaaaatcaccagcaatttggacctgaaattttggcaagcatacataatatagtattaatggaaaattggcttctagaactccctacttcaagcacctaatgtggttaggtgatactattgcttattggttttaacgtacgcagaacctgatactcttttctctaaaacacacaaaataaatttctaaaagggatttggatcatattcgctcaagaaaaggaaataaaatgcttgaagggttgccaagttataatccaaaatcaagggattcttcttttcagcccattgattcatatggacttttcacacttcctttatccaaatcaatgaaaaacactactccagaaagagaatcactcataataataaaacaaaaccgtaaaaaacaaacccagattaaaaaacaaacagcaaacttcattcagaataatcacaataggaaaaacaataaaagaagaaaaaaaaagaaacccaatgaagattatacagcgaaagcaagaaaatgagtcaatcccataattccaatcacacccaattccaaagttgatgcataaatctttagaaaagaaaaaagaaaaaaaataaaaaaacaaaacccagttgaattcttgtatgaataaagaatcacaaccagtttagctaaaaaaattctttaagtttcatgaaaagtaggttacctagagtagaaaatggagggttccttcgaagaaggattcggcgaagaaaggtttttgtatgtttctatccaatacgctctctccactcataagtcatatccaccaccgtagggtgacgctgatcgttctacatgtatgtagtacatcattaattatgtttagaaattaattgattaaaaatcaatattaaatgacttaagtggggactcaacacgtattaaattatatttttttccaaaaataatcaatggccatcgatgcagtcaattctattttcttttatagaattatttataaaaatggatttccttatttaatatgtgaagctcaagacataccaatcatgtatgtttattacttttgtcacaaatgatgaaatatattataaaccatctttaacattttcgattaaaaaaaaataggtatttttcgggtaggtatgttcatcaaactgttcaaattatacaaacggctcatattgcactacactgtatgaaaaatacagtttaaaatcttttgtggtgcggttgcggtttgtatgttttccaaacctcgcggtgcggtgtgttacgtgcagtctatgatgacacgttacaagctaagtgatacccacaagttggccaagtggtggcgcatg

SEQ ID NO: 29106 - DNA, 4185 bp, Cannabis sativa
aatcatagtgtggaagattgtgaagaattctatcactaaaggagatccaagttcaaatattggctatactctaagacagaaaggaatgagggttacaaatctgaacgaaggaaaccattatattctactgccactaatgtaaatttttttacaactttatatgtatttattttattattttaggaaattcatctttaggatgttcgattatagaatataatcaaacatacatgttagtaaatctacatcctggtaaaataagttccaacagactcttacgtcatcattgccttcaaattaccattcagggtctaaaccatcaccaaaatcatcatgaaaggaaattcgtgctacaatgtcagttatcgacatcatattatttaactcaagtaacacatcggtcaccaatacctccgaattcatttatagaacgaaactcccaatctcactacgattttccttaatagtacttagattgggactaggatcggtacagacattcttcttcaccaaagtcacaaaaaagggaataaatattagaatatctgtctagtttagtttaagtctttttactaattctgttactggtgtcagtaggctgttaatacagttttattatcttagttgttagctggtgcttctccttgttttgtggagtttattaagtcggtttccctgttttataggttaggttgtttttcctttattgtaattgctatatatagccttctttccttgtacagctcattcaatcaatatacagactttctttttcattttcttcattcgcattaataaattcatctgacttcttcataagcatagacaaaaataatcttacacgcttatcgtttctaataacttcaaggcgatacattaagtctttcatgtacttgttattcacttctaatttcaagtcatactacactttgtcaacatcgatttctttgtacaaaagatcaaccaaatgtgagtaggttacattcgtatcaatctcgaatgccaaatttttggctcggttacaaactcaatttctaccctcaagctctcaaacaacattatacataacaatgcaaaaacagttgaacttgtcacagacattaaaaaaacacaactaaaaatttagaacaaaaatctaaaaaaaaaaagttataaaaagccctcaaaagccataaatctatcaagcatcggaccccatcgagctactatcgggcccattatccctgtccctaggtccacaatgacaatcggactagcatcgagccctgcctttaggtccaagttgaccattggactagcatcgggtcatcatccctgtccttagatctaagaaccccatcggactagcatcgagccccattggactagacgaaaaaaaatgcaaaaaccagacaacaaccatttcaacacaaaatatgaaaaaacagcaacaatccacaaatcaatcatgaaacaacattctaaactaattataagaagcaataacaaacaaaaaaaaattacttacccattgattgttgcccaagtttgttcggtgctgcgagaatggagtctcacaccaaaactccctaacttttagtactttgtagtagcttgaagagatcaattgtatactaaaaataaaatttaagtgtaaattggttagagagaatgggagaaaataaggttttgatagaagagagtgaatagaggaagagaagggacggctaaaagggtgaggagtgtatacaggagcattttgaatactcaaacataatgtatacccatcaatatgtattaatattggcctagtttttcatttttcaattaatatatgcataaaaattaaaattccagaagtaaaataatttttttattctttataatgatactttgagagttcaaataatttaaaatgaacaagttttatttccagttacttcaccaaaaacaaccagattaaacaaacacttccaatccactcttgacaaccttttaataatttgattcttagctcgaagactttggtacgtaacaagcttttaaccttaaaatacttgaaaaatatgtaatagcctatgagcatgtagtttgacatatcctttaatcttaattttggtagaatataatttttttgtacacctacctaagaattcctaggtgcattgttgatattgaccacgtacccctctaccaaaatttctagagctttaacgacttttactttaattataaaattttcaacccatttcttgtactacttggtatgttactagactaatttttttaaaaaaaatattattattattattcttaagagttcatgttcatccaaagttctcacttaattttaaaattttcccatccataatgtaaaaggtagttactttaaaagctttaaatcaaccaccaaagtgaaaaagagtattcttcaacaaacaaaaaaaggtcaaaaaagtaaaagttctgcatctactccggccctaaaacaccttgcacccaaattttggttgtaacatgcaacatgcaacatggcatcatgatattcacctaaaattactgacttagaatgccactaaaaatagacaaatgaaaagttaaaaagtaaaagctacattaatgttagtgcttttgtttggctttggactttaatggatattatgagattggttcaatcaaacagaaaatacaatgtttgacattattgctttttagtaaagaatatatgtattaaaaataaaagcagcagttgaaacctatagcagtgagatcactaatttaaataggaagaataaaaaattgaaccaccattttagacttccctaagattaatatgatcttcaaagagaaaaagatagtacatgcaataactacataaatatccacagcaactgtatgttacaccaatgataatagcatgacatacaatatagttttcaatacaaattgcttttaaaaggaagtgcagcatcagatgggaaaaccaaagttaagcccttcttctcccctacaatcttgggtaattggtagccagtaataatctcctgtttaacatagcaaaatgatggctctaactaaagttacctagtttaatgggtgggtatgggtactagaggagtatagacaaaactatcatgcaatgcaagggattgacattcccaagcatcgaaaatggcatcccaaaaagggaaaatatggcaggggagggttcttagaaagcaggtatccgtattaacaggggaaaagtattggggaagggtctcttcgcaacttaccgtccaccagatcaagtttcttcatcttctcctcacaccaaactagctgctcattcgtaatcttcaccattctaaggaccctcgacacgactttgacatcgattaagccaaacaacaacggaacatcttcttgtatcaatggccatgacctctttttccaacctctccttttcttgcgcagttccttgagcttcatctctttctgcattacagaaagacaaatagcagggtcccattatgagactttcgcttaacaaaactaatgcaataaacatttgcttaacatctacacttgttctgagtacataaactcccatctatgttttagtgacgtattagcaagtggatacaatatcttaaagttatgccactagcttaaaccctgacctcagatatatactttactaactatgtcaatgatgccacttactttctatatgtttatggagaataatgaatgtccattagagaataaagtaacccataagttgcaagattcaaaactaattcagatagctcagttttttccatttaaaatattagaatccatcttatattgctgcttaagccaagaggatattacagcattaaacaatctgaataatcaccattcaaccccaaaatgcctacgctaaaacgcatggcataccaggactaatgaaattgaatagatggtataccaggatttactggttattccttttaaaaccttgataaattagaggaacgaaaaatcttgtagtacaaaaagcttaggtggcgtttagttggaggtaatgaaatagaatggaatgaaaaggaaacacttttcattctattcttttatttggttgcatattaaagtatccgaatgttattccattttttcactattttcatgaaatgactattctattttcaaatagaaggaaagaccgttccaatgcatgat

SEQ ID NO: 29107 - DNA, 2488 bp, Cannabis sativa
tgtaaaataataagtaatagacatgtagttttttacgtggttcaggcgttaattatccttagtccacgagttcattttattagccttataggcaaaggttgtatattacaagtgtttacaatatgaacatttactctctattcttctcatttatctcttaaagaagaagcttattggaattttagcagaggttttgtaggttgagagatgtcctctcccttgtacatgaaatatatggggtatttataggagatttcttgatcaacatgatctcagggccaaccttattataagagatttgaccatcgatttagtagatggccactccattgtacggttggctgagataatggctagtaccgttcgaacattccataaaagtcacctaaaggtcttttctttaagaatcaacctcttgaatggccactagacaatgggtaggtacaatggtgaacatgcattgtactatggcctaacatgggggactaaaactaacgttgcactagaaaaagcattgccatcacttcagttgtctgacaagtacggacggtggccttctgtgacaccatatagaagtaaaacccatcctaagtcttttcactacttacatggatgtgctcgaggagggccttggctttcgttagttccttttaaattcagaagcaacacttttccttctgcacccaagaataagagatgtcacgcacattgattctccacgtcccaagccttgtgacggatgtgcctttgcggaagctagggctaaaagaactaattagttaaagattaacttggcttctttctttggattccacgtgtcatgcttacaaaaatccagacaacatttactcccaagctttcgggacgctgcgtagtgtgggagcttgtagtgtttccccattttctcatgattaattcctaacatgtggtgccacttgagattgctttatgtcacgcaaatggtcgtcaactagtacatcgctaatagtgggtatcattagtatggtaaactggcaacggtctaaatgtagcttctgccagtacgcgtgtgcagggcgcgtgtctcaagagacgttgaaatggaagcaagttaattgagcagactcttcatttaacaagcactcttcatgagaaatccataaatgatgttaaacattttgggctgatactgttttctcaactccccatctctcagatccttagatgctactctggtgaatgatctgggtcgtttccttcaagtggaaggaacttcacttagcacgtatcaaatgcctagagcttcctcactgccttttgagtttcaaaattttcattctttccaccaggggttttacatcttgatttaactcactctttattggacaatactcagtcaatcaagctatcctcaatttcacacgttaccaaacacgacgtagtcaagtcgctcctcacgacatctttttccaccactcatcatcactcaataagtactttattgctcttgttggttgcatacaacttcatgcttaaggtaaaaatactgagtttgaacttaatttggtgtgtaccgtatgttcggttgatagtgtcgcttgtggaagtatattgttaatgttgtcccatgtgtgagtctctgtactctgtaagtgtcagtcttattcgaacgatctgctgtaaaaagagaagcgtggtggtttaatagggtgatagtgtatcgaggggctactaatttaggtggagaggttggcccatcccctcatacactgccgaaggttgatcaccgcgtgctggacaaattgtttcaactgactttgttattctgagttgactcatttaagcccacactaaccattcttgcaggtgcttcttggtttaacatgctgggctcaaggaaggaaatggattcttcaaaagccggtggtgaaagaagtccttgaaggaagaggaaaagaaaggacactactttctacactggggcttccaatgcatcttcattcgctctagagtgtcatggatactacccacaatgacataatcaactaccacggcggggtcaggcctacccacaccaaccatcttctctcctaaaaatttcttctatgggtttcctatttcccatgaaaatcgtacctctcaatcatgctgctatgcagagaataaggaaaattcaaagggcttttgaagaacaacttgaggaggagaagaggtttttgtgtaggtacgccaacatactcttggccgtgaagagggccgagagtttagaggggctctttgcctcaatcccaaccgggccagcagtcgacgttgaggctttggagaaacgtgtggcacccaaagtgggaagttaagctgcaccctttgcagcagaacttttggatcgagtggttggaaatgcatccaagctgcccttggagacctagaaactacatgtagatgggtcagctatagatcagctatctggtgcaggaattgcccttgtcatgcctggggggcaacacctgca

SEQ ID NO: 29108 - DNA, 2879 bp, Cannabis sativa
tcagaatcaaataatcgtacattattcacatatttaaatttgaatcattacatatattcaaaaataataaatatcaatgtaaagagatataattaccatcctaacaataataattatagtcattactttataaagtaattattttcaccacttatcgagcaaagtaacctcaatacctcacctaacatactaatgcacttgctgttatttagtaaaattaccctgatattcagaactgataatccaatgttttatttaggaatataactaaacaataatattctaatagtcatataacatatcaagtcatatttatcattttataaaataactatcattattgttgcctaataacctaataatacaacttcagtgtcctcacttagcacccatatatcacattatctaataaggcatgtcaataccctaacctgacacccatatatgacattatctaatcagacaagttgatgccctaacctggcatccatatatctctgtcattgtctaatcaaacaatcgacaagtaaaaaaacctaacaacgattcctgtttttagtcatgactttcgatgcctaacccttcggtatccaaatattgttacctaataagacaatccttttatcattgtctaattagacaatctttacatcattgtctaataagataatcttttttttattattgtctaataagacaatattttttacattacataatagtaatcaccgtatcttaatcacgatatcaatcgattcacaaacgataatagttgtgtctcaacataacatgctatgtagcacaaatgtacttttcttacctttaatccagattcatacatgtcggccaactcaagtggagaaacacccaaaaatcttggtcctatgtcacaacgacagtaagctagtaagtgtctattccaaaacactgcctaatacttacataaaataatctaggattttctatcgaacctcttggtaagaacgccctaaaataaaatacatatttggctctaaaacatataccatattgtagagctcgttgcaagctttgaaacaatatataaaaggtctacaatggacactcgagtgaaaagttatggccagaatctaaaattcggcatttctcgaaaactgaccaaacaaaattctggttggtaccattcggaattcggattcgtaccatccggaattctggttctgaacaatttgaaacacaaattttctcaacttaaaaccctccaaactaactccaaatctaaccaaataattccaaacttcactaaacatttatataacatccataaaaaatccaacgaaacagaactcaaaatcatgctcttaatgaaaagtgtcattaaaagcttaagctttgagctttaaaaactcaaagttgacttcacctctctatagcattaaaacttatcaaatgagcattcaaaacacttctaatctaacccagaaacaaaaccaaaaacttacttaaaccccaacaactatagagccaaagtcaaccaccaacctaaagcttttcatgaaagaaagaaagtcaaaacatacctcaaacttctacttcaacttagcttaatcctaatagctattagaggtgtagaggagctgattcttgacagaagaaatcaaagaaattggccccttcttgtttggttttggctagcttgagagaagaaagagaaagagaggtgaagaggggttttcttttatttttttcaagcttatcatatatatatatatatatacatgtaaactttagttataataataataatatatacacgtaactttagttaaaaaaatattttatcatttcttaaccactaagaaatttctaaccctatggctcacattatatccacatattctaaataaatctctgtaattaataaattacgcttatttatccacatatgacaaaatttatgatttatactgaattagattatcaggatcataatcctactcattattctctaattaatcccataatatataataaaccctaattattcacaattattaggtttccaagatattaaaacaaccatccccaccttataaaaattttgtccttaaaattaacctaaacaactcgggatactgctcccgcatttacgactctaactctcaagttgcttcttccaccttattgtttctctacaacactttaactagtggaattggcttattccaaagtactttctcttcccaatccaaaacctggacaagctattcttcatataataaatctttctgaagctcaaaattgtcaaagctcaaaatatgcatggagatatgaaacacattatacaccccaaacaatgcaggagttaaagctagctcctaggccatctagcttacttactccagtaccaaaaggtctaacaaatttaaggtttaacttccctttctacgtacccctttcatagttgatacatagagaaatacaatatctcccacttggaacttgatatttctacgctttgaattggcatagtttttttgtgtattcaataaggtgagcatacaactccaattcattaaatggccttataagttctttggatcttttcggtccatcatatttttctctcacctgcttcattcaaatgaataagtgtacaatacttctctcataccacatttcttaaagtgcctaattaatggtacatttagttattacttttaaacaaacactacgtcggagagggagattattccaagatactctaacctttatcatatatgcgtgcaacatattttcaaatatcttattaatccttttgacaattcacctatttaagaatacaagttgtgctattttttctttaatatgtataattctcaataaccatctttaactct

SEQ ID NO: 29109 - DNA, 3034 bp, Cannabis sativa
cttgacttttctttgtgcaggctacaagaaggcatctaactaagaggatcgaaagcttgaatgggaagctggaggaggagaaagaaacaactctgctaatctcaaatgacgtatggaattctctttataagtaatactcattattgtcaaataaagatacaaatggtgtttctataaatagaacaaataactgctctacaataggaccaatagaatttaagaccagttactttacacatttatccaagttcatcctttcttaaaatattccacctatggtgtgagtttctcttgcatattctaatccctctcaaccacattaatttatggtacgtaaaactatgagcaccttgggtgaggtaaagagtaattaatgaaacaaagggataatactggaaagatgcaatccacttgcttctgcctacagctaaagtggggaactttctttgcatacaggtgaataaagtgatgtcaaatgtttctcaaattggggttgatgttgaaataattcgtcaaataatgtcagagatggtaagttgttgattattattattttttttttctgtttctatttaacatgtcaatttgttgaagctgtgcaattactcattttgtacatgcaaaccaactaaacaggaagggagacttgaggtttttgagaccaaacaggtaatttatcattactatttgtttatatgccataaaagtaccttttttttttttcaaattgcagcattacgaatttgtattgatttatttactttccaattttttttcgtcaacatcatacaggatgtgactaacttaggtctctggcatctatgccaagcagctgaaggtttccaagaaagagtggatgttaaacctatacaggtgagatattatatctctgaaacagaattcaattctggataagccgggtctcatatcatttagtttatttcattttgtggcaggatgtatgtgcaaagccagccaagaattccggaataaaatttgaggacaaatcactcaaggtaattgaagcctctttctttcgtcaataacccgccattttccatttgtttatgacatgatcgtatggcaatgctgaattcagggccttcaattccttactgaaagtaaagagccaattactgtgaagaaattgacaaaaagcacggataaagatgatgcactcaacaacttcattggagaaaaggtaccactaaagaaaacaagtatacatagaacatatcctgttggtatttctttgacaagagactttttaggctctgttctgtgaaaatcttgccatatttggtttattattcttcccccacaagaaaaaaaaaaaaaaaaagaccaaagagccctcttcctgactgattttgagaacttgggatttttgttgatgggaaataagtcccaacttacggagaaacctgtgtagtttttctgacttgttcatattaagaagtattcaacattttcattattctttccctgtaatcgggaaaatacatagcaaatgcaatataatatatttttataaggtgagggatttgaatgtaaaacctcaacattaaagtggggttatgtaagggactactacgtgtagttaatgttgtgcgtgaagaataaagcgccttgacatggaaatggaatgttattccgacaatgaattttatattgtttatcagagtgaattttatatatctagaatttatacggatctttagttaatttataaaagggataatatcattttggaatctgtgttttataaaaattactgacgaacagatgctgtaaatgtaattagttttgtcataatattttcagatcgagttattattaggggtgtttataaaatatccgatccaatctaattcacaaagtgtggatatttgcacttatgtagatggattggattggaaaacttaaaattcgcacttttacagattagatgttgattgatatgtaacagtaatagatccaatccaattaatattttaatgcaaaaaaatagtaatttaagaatctaatacatataaatatattttaaaacttaattgagtaaattcatattctatattatatatagcatagcagaaatataatttgagtaattatttttttctatatataatttttttatttgaatttattattttatttattttaatttatttttggagacataaaagaataataatttgttttgtttttgttgttagttatgtgaaaaaataaaatagcttaatattaaaaagtaaccaattcagttcccatttttgcggattggattagattggatttgagctattgtgccgatcagattggatttgatctaaaatataaaattcgcactgagtgtgaatcggatgcactatgagtgaaatagtgcaaattggattggatgaacactccttgttattattaagttttattttgaaatagaattaatttagggtactattttgaaaaatacagggttcaatttgttatttatcaaaatagagagtccaatcagtagtaaaatacatggtctaaaatgatatttattatcctctataaaataaataaataatattttaattattatattccttttttttttgaagaattagtattaatttttacctcgtgaactttttacactaccaagttgtgtttcttatagtatacgacctgttaattttatcatattttatttaattttatccttaaaaaagtgatgtaatgagtgataattgataaatagatagaaaataaatatctttcacatttttaattttaatttttagaaaactaacataaaaatataaattatattattataaaaaatcttttattctattattttgaaaagaaaagggtgaaaaatatttaatttgcatttgtttattaactaccatccaacacttaactcatttcgataaaaattgaataaaatgtgatggaaggattacattattgtaaaagttatatttcgaatggtattattaacaatgttaacctggaaacttttcctggtgatgtggacatcaat

SEQ ID NO: 29110 - DNA, 1951 bp, Cannabis sativa
  modified_base (1660)..(1665): a, c, t, g, unknown or other
taacatcctattcaagcaagccctacttagaatgggcttaactttagataacctatgacaatggacacaactcatgtatggtttcagcagagtttacattcttccatgtggaaatatcaaactgccacttattgttggaaatgccccaaagaagaccaccatcatggccacgttcatagtggtggacgtgaagtctccgtacaacataatgctcggaagggctgtcctttatgacctttgagccatctcctcagtatatcatttttccattaagttcccaacggcagatggtatccattgtctctttagaaatcaaggaacaacccacgagtgctataatgcatcattatcactttccaagaagacctcctctactgctacagctttgaaggggacgaacaagacctcctctactgctatggcaccaagggggacgtgcacaacctctcctacaaaatctagagagatcacaaaggccttcagagatcaaactacagagaagacggagatgatacctaaagccacttaaaggtgcgctcaagacggagatgacattgaccttcattttacggatatggacttgggagtttgtctaacctaggaactcagagaacttcccctcaacacattagacccgacaaggttatcaagaatggaacaaacctgtcagaggtcttgagggagatgctcatggcttgcctcaggagaaatcaagacatctttgcttcgtcacatgagggcgtgataaggatcgacccccaggtcatctgtcatgccctcaacattgaaaaagttaacttctagcctgtgcaacataaatgtaggctccttgaaaaagagcattctaaagctctcaaggaagaagttgaaagactatgggagaacaacttcattagggaagctttctaccaagtttgggtatccaaccctattctcgtgcctaagctgaatggaaggtggagaacatgcattgacttcaccgacctcaacaaagcatgccctaaatattgtttcccattacgacaaaattaatcaactagtggacgccacagtcgaccatgaagtcctcacattcatggatgcctattccggctacaaccagattagcatgcacgcactagacaaaaaacatacaagtttctgaactggaatcgggatttactgctacaatgtaatgcccctcagacttaagaatgcaggtgaaacttatcaaagactagttaactgtattttccacaatcaaattggaaacaatatggaagtttacatcgatgatatattggttaagctaaaaatatctgaagaccacattaaagatctagtggagtgcttcaacatcctacaaaaatattgaatgaagctcaaccctctaaaatgtgccttcggcgtctaggaaagtttcttagattcattgtcagctcaagaggtattgaagagaatcaagaaaagatcatggccttgcaagacatgaagtcaccattaaagataaaagacgtgtaaagcctaacaggacaaattgctgcacttagcaggttcatctccaaatcaacagacaagtgtgttcccttctttaatttacttaaaggaagaaataaagggtttgaatggactaatgaatgtgagcactactacaatttggccttttagtgacactatttannnnnncgcacaaaagtgcgggtcactaaatagataggagtaatttttagtgacatgcacgattagactctaaatgttcagtgttagtctcttgcaatgtgtgtcactgaaaatatagagtgtcaataaagatttaaatctattttttatttttattcttattaatttgaaaaattgagtcttatagtgacatgccaagcgcgagtgggtaaatgtaccctgacacacctggcgcgtcactatatcaataccctaatttttttttttaaaaaaaaccacagctgtaatttaa

SEQ ID NO: 29111 - DNA, 2551 bp, Cannabis sativa
catgaacttaagcgctcctgagcccaagtacaagattcactaaatggttaaaaacgttctcaacgaaagtacgaccgttgtaccatatacactgaagtaccgactccatactagtgttggtagggccattattgtacttccaggagttactgagtgttgtaccacatgcagtcccataatactcgtgttggtaacaccgtaactacccctaaataacctacattgtactagcacacttagtactacaactattctagtgttagtactgtaaacaataataacatgcattcatacattcacatatatttttatgctaatcttacctcgtttccgtgctcaggtgtgtcggttagcctgagtggaacagcagctcgacgctttatagggccctatatcacaatatccgtagttcttatgagagacatgctaaaacacttttcggagacttaaaattaaactcaagatttccttatcgatgaataacatggtaatgccctaaatataacaaaaacagaaaaaactatagttcacaaaattgtctcaactagtaggccggttccccaactgaaattctggttcggtggggtttccttgggaccaaccggtggaccggttcctacaggtcccccttaactggaattccggctcagtgcaggatccaccaaaatcacccccaacttctcaatttaaccccaaatctcacaacaacttccagattgcatataccataataaacttaaaacaagcaataaacctcaacaattcactcaaaaatccaaaacacaattagagagcaaagtttgagttttcaaactcaaaccttgctcaagcattcccacaaccaacaatactagcacaattcaacctaaataacctcaatttaacctctaaacacaagtccaaacatcaattgacactatagcaccctaacaccaaaaattaatgcaactcaactaaaacttaagaagacaaggaatagatatgctataatggtataccttagattgaaacacctaaatcctactataatccctagaattgcagctgaaaatccttctctttcatgttggttcttggtgattcgaaagagaaagagagttgtagagaaattataggtttttctaaggttatgttaatctaatatcaattaatcaaatttgtttattaaatctgaatattaatgtccacaaaagacaaaaatcccatagtaaaaaaactaatatgccccttaacatttacaaaaagcttaatgacatctaaaggtaatttggtcatttccaaaccccaacaatttctcaatgttttcaatgcctaacaatgatgtcccgctatcaataaaattctaaatcatatgaaaatgtgattctctaaccacccaacgttgcgtttcactgctgtcggacaaaaacacaaaaaacaagaaattcacatatatagaataattaacacattctaaatttaaataaatcaccacaaatgcgtaaatcatgattaataacttaatttcataattaaatcttaattatttaatattccaccatatccacgttaagcggtctttacaacttgagattgtgtcgtgctttcagcagatgagccttatgatggatagaatcgttagaggtgaagaaaaaaatataaaagattacagcatagtaatgtgtactttcccagccatacaccacaatgaggcccgaaaaaaaatgtcatcggagcattgtcggtgtgcaccggagctggagaaggaagagacgttgttgtcactgcctaagaggaaagatttgtgggatatagtgctggagaagaaccaatagctagagacgccgtcggagaagaagctcttctctcctttgaacacctcttgtgatagagatgctctcaacttgtcttctctaagttgggcagaagttcttagctggcagggacagattcaagcacaaaacttcgacttggtccacgtgagagacattcaccagcaatgtcagtgggagagaatggaccgtggcaccaaatttctataaatattaatttgagaataacgatcaaaaaactgagagaaccagctttggacaagaatagtcaggtggagtaagagataaatccatgttgccactaaatttacactctacaatttggatacaactatcagttaaagaagttgcactcgtcactgttagttgtggcttatctacataagcttgccacatcttatcatccaatcggttactcaagctctttttgcttggtcattttatgttagattgtttgaaagatttcaaaagaacttgtacaatagattgcagaagtatcacttgcaaagttggacatttaatagcaggtggcaaacatttctcttttatgcttatgcaaccagtgtgcctcccttgcactaggcttctatttttggggttgaggaacaaggtttgagacaggctataaggagtttatttttagatgccaagccttaccctgttcagtttcatatcctaaaagttgtgttggtgctgtcacgacccgagccttaggtcgtgatagatatttaatatccata

SEQ ID NO: 29112 - DNA, 2110 bp, Cannabis sativa
tacttattattgttaatcagttgaaaagttttgatttatgacaaaaaagaaataacctgatataaaaaaaaaatggtcaaataaaattacatgtgttaatatacaatggatcccacatgttttcctatatattggattttttttttaaagaaaaattacaattaagtgattgaaccttctgctcactcttttattataaattgtatttatcaaattaaattaatataattaaaatactatcttagacgaaaatatgagtggctataaaatcttcactttcaataattaaaatatgttccaaataatgatgccttatatatcgttgaatttctatttgcaattgcaacacgtttcaaatatttttctctttcagttttattgcgtggcccaaatgagaatatagttaaaaatgaataaataaataacgaaaaagacttccacttccttccacctgatgaaaaaagaagtacataaatatatctcatctatcatcgtcgatcattaaaaacttccaaaaaagaataagagcaaaaaaaaaaaaaaacttcaaaaaaaaaaaaaagaaataaagaacaaagaaaaagcatatagctatttttttacaatatatcaaaaggaaaggggaaataaaacacattgaataaaaaatgttaccaaaactttcaaacaaaaaattgttaataagaatattctatggttacaaactaattttctctttttaacaaaatgatacagtaattaattatgtctgaatatgtattgtacatagtattattatatagagaattgctaaaaattactgcctaatactttttttttagtagtatgttgttattaatataattaagtatttgttataattatataatttaagaatataattttttagaaaatattgttaactaatgtaaaagttatttaaaaaaaaatattgaacaccactaatacacaataacagtattatttattatgtattccttgttgttgtaaataatttaataatttgatgaacaaattaaatatatatgttacgatacaaaaagtaaagtgtataattattagattctatatacaaatataattgaaaataatataaattaatagggagaataaattaaatgtgattttacatacccaaaattagtaactccaaagagaaagccttggtgagaaatggttttctgaaggcttctaagcttagaaaaaacctcacggcctttggcgtaagagcttccaaaacagactctagagataacgtcagcggagacgcctctcaaatcctcatctactttaatctcagccgtcgatccaccttgtgattcaatacactcttcccattttttgagcattggctcagctgactccagcattagacccaccatttcctgcgccccctcacatcgtatatatataattaattatttattttgtatttatatatacatattatatgataacatgcatgcataatggtccaaaaatgggatcaaccccattatattattattttttgaaacaatagccctactactatacaatcagataattatttggtcccaacattcattattattctacgcttttcctagaagtttcaagatctacatatgtgtattatttccaaaaaaaaaaaattaaaaacttaattaatatttttattttattatcttaaaagacaagggacccgactacataagagttaaaatatataatacacaaaatatgagttttgaaaacagagtgggactatataggaaagtataagaatcgaatattcgttaaaaaatgagaattttatttagcgagggatcccaagtgcttagtgaatatacattaagcaatggtaaggagcgtaattactaattagactaataatatggaaagtgtagtgtgttattcatcataattcttttgttgtggcaaacttaaatacaactttttagtcacaccaacaattctttgtttaactatatatgttgtggctagaaaaattgtcacagtaaatgatactttaatttgtactgttaaggtgttaaatacaagtcattataattatactgattaatattatattatcattattagctacataccttgactttgtccatga

SEQ ID NO: 29113 - DNA, 2753 bp, Cannabis sativa
aaaaatggaaaatatgtaagagaagtcaaattgatataactttccaaaagaaaaacgaatcctgtacaacagtataagtagcaaacttcaactatatcattcttaaatcaaagttgtttccaatgatttcaattattgaacatgattttgggacaaaaaggtgagagcctttccaaacagagaataggagagatcccgaatgtcaaattgcagacttgtttattaaaaagaggacaactcacatgaagaatgcaattggtaaggggaaaaaatggtgaaataatgatacatgaaaaaatagcttcatacctagaccagcaagaggttcatccaatatcaataaatctggtatttgcacctgaaaataatttagaaaacacactaatcaatcgtataaaacatgtgatcaagtgtctttgatatttttatagtgcatgccaacaaagaaagtttaaattatggtccttactaattgaattgccaatgcgagtcggcgtttgtagccaccactaagagactgaggatctttatccaataagatcccatttaaaccaacctatagtcacaaattaaaaaatggaaccgagtacatacttgaattgaaatcacatatgatatcttaacaataactattttataattaggaaaattctcagattctgtttgttatacactagctggaacatatacccaattaattgcttgttgaagtcgcaaagcaagatgctccttcacttgaagatcagccttttgtctcggccatccaaaggtaacttcatcaaacacattatctgccacgaaatacctatatcagtagattgaaaacaataatgttagtactgtatgagttatagacacaacaacacacaataaataagaacacaatcttgtaattatgcacacaaatcaaaaagattaagcaacaattaatcatataaattaaaccttttgcacataactgagtaccacaaaagtaatagttctgattattgaacttaatcaaaaataagtaatggaagggtcaaccacctcaactagtaaattattagtgccttcacccaccttaattagttgtgtttttttcccttcttgttatttgactcagcccctaattttatatatggaatctcataattattgtactatatcaaaaaaacacatggagtagcattactaatttataattagacagaagtccgagctagaaacaatttcattgaatcttggtttagttaggtgatcagaacaatgaaaaaataatggcttggataaaaaaaagtgtgctccaaaatcaaaatacacatacaatttcaacattatagaactcagacactacaagtgcaaaattatgtaataattccaatattcatatcctgatacaacaacctaaaagaacaaagattgtaaccaatactgaaaaatatatctattacctctcaggaaattgaaagacaatcccaactctttctgaaggtaaaggttctggaggttgactaggatggccgtcatttccatatctttggatgcaaatggaaccagaagtaggtttacttagtcctgcaagaagctggaagaaataaaagagcatcagaaacacacaaaacagaactaaaacaaatggaccaatgaaagatattagacctgcaagagagtagttttcccactaccactccttccaaagattaaaccaaaactgcaaacattaaacaaggataataatctatgattgcaaagcttgctgtaactgtcacataaatgatgaatttcactttcatatcaaaagccaaaagagcattgctatgagtcacaagtagtgggtggccccttataaatagttaatgatattctataataactattaaattgaattgtatggagtgatgctaggtacctggtgccttttagcatttctagagccaaaaaaatacaaatatcagcagatagcattgtgtaccttttctccggaagtgaaaagctaacttcatttagaaggctgtgttgagtccctgggggctgataactgacacccttaaccttaaatcaagattagacttgggtcaaatataaagcaatactccttaatagttattacattactaaattacttacgatcccatattaaattctactaataacgataaagacatcagcattactggtgcattttagcattttgcacaattctcttatccagtcccaatgaacacattcaaaactgaaagaaaaaagaattgttttctcgcaacgaatgtaattcaatatttataacaaataaattaaaagagaggatactcacttcaaagcaagagtagtcgcatttgattgtgaaagactttgattttctgaaattcaaactgcaaaaagaaagaagaagaaaaaaaattgattgatagcttaattggtgaaattaaaaatcttttgttgaaaaattagatgatgattgccttgagattgttgtgggaaggaaggaaattgatgggtcaggctctttcaaaccattaaagaatttaaaacccgaaacgctgctagtgctcaccatgctcacttaaatcccttctcaacacaaggattttgggctcttactgaaactcaacaatgagaaaacataataatagtaaataaattgataactggaagcatcttagctatgtttgggggaaggatggtgagttttacaaaaatggggagtaggactaggagggatgtaattgatttttttttttttgtcaagtgaaaattttatttattttaaa

SEQ ID NO: 29114 - DNA, 2107 bp, Cannabis sativa
attgaggaagacccaaatatttacagataaagggcctatcttcaagactaaaagtattgaaaaaaagagtacggatgttaggttaacgttgggtattgggagagaaaagaatggaagattttgagaaattaaaaacttcctgaagccctagagtaagtatcaaaaacttcttgaagagcagaacaagaggtacgattagcagcacaaaaaacaagactatcatccgcaaagaacaaatgggaaatggcaggagcagacctagcaatagcaataccatttagaaaaccagcatcctgcttgttcctaagaagagcagataaaccttctgcacaaagaataaaaagataaggagaaagaggatctccttgtctaatccccctagaaggttttatagattgactaacagaaccattgattaaaaaagagagcgtggtagtagaaatacatttcataaccagagaaacaaacctaggaggaaaattgaaatggaacataacactctcaaagtaatgccaatccacactgtcaaaagctttagccatgtcaagcttaagagcagcccaaccaaccttaccacttttacgagaattaatagcatgcacaatttcttgagcaataaggatattatcaaaaatgactcgaccaaacacaaaagcactttgaaacggagagattattttattcaacacaactttcaacctattagccaaactttttgaaataaccttgtacaaagttgtacaaagacttattgggcgaaaatctttcagagtttgggcatgctgctttttagggattaaagaaatgagagtggaattaatttgagtaaaatcagtacccccatttagacaagaaagaacatcctggactaaatcagatcccaaagtggaccaatttttctgataaaaataagcattaagaccatcaagcccaggggctttatccccagaaagactgaaaacggccttcctaatttctaaaacagaaaaaggctcatccaggaaagcgtaatcagcatcctctagaggaggaccaagacaatccagaatttgacatgtggcttcagcatcacacccctcagcgcaaaacaaatcacgaaaataagaaaccaccatgttacaaatagcatcatgatcagagacaatgctatcatgatcatccttaataaatttaatggtgttattcttttttctctgagaggcaaaacggtgaaaaaacttagtgtttttatcaccagccttaagccaatgagtacgagcccgctgtctctaataaatttcttccttataaagaagagcatcaagctgggattgaagacactggacacgaaactgatcatccctagtataagtggaaatgtcctgagacctagaaatttcattttggatatcagagatacgagatttaagggagaaattggctactttgttccaagatttaagagcagaaatacagagatcatgcttggacagaaaaccatgaaaaggaccagaaagattcagactagtagtaccactgtcccaagaagttttgacaacagaagaaaattcaggattttcaagccaaacattctcaaaatgaaaacgccctttcctcctacaataagaactgaggctttgatcatcaaggagtagctttaaagcacggtgatcagacccataaaaagaaagatgatgcaaaactgcattaggaaaaagagcacacgaagaatctgaaccaacggcccaatcaattcgttaacagacacatcgattgggccaagtaaatttattgcccacaaaagaaagaggagaaagactaaacttggttaaaaagttggaaaaatcatccatatccttatgattataataagtgctaccaattttatcatcatatgataagaaactattgaaatcccccataattaaccaaggcaagttcggagcagtatgaaaaattttgtcaaggagattccaagttaaatgcctttgagatgaaataggagaaccataaaccagtaaaatgaaacatatcattatcattaatgcaaatattacaatcaatatgattacatgaaaaggtgagaatattaacaaaaacatagtctttccacaaaagtataagtccc

SEQ ID NO: 29115 - DNA, 2930 bp, Cannabis sativa
  modified_base (617)..(628): a, c, t, g, unknown or other
  modified_base (1648)..(1652): a, c, t, g, unknown or other
tgaacactctatgtttttacaaatgaaacactcttctcataaagaaagatatgaaaatatgagactagaagagatgaaaacgtttggtgtgttttctatatattttagatatttatcatcatatatgtaataatattttgttttttagtgtttcgtgcccattgtatgtgatataagttactattttgttgctttttgatatataagtatacataattgtaaaagttctaatttattgctcttaattatgctattatatatacacttctgtttttaagaaaagtaaaagagatgaattaccatgtaatatataatatatataatataatatgaatgaaaaatatatatatataaatatatatacactcactcacaatcttaattataaattagtgaggatcatcataagtacttgaacaaggtattatcacatttgtccaaaaatttattttttatatctctaagcactaagagaactctcataaaaatagttttgagaatcatcaagtttcttagggtttctagcaaaatactttgttgatagaaatttatgttatattactttataatataataagtatagattaaaatatgataaatatattattatgtgaatnnnnnnnnnnnngtgtatggtaaataaatgtgtaatctattattttataacctacactacttttgtaacctacatgttgtaacttttgtaacctacatgttgtaactcttgtattgatcacacattattagtgtaataaaatggttattgttacacaattcgatttaaggaattcaaaattatgatgatatagttgttacaaaatggattaatactcatttatgggagagaaatgatgtgtgtattttgaattctaagtgtgatcacctaaacattataaaaggacgtctttggtgctcatttgagagagaacaagttttctattaagaaagcactttgctagaaaaccctaaaagccttgattattcacaaaactatttcctagagagttctcttagtgcttagagataggggaaataagcttttggataaaggtgcaataccttgttcaagtcatggtgattcccactaagctacactcaaggttgtgagtgagtgtatacatatatattattctcttgttatatatatatatattatattatatgtgttgtattttcttcttctatatttcatatatatatgtgatatatatagtgtattgtatattatgtattgtaatatttatttaatctctttgttgatccttgtattatattgcaatagagttgtaatatcttgattttttccattgtaataatatctctaagaatttcgtctttcaaatgagcactaattaaagacctctttttatagtatttaggttatcacacttagaattcaaacacactacatatcatttctctcacataaatgagtattaatccattttgtaataactatatcatcatagttttaaatttttaaaattaaattgtgtaacaatctttttattacactaatcatgtgtgatcaatacgagagtaattacaagtgacaacaaattataagtcctttctaagttacaacatgtaggttacaaagtgtaggttaaaaccatatgttatacatttatttaccatacacttaatnnnnnttattcacataataatatatttactacgtttttatctatactttattatattatcaaataatataacaccaatgtgatgcattctgaataattagcagctttctatattatttattaaattaaaatgtgtgaaattcgattttaatttgtactaataatagcatgctacatgatgtttgacacaatttttcatatattcaagatccataggaattaatcaagtaaaggacaaagtagtcgttttattagagtaagtcccacattgttaatgtatggagataaaatgtcatatataagatgaatgggctactcctcctattgccaattggttttgagatggaaccccattcatcgtatccccaaattctaacatggtatcaggccacttgtgatccgttgtgagcccaacgtgccaccagtccaaaaagctatttgtgatccgttgtgagcgaaagtgccaccggtccaaaaagatacttccaatgtcttccctttaacctccatttgagatctttcggccaatgtgtgccaatttccaatgtttgagtctttgacctgtttcacaatccacaaatttcccgatatttggccttgtgggattcttttaaatgtcacgttcggctttgtggttttttaaaagatcgttgttatacccacactttctaggcccaaacgtgaggagagtgtattagagttagtctcacattgttaatgtgtggagataaattatcatatataagatgaatgggctactcgatcttattgccaattgattttgagatagaaccttatttatcttattcccaaattctaacatgatctaagatattcaattaattattcaatttactgttatgattttctatctttggaaaactttgttttttttttgttttttgtttttggactttgctttggtggatttgacactgcccaacgcccatgctacggcgacgtgaatttcttcttttttgcatggaattatttgttgtctcattaagtagaggctaaatgctttacaatgtttattatatgcatttggttgacttgggataacgacaacttagtattattggattattgtcgttagtatatagttaaggtatttgattaaatgtcttaatagaaaaaatgatagtattttgagaattttgaatgggcgatatttgtgttaattagcagtagtaattagcttcgtcgtcagtaaaatgtataatgtagtaaaaatgtgattaaatgattcactacttgaaacatattgatgaccttgaggcattt

SEQ ID NO: 29116 - DNA, 1027 bp, Cannabis sativa
acaacaatcaaaagacattaatgacgccgaccttataattatttttatttattaatttattttagggttttgattggagactttgagtactgctaataaatagcaaaatatgccaagctttagctaaattattttaccgtatttttataataatcaaattaaaaaaggaaagaaaaataatagaagttttacactactttaattttattttttggacagaaattaaataaaaatataataattaagagagcttaaaatggacgcgaatacacatagcccaagcaaaattacatgcatattgacacgtgtcaatagcatcgtacgtaccaaatcaatgtgacttttcttctttcttgattagttttctcatctaatttgcgtgtgatatatatcatactaaacttaattcccagtaaaaataattctgggactaaattaaatgaacagtaaaaaaaatataataatagtaaaaatttctttgaaaaatatttataaaaagttgtttcacaaaataatttaattatttatttatgaaaggaatttaataattaatagtattttatatatcttataaattagtaaataaaagaccaagattatttgacacttgtctatatataattatcactgagtatatatattttttatgtataacggacaaaagttataatgtatatacacatattttatattatgatcaattttcaaattttattcgcctattatttttgtttttatgattctttgatttaaagaaaattaacgagcgatacataaatattcaaagtgctaaacaaattatatattatacacgactgataagcacgttaaataattaattaatacgtaattataagtttataacatcgcttaaatgatcaatatttttctttctatagatttaaaatacaaacaaataatttctatctatgattagatggaataattaaagtgatgtattattaattaatcacttctattttgtgctcgagtcaaactatattaattaaataaaagtaatatatat

SEQ ID NO: 29117 - DNA, 2731 bp, Cannabis sativa
tttttttttttttttttataaggacttttatgtagaacttctggatgggattttctagatgggttgtagccagcttttatgttaagtcctaaagtgggtttgagtgagttatttagcagtttatcgttgtacgacatggcccggatcgccctgcatttcccactcgagttggccagtacacttgaatttagacttgaggtaagaaaagtataactatacaatttagcatgttgaatgtgatacgattattgccatatgcatatggaagagttattactcctaaaaacttgttgtagggtaatgtgtatggaagggttattactctttaaaacccattgtagggttttcaatatggaagagttgcactctctaaaacccactatagggtataaaggttgtcttcttgggaaatagattaatggttgcctcattacacaacgaaccgaaggttttttaattaaataacggagaataatggttactttattaagtaacaacatagtttgtcttattaggaaaataatttttattatggaatgtttaaaatatgtgattacttgatattgattttcttgttgggtctttgtgactcacgagtgttatatggtgcaggtaaggagaaacgcaaaattggacaattgtgagtttgaagtcttctccaacaagtgtacctattagctcttccgtctagctttgtcaaagttgtcatgagtagtttaatgtcacttttgagttatatattttgacgtaaaacaattatggaactattttgtaattaaggggatccccgaacccaaaagttgtattatattttaaaatcttattttataattaatgaacaaaattttaattaaatcacattttcttataaaattttagtttattatcataaactaatttaaaaatacacatgtggcattcctatgggataatatgttacagtttcaccctgaacattggtgcctacgaggctagttggctgatgaggtacccttcctctagtggacgacactctccttagcaccatcctgttatcaactttatacgcttcacgtatcgattgagccaaattggctttcctctttctctgggcatcttgctaagcctcaacactagtccattcctcttggaactagcattgtaactcttctcgttgcttatccggtgactcttgcaaattcctttgaaagttagcaaatgactccttcagatgcccaaccttagggttgggcacatgctcctcttgatgttccacaagatcctcttcaaggtccacatgtggctcacatggtggcaccaaaccatcagtgttgtttccagttcctattttcgtcttgtttggtgatctcaagtcagtgactcttatcctgccgcccgaggtccggtcaactaaagcatcacaaccaacactggtggccctagttgtcaccatatttttggaagtccttaggctcttgtacttataatttccttgcagaatgaagcacctaatcaaactctaaaaactcaaaggcaaccaagggtctcgagtggttctctcaatgaaagcaccaaaatgttgacgctgaaaagcaatcaactctgtaccatctaataagcagagcggccaacgaatatatgaatagaagtaaaaagagaacaccatagttatagtagttgactctgctttctatgaaggtaatggagatatgtctacttagaacttttattatcataaaaacctaattaccttacaagagaactcggaaaaaaaattctagagagagaaagtgtgaagacagagagaagctctaaccttgtaaagaggaggtaaagtgtgaaaaatgacctaggggagctctccttttataggaaaggaggtccaattaaattaaaataaaataatataaaaatttacacaaattttgttgggaaatcctacactagctcgcgagccaattttgaggcccgaaactttagaattgcgatcggcatgtgagacacacttagatgcaccttggaaggagctttaattttccactttaatcgtgtgattttgatgaaaattgagaaatttatagtcgttttactgagtagtgtgtacagtagcaaattgactgtgagattagcttgacttttgggcgcctgggttgacgtttatgtcaacctgggtgcccaagacttggtttcttgggctttaggcctattttgatatgcatgaatgatgtgatagctatccttagttcattctttggcctattttgatatgcatggacgtttatgtccactagtgacggctaggtgacattcgggtgatcaccagtgcacatgggtgtcggtggacttgtgtgtgacacgcgtacatgagatatttacttgaggaagcatccaaattcttattttaggggcaaaacaacatcgatgcctagagcaaagctgttgtttgaaggactgaacaccgagcctcaagccaatgtcaactttggcgcccaatgcgcttgcacactggcatgtggtgatgcttgggggataacttgctactcgaatgatattttctcctaattccaagtctcatatcattttttgtagtaaaacaagaaaaatgatcgagatagaattgaaatcggatctacagaaccaccaatagggtggttatgtcaacctgggcactcaatgactagggtgatgtcaacatgagtgcctagctctccaactggggcctagatggtggaaatttattttaccaggatct

SEQ ID NO: 29118 - DNA, 1356 bp, Cannabis sativa
atggcccctgcgcaaggatgacacgcacaaatcgagaaatggtccaaattttttttcgactcttttccttatgatttttcacccaaacactcttcccagaaactaagtccacaaacatggatttgcttccaccttagagctcccaattggtgaagaaacacggcttctggtggttgaagcttgtgagcgttgatatggcccaaattcttggagagcaaccttatggagttcactatggcaaacttaataatgacctctcctattatgttcgttctaattctctaagcccccagaatgagagctgcgctctcgctgtcaaagtcgggtatatcatctctctctatctactctcttacttttcttttttgatatggtagtggtgtatataatatatatgtcagcatcaatttctttgtctttgattcattttcgttgagctcattccttaaacttagttcatttgctgcttaggtttggattttgatgaatttgaaacaaatgaaatttgcattggctacttctgtgtttttcggttaatctttggtgttagaattgcgttaggatttgattcacaataattcactatgagaattttcaatattactcggttaacatttcattttcatattcaaacaacgttattatttatttaggttattcgaaactctcaagcaatatagttattaatgtttacgaaggtaagctaggcacaggttagatgctattgacactagcttggaaatgatattttaagaatttttttagatttgaaataatttaatgatttgtgtctctttccctttctttctctttctcaagagtgtagttgagtttataaagactcattttggacataaagtttcagcacctgaatccccagttctacctacattttctgttccattccatctcataaaaagccacgcttttcatgctttgttgaatccgaagctcctggggttagtaacttagtacaacatgaatatctatatttgtttgcttgctctataacttttctattgtagcattcctgtgtatatctataactatgccatatggatcttgtgtgttttaattgttatgcatattgcagtctgcagtaatcattggctataagtttcaagtgggtgagctgaagacagtgagggactatagagatttacttgcagaatccgtgtttctccatgctctgaaccagagattttgagaaaggatccacctcatttctcatgctcagctgcttgatccgttaaaggcttatataatgatatcatcttgcaaaaaaggagggaccatcgaagccttgaaatcaatgctgattgaggtattcttgattaacttcaagatttactcctc

SEQ ID NO: 29119 - DNA, 2528 bp, Cannabis sativa
agtggataaatttatcttcccaactgatttcattattctagatatagaagaagacagtaatgttccgattatccttgggagaccattcttggcaataggccaagcattgattgatgttcagaagggtgaattgaagctgagagtgcaaggggaagaagtggtcttcaatgttctaaaggcaatgacttttccaaaggcaagctataaatgtttcttttgtagatcttgtagacactatagtggagaagaaaaagttgatggaagatccattggaaatgagtttaaccgaagacgatctgaatgagcaagatggaatggaggcgatgggatacgccaaatggcttgactcctatgggccattgaatagaaagtactatgaagagttggggtagttccaaagaagcttgtggcatctacagaaaaaccaccgaactagaactaaaggtgcttccggatcatctacggtatgagtttaggagaagacaagaatcttccagtcatagtgtcagcttcactttctgatgtggagactgacaagttgctaaaagtactccgtgcacacaataaggtcattgggtggacactggctgatattaagggaattagtccctcaacagttatgcatcgaattctaatggaggagggtgctaaaatgactattgatacacaatgaagacttaatccaccaatgaaagaggttgtcagaaaggaagtggtcaagtggttagatgctggggtggcttacccagtttcagacagtaagtgggttaacccaattcatgtagtgccaatgaaatgagggatgacaatgataaaaaatgaaaaaaaaatgaattgatccttacaagaacggttactggttggcgaatatgcattgactacaggaagcttaataaggcaaccaggaaagaccattttcctttgccattcattgaccagatgttagacaagttggctggacaaaagtactactgtttcctagatggatactctggtcaccatcaaatagccatagcatcggaagatcaagagaagacaacctttacatgtccatatggcactttcgctttcaggagaatgccatttggactatgtaatgctccagcaacatttcagagatgtatgatggcgatcttttcagacttgattgggacttgtatacagatctttatggatgatttctcagttttcaattcctcatttgacaattgtttgaagagcttggagaaagtgctaatcagatgtgaggagtcaaacttggtactcaactgggaaaagttccattgcatggtaacagaggggattgttctagggcataagatttcaaaggtacgcatcgaggtagatagatccaaagtgtctacaatttgagaatctaccccctccagtttctgtaaaaggagtaaggagttttctgggccatgcaggattttaccaaagatttatcaaggacttctctaagatctccaaaccattgtccacttcttgttaacggggtaccttttgagtttagagaggaatgcttgaagaccttccaagctcttaaggagaagttgatatcggtacctatagtcacttcaccaaattgggagttgccatttgaactgatgtgtgatgcaagtgactacgtcatcagagctgtcttgggataacgagttgacagggtgtttcatatcatctactattctagtagaaccctgaatgatgctcaactgaactatgccaccacggaaaaagaaatgcttgcaattgtcttgcaattgtgttcgcgtgtgaccagtaccttatgaccaagaaggatgcaaagccaaggttgattcgatgggtgcttctgcttcaagaattcgacattgagagccaaaacacaaaggaggtgcagataaatgaagagtttcccgatgagcaactctttagtttgagggaaagcttgatggtgccttggttcgcagactatgttaaattcttggctacaaatgttacacctcctgagatgtctcgtcaacagctgaaaaagttcttttcagaggtgaagcactactattaggaagagccgattctttacaaacactgtgctgatcagataataagaagatgtgtgcatgatgaagagatgtattctatcttgaaccactgccatgccttacaatgtggggggaatttcagtggcacaagaactattggcctactctttttaaagatgctaatgattttgtaagggcatgtgatcgttgtctgagaaagagaaatatttctagaagaaacgaaatgcctttgacaggtatcttggaggtggagttgtttgatgtctgggggataaatttcatgggtccttttcaatcttctttcagcaatctgtatatcttattggttgtggactatgtataaaaatgggtggaagctgctgctacacaagccaatcatggtaagacagttttttctttccttcaaaagtacatcttcactcggtttggaactccccgagcaatcattagcgatgaagggactcatttttgtaataaacagtttga

SEQ ID NO: 29120 - DNA, 1696 bp, Cannabis sativa
ctcaactcaactcaactctatacgtatatttacaaataatgtgcaccacatattacaaattaccctctaatatattctctattccaacaaattttccttaaaaaataagcaacactttaaaaaaaacaaaaatatatattatatatgattcctcatccattacaattatctttacagataattacagaaaaaaagttggtattcatgacaatactctctctactatttttactccaacattatttttccaactaacacacatatttataattctatgtgttaatataaatatttaaatgtataataatattgtataaaccaatgttggatattgaagctgctgagctgtagctttacttggaaggtgtattaggtcagaaagtgatacaaaagtatacataataatataaaaccaaaaaccaaaaaaaaaaaaaaaaaacacagtacaaattttacttttcttagaagcaaaataacatttctaaattaataaaaacattttccccttttcttttctttttaaaaataaaaaaaaacccttttccttaattattttttatttaaagaataaaaattaaaaaaaaaccaaaattagaataaagttgtaatagcccaagaatggattttttctctctttggactcaactttgacttgttcttcttcagctcactttggtctgagtctgaagcttaaagcttaaagctttgagctttgagcttagtcctttctttcactttcatacaattttcttttggggtcaaaatttatataataatttttttgcttcaatatggagtttagttagatctaccaaatatcccactaaatggcttgtttttttttcttcaacggaggagtttattagtatttactttgccataaaagccttagcttttataaaaatcaaagcttgataacaacaaagaaaaataaccccattgtcattttccaagaaacaaaccctagatctgcaatgttgcacctccgccctcgccgggattccacttcagccaccaataaatggcagaacaaggtaatgcattgccttgtgctcccaaaaggggttttcttttggattttgtttatttgggttttggggttcttgattgtttatgaagaaatgtatttggttattgagcttaaattttgattttttttttggatagtctgaggagaatttggagcagtggccgcatatgaaggagttggttcagtgttatactgctgatttggttaaggatgagaataagtatggtcattatgagagtgttgctcctgtgtcctttcagaaccagatttacgaaggccctgatactgatattgagacaggtaaatgagtgcacttagcttgttgttgaagtgggaatttagtaaacttagttaacattcaagcttttgatgaagctcattcttctattgagaccacaccataatctgtgatgaattgtaagaatcctaattattactagtacactcaataagctgttaggtagagtggatagtttctgttccatgaatttatacagttgatggctttattctagagttctattaaattagtactgatgattgtaaatagaaacaaactatatagacaactgttttgtctgtggtactaggatttgtttgatttattttcttgtgccttagaagtgttatttttgcaatgtaaattaaaagaatgatggtgtgtgt

SEQ ID NO: 29121 - DNA, 3784 bp, Cannabis sativa
aggattcccgatttttgtttgctacatttttgaccagaccagtcttcaaacttcttgatacaactgtttagcacctccacttcattaagattagctctagtaaaaacaatggtatcatccgcaaacattaaatgggaaatctccgggacgtttctagcaactcgaataccatgaaggagacccttgtcttgttccaaggataacatccttgaaaagatctcattacataagagaaataggtagggagatagaggatctccttggcggatacctctttcgggccagaattttttgagaggccgaccatttagaaggatggaatacgacacggtggaaacacagcacataataatcttgacaaaatgaggatcgaacccaaaccgaagcatcacctccttaagaaaaccccattcgagacggtcatacgctttgttcatgtccatttttagggccattaaacccccagttcctcttttcttcttgatcacacttacaatctcttgagtgagaatggaggactccgcaatccaccttcccgggagaaaggccgattggaagggagcaatgatgtgctgaagaacatgcctcaacctctgggctaagattctagctataaccttgtaagtgaaattacacaaagcaatcggccggaatctatcaacagtatcagggttaatgcccttaggaataaggcagatatgtgtatggttaagtcccggttccaacaccccagtaatgaagaattgttgaatgcaatgaaccacgtcttctcccacaatgttccagcattttctaaagaaacaccccgagaggccatccggtcccggggcttttaaaggatgcattgagaaaatagtatcttttatttcctccaattcagggacagcaataagcttcaggttctcgtcataggatacggagttagaaatcaaggagtcaagatcttcgaaggacgaaggaccattggactcaaagagaactttaaaataatcattaaggatgataccgattcctttctcattcgatacaatgtttccaccgggatctttaaggttccatatgtgattcctctttctccgaaccaccgtagaggcatgaaaaaacgaagaatttctatcacccttagccaaccaagtttcccgagacctttgtttccatatagattccttgcgtttccacaaatctcccagattatttaaaattgtagcctcggccactagatcaacttcatggacttctttggattgaagagcttggagctccaattcaagattctttatacgcatatcacagtctccataaacatgtttaccccaccatctgagggcactttgagttctgttgatctttttccccaaataacttaattcttcactggaaacatccctacaccaagcctctttaatcacctcccaactagacggatcatcaaaccaagcttcgaaaaatctgaaaggccgaaaacctttgggtttagtcgcacaggaatcgaacaagatggggctatggtcagagcatgtgatcgggaaattgcgaacactccccgaaggacaagcagtcaaccaatctgtgtccacaattaccctgtccagacgctccttgaccaaatgaccattactccttttgttctgccatgtatacctacatccactgtatcccaaatcgactcctcctgttgaaaaaagaaaattctgaagaattgcgccatgacgacgcataaaagcattgccacccgacttgtcttccttgtttagaatgacatttagatcacccatgagagcccaaggccccgactgagaattaatcttacaaatcatgaaatcccagaaatccaatttttgatcttcataaggcgtaccataaactgcaagaagactccacacatgccttactgcaatatcttccaccttacaaaggaatctggaatcaagaacctcagtgacctcaattcctgcatctttattccataaaaaacagaatccccccgcaataccacgagaaggaatatacttgccataatcgaaatttagccccctacaaatattaaccatctgagaaacacctatcttagtctccatcaagaacaaacagtcaagcctcagcctcttaacccaagccttgagagcttggattgccgccggtctagcaagaccgcggcaattccaggaaagggccctcattggggatgggggggcatggtaagggccgcctcctcgcccaattgaaaattttgctcaattctaacatcaaaaaggtgattttcattctcagagagtgtacaattagagttggtacctggttcattgataactatgtcaggaagatctttagtgacaatggctctatttttgagagagccacgacgacccttcttcttgctcgagcttgaagactgtttcttaggcgacgatttgccgggattgaacggaacattcagggaggaagctagaggagacaccacagtcactgctgaagatgatgacacattcggagtcagatggataattggggtcacattacccaacgcctttcttttctttgaaacagagcccaacaagacaggagagtcttttgaaagaaaccatttatcacttttgtcaagaaggcccatcccttcctcaagaagaggcccatgtaacttattagtaatctcctccacattatcaatgggcccatcaataaacacgggttcagggtgaagatgtggggtacgtgatttgcataactcatgatggggcctctccacaacttgggccgcatctggaccaacgtgggccatcatacagaccaagacattgtcgtcatctgggtttttgcccaaaagattcattggatggatctcatcgcacaccctagaattcccagctgtcttaccaggtgtcgataccccagtggttccttttgaaattcccataacagttttgctcgtactctccgtacgtacgacctttgcaaacgaggtagtggcctccgcacacgcctcagtaccaagcacctcaggggtcaccgtaccattcgcctgaatattccctgctgcccgatccgcctccgacgtctcagccctttcccggagtaggagaggacctttggtatcaaaacagcttcgaataggcacagtagctttgatccaaggcccataaagtggcacggctttcccaatgggagggaaggcataggctcgatctcttgaacaattactgctgtcatgtcccaaataaccacagttgaaacacagcttgggcaccttcctatacttgaactgaatccattccttccttcctcttgttatgctcaagtaaaaacccgccggaagacgttgatcgataaatatgtcgaccttaagctttagaaagcctctacgagctatgattctattgtcgacaccgtccgactccaagaactcacccactttagctccaatcacccttgagttttgaaagacaagatagggtgttggtaatccatgaatttctacccaaaagactgccttgttcagtggcaccctctgccaagctccatcgaggggccattcacgaatattcaatagttgacctgctataatccaaggtcttcgtttaagaatctcctctttgtcttccagatgatcaaaaaagaaaccccagaggcccctttctaacgatttcatcctccactttcctctcaaagaccaaacaccagtaagtatttgtttgactcttcctctagacagaggtcgagacccacaaagcttagccaccaccccagttttggcaacttcattgttaatctcaaaatctgcctcaag

SEQ ID NO: 29122 - DNA, 2756 bp, Cannabis sativa
tttttttttttttttttcgagaaatgtgggaataattataattgctaaagagtaccaccagtgcctaacaccttccttagtgtgataacactatggtgtattaaataacagattccatataatttaagaaaataaattttagggaatatcactaaccaattacaagatacaagataacacttatagaagatgttagacactactggtgcccaatagcaatgctctaattataaacaatacataaacaaaagtacattatagagatccctattttcaattcttcattaaaaagaaaaataatggagaattgaaaagactccaaactgtaccagcatcttttagcctcagcagcttattcatgttaaactttttttttattgtggtaatttttcttctagaataaaaatgagaaatttaatgatgataaattaccaaagaactaataaaacaataaatagaggtgaaaggaggagaaaagaagcaagcaagaatataataagcacaatttaggcaccagtgatggcaatgtggaaagagaagaaacataagtaaacatttcactctaaaacactctgaaatacactacacaatcctttcttacatgttactagaaagattgttttctttggtagctttactatagataataactgcactagagtttataatatgtatttgtgttttcacttctcaacccccaaaagggctatcaatatagttcaagtacgattccggactacctctctagtggccaaaacaaatacaacaattctgtttttcgtcataatatgtactcacattcattcagaggccaacgtcatgagtcctcgaaatgatgatcggtttcatcaaagatctcctcctacataaagcagaaatataatgtaggtataacccatgaatgggaaagtgtgggagaaaacaaattaggtaatatggttgagtggtttctatttacctgtaagagctcttcaatgacatcctccattgttataatgccaacagcttcttcctcttcaggaagcttagggagtggattgccatctatttccagtatatctgagtacatgtcttttgcccacttcttgctcctagatccactcctatatgaattatttccactgttgggaaagctcttccacttctggagcgatcgcttgctctttaacaccttctctagaggaggcctttcggaatcaatgtcgacacttacatcttttgctgaatctatttggagacagagagagagaacatgagaaccaaccaattattattgtaagacaaagaaaatacaagcattataaaggaagctggttttttacggtcagcaggtttcccaggagattcctctgtgatcttgctacgatttcttacaacaacagccatgtgactatgacctttttgaaactcgttcaatatgtcatacaatggcagagtttcggggaccctgtaagaaaggtgcagaaaatcagattcatgtttcgtgttacatgcatatcatgtaattctacaaacattttacgaatctacttgagttacacgaatgcaattccatcaacaatacatgccttggaatccgacgtatagtgacattcttcacaggaacctcatcttctgggtgaattgttaacaaattttttacctaaattgcaaatgaacagatgagaagacatcatgaaaatataaagaataaacctaatataatttggaatttttctagtgggattcgaaataagacttgaaccttcattcatgagtaacagaagttcgaaaagaaattaccagtacaagtccaattatgttcgtaggttcctcgtaataaacaggcactctactgtggccttttcccaatatcaaactcatcaaattcctgtgtagcaacaagtgttagtctagctcataagacaattggacaattaaaataggacaattttctaatgtatgttatgaacaatatcataccggtcaagcttggaattaatgtcaatagcaaaagtatcagatataggtgtcatagcatcaccggctgttttctcagagagctcgagggctccagcaataatcgttgtctcatcatgtgtcaattctccaccttttccagccttaaaacatgacatagtatcaaaagttagatgtaatggaaagactgttagatttccctcaatatgcatctaataagttgtacaattaaaataagtcgactaaacagttaaacaatcaaacttcaactggtaaaatggtgaaacgataatgacgtaggttatgatgtggaagttttaaaagatcgaaagaaattgtacacacctcattgccatgcaaatcaacaagtgttttcaactcagccctgcgaaatagagcaacatgtcgatgtcccagcagatagtctaaaagctgggaaatacaagtagagaaaccaatgggacttgttcatttgattgtatcactttatatagattaacataacaggaagaaactagctaccttgctaattggatatgccactgggaagcagatccaaacaagaactcggacaactggggctactgtagcaccaatggccaaaccatatcgagaacaaattgattgcggtataatctgatcacacaagtacatgaaatactcaaatctcagacacacataaccacagccaatgacaatggatagaaaaagcaaggaaaagtatataggaaagaaaaaaataatccttaattctcctgtactttgcataaaccatgccagtgtcttgaatctaccat

SEQ ID NO: 29123 - DNA, 2055 bp, Cannabis sativa
cttcatcttttctggtccaactggtgttggaaagtctgaacttgcaaaatcattggctgcttactactttggctcagaagagtccatgatccggcttgatatgagtgaattcatggaaagacatactgtttccaagcttattggctctcctcctggatatgttggttacactgagggtggtcagctgactgaggcagttcgacgccgtccttatactgttgtactttttgatgagattgaaaaggctcatcccgatgttttcaacatgatgcttcaaattcttgaagatggaaggttgaccgatagcaaaggaagaacagtagacttcaagaatacacttctgataatgacatcaaatgttggaagtagtgtaattgagaaaggtggccgcagaattggatttgaccttgactatgatgagaaggatagcagttacaaccgaattaagagcttggtgacagaggaactcaagcaatacttcaggcctgagttcttgaataggttggatgaaatgatcgtcttccgacaactcactaagctggaagttaaggagatagcagatataatgttgaaggaagtgttcgaaaggcttaagaccaaagaaattgaacttcaagtaacagaaaggtttagggatagagtggtggacgaaggttacaacccgagctatggtgctaggcctttaagaagagccataatgagacttttggaggacagcatggctgagaagatgcttgctagggaaatcaaggagggtgactcggttattgtggatgtcgattctgacggtaatgtcactgtgcttaatggcagcagtggctcgcctgaatcgctaccagaggcaatccctatttagaacaccaacttgacctcgcattaatcttatcagtagaattgtctttttgttttcctgttagttggaactcttccatagaactagtttttttcccctcttcaaaggtgtattttggtagtggaattgaaagccagattattttaagttattggctgtgtcaaaaggctgtatctgttattcaatttaatatgcacagttctgttacagataatagttttggccctcattaattttatagcctttgctctcttgagtaacaataataagattgtactatcagttttcattttggaggatatagaattattgaactaaaatgatgtaatatattcttctttctttcaatggaaacgatttagtctaatatatcttaagtttggaaaatataaactatgggtttggcgggtcaaaaggcaatactcgagaaaatgggtccaccaaaccaaattatgtctatattacataatatgttatagtagtttatggaatcttaaaatgttgaagttgatgtattgaaaagtatctagaaatggtgaaaaagtaatggtgaggaatattcattgaatattcaatcatatggcttcatatatttttgaaaagtatcacgctttaatgatccaagagcaagtggtgacgaacatgtttcagatcttatcaacaaccagtggtgactggcttgaccgagtaatatgttgtagaagtgagatattaaaatcatacggcttaaacttcccatgttttgctttctcatagaattgtctaaaaaagaatatttcgtaattttttttttttaaaaaagaatattttattaaaaataatcaagtctaacacatcttaggaattacaaaagcatagctaaattaggaataggacaattataaattaaagaaactgtaggaaaatacttcggatatatttggtaatagatttattcatttttcattctaaaagaaaaaaggaaattgttaataaaactagaaaaacaagtgacagagtctaatttggactagcaatagagggtcactgtcccatttcaaatatatgctttaacttcaaaacatacttagcaagacatgagtaagaaggttaacatctttacatacacttatccactactttatttagttggcttataaaatattagaatgacctcttttttactattttgataaaatagctatttcattaataaattttca

SEQ ID NO: 29124 - DNA, 1184 bp, Cannabis sativa
aattacaccaaacataatatttatgcagggagagagtggaggagtacatgaagcacgtgtcgagggttcgagaagtgttgtcggagttgttatcggaggctttggggctaaacaaagagtacttaggaaaaatagagtgtatgaagagtgagattttggtgggtcactattacccgctttgcccggaacccgacttgacccaaggaactaccaaacattcggacccctcggccttgacccttcttcttcaggaccaaatgggtggccttcaagttctccgacgcaaccggtgggttgatgttccgcccttgccctctgttctcgtggccaacgtcggcgacctcatgcaggtacgtacgtataaagttacgtacacgtctacataattaatgtacgtagatatatatatatagtaactcataagtggtatcacgtacgtggggtgtatatatatattatatttatatgagaagtgcttaagcgcacacatcactttactattaaattatattgttattgttgcaattaaatatcttttctaattattttattttaataaattaaatattataaaaaataactaactaattacaagatgacaatgacatttcattatagtgctaagcactataaatgtctcgtgatgcgggcaaatatcagatcccaaattaattattataaaatatcgttaattattttttagagtggcaaaatcagccacattttttaataatggcaaaaaaaaaattggttgaaagagtatttaatgtaaaatataatttttattggggtaaaaataaaattatgtcaaaataaaaaaaataaaaaattttataaaaaacagtaaaattatgtagaataaaaatataatatttataggaatataaatcaaaaatataagattttttatttttacactttaaatttttacagaattccacgtagaaaatttttatagtaattaacggagcaacttaaatcgcaactaaaattcacatagaaactactggagcaaactaccggaaccgtaaattaaaaaaaaattaaaaattagtatatgagataactcccctaaaaaaatatgtaaatatgtaagaatataaatgaaaaatataatttttatgagggcaaaattaaaatattcaaaaatttgtatatacaaatttaatttatgaaaaattgag

SEQ ID NO: 29125 - DNA, 2089 bp, Cannabis sativa
atatggtttcaaggatctcctacatatgcatgtctattacctttaacaatactcgagccgcccaagataggtgagcaaaaattagccaccatctcgaggagatgttagagtctcacattgctaatgtgtataaatataattgttgggaataaattcacttgatttattaagttagtattttcatcttgacacttatcagttgaaatagaagaagttgttgttagttataacagttggcttcgatacaaacttaaataaagcatcaccaacacctataaatacttgtgcctcaactctctctcgaggggacaccaatgctcatacttttgatttcagaatcaagtctagagaggcattgtctaaaatcacagtgtgtgtgtgtggatggatgtaatgatagtacttttgaagtaatttccctcagtgtgagatataatttgtaattgtaggctgtgttgagtggtgttcttatacgtatttgattgtgtactactcactattcttataaataaagattcacaattcattcattctcgagctaagtttattcctgcttaatttcatctaagttcagttttgattttgtgattggttctagttttgaattgtgtttcttaaacactgttactgatctttcaccataataacactatatataacatgcatgaattattttttccattatcaattggtttttgagatataactccacatagtattgtaagtttgtgcgtgtcgtgctggctcgactcgtatttatctttgcttttcaaaaaacgggtcgtgtcgtgccatgctacagaaaaatatggatcgtgcgtgtcgtgctaatattttaaagggtaagcccaaacttgtagacctgatatttttgtgcttttcggactagtctatttgtgcttacgtatcatgccttttgtgattttcatattgtgttgtgtttaagaatatatttttcgtacttcgtgccaatttatagcattgtgccatttcatgtcgaaacccgtattttttcatgccgtgttgtgctcgtgccagtttcgtgtcgtgtcaaaaagtcccgtctatttacagcactaaccctacacaccatatacatatataatagtttaattttatttatgtgacagtgccactgattattttgggagtagtgattaatcgtctcttaaaatccaaatcaaataactgtatgtatatatttctttcgggattaaattaaaacaatacttgattaaggaacggaaagagttttgagtcattggaaagatgcacaaatcacgtggtgagaacaacttttggtcggcgttaattgagacaattctattgcaaaatttaaaaacacaaaataatgcttaataatactcatcaacttgtaatttaattacttcaatcatatacataattgaatagttaagtaggaagatacatgacttatttgatgttatctaacccctttttttttttctttctttgttacttttaagtatattaggtagaagaatttgtcttcctcctaaaattgaatagagaattcaaatcttacaggttcaagaactaaaaaaaacttcaatatagcatgatttttgaaggattagttgtaattcattagagcatataaataattaaagaaaactttggaacttggaaacatctgtatacatagtgatagtatacaataaaataaaaaaagggggttcaaataattaatcaacaagattaatatgattaatggagtgttggagaagtgtaataataatggtaaagaaatgggaggagataatgatatagaccaaataccttattctttgtgtatcctttgcttacaaaagtaccacccgctgcatcatttcaaaattcaaaaccacataaaataaacattattattatctctagtatctgattcttatttactgagatttaatttgtaatgtaaagtcatatataaggtcataaatattgtatcttagctgaatgggggagtacaagggtatgtccaacctaactattaccatgattaaaattattaaaccaaaattaattaagtaatatcttgctattgtgaatatcagtatacatcaaaatttta

SEQ ID NO: 29126 - DNA, 972 bp, Cannabis sativa
atagatttcttcaatagtccaagaaagttgtccaacatggtattgatttgtggaaagtcttttggaaaattcaggttccccctaaagttctacacttcaagtggaagacaatcacaggttgcttacctacgaaagttcagctgcaatccaaacatgtggcagtcgatcttctatgccctttctacaatatggaggctgaatctatcatccatgttctagtaaaatgcccctttgcaacttcttgctggaacaattcaattatcagtcatagtcccaacaaccatgctgatttttgcacctgctttgaagagaaaattgcaggtaaggatgatagcatcatgaaagagatactaatgatctcttgggcaatctggaatgctcgaaacaacctgatttggaataaaaaaaatgcagaagtagttttgtctgcaagaactatccttaatcaatggagttttgctcatcaaagaagaatggaacccctccttgttttcgatgaacaagttgctgaggttgagcattagacttcacatgcaaatgatacgattaaggtcaatgtagatggagcaacttttgaaactacaaattcattcgagtttggctatattgcaaggaggagtgataatactctaatagaggcaatttcaattggaaaaattagtcgggttgcaccagaaattgttaaaatcacaggcattaaagatgcccttaactggataaaaagtaaaggatggcaaaaagtctcacttgaatccaattgcttagttgttgttcaagcaattaagagttcatcgtatcttccttctgcttttgggttacctgttcaagactcaatttttagctaatctaaattgtgttaatttttattttgtaaaatgttatgctaacaaggtagtacattttctgctcttgttgttcgtcacttcgtgtcttttataactacaactcaccacatgagtttgtagagattgt

SEQ ID NO: 29127 - DNA, 1673 bp, Cannabis sativa
ttgtccattgggctgactgggccgtctgggccgattgggccaattgatatgtgtgtccaaaagggttcttttggtagtaataatggtaatgggccttttaatctaaggaatagtgggcctaatgttgttaactctaaacaagtgggttcttttgaaaaggttatggagaaagaaggatgcttccaacccgaggcccaaatggaagaagtggatgttcatgaggcggcccactcttgcatgggacaaaaaggtgatttgtcaaatgtggttaaacaaattgatggtggtgatggaagcttggccgacccccattgtgaggaaggaaaagctttaagtcaatttttcaaggctcaagaagacttgctttatgacttgaaacattttgggaagctagatttgtttgagatcaagaggattggaggtgacataggtgtgttgaccacctcggaaactaatgaacgaacaactccttttaagaagaggaaatttgaaggatccgcttctttgtgtactagacctcacaagactatcaggactcatcctgatgtggttcgagactttccttgggacaccaaagagaaggatcgtgaatctaaggtgatttatgatgacccatatgaagaagagtctgattctatgagctgcaatgaaggaattatgaagaacccactgataggatcctttgttattgaggattctggatccagcttatcggtgtactcgcaaaaccctgtggaggagaatgtcaaaactcctccacaggcgccatgagaggggttgcttggaactgtagagggttagggcagacctctacagttcgcgaactgaagtccctgatcagagcgcgctctcctgattttgtgtttctatccgagcttaaagtggatgcgacgcctctggtacgtttacttagatccttccatttttattttaatattaatgttccatctattggtactgcgggaggtattattttggcttggaaagttggttttaattttgaatgcatttcttgttctcaaaatcatatatctggtattgtttattcggatcccccttcaaattcgtggctcctctcgtgtgtgtatggccccccttatcttcatgccaagaaaaaattttgggcggagctaatgacccttcttggaagataggtttgggggtggtccccttggcttatttttggtgataccaactttgtgcttagcaactctgaacgagaaggctcttcaggaagagacccctttatccctattatctctaaccttgttgattctagagggttgatcaatttgtgtattcaaggggacaagatgacttgggataaccaccggtcagggggtaggcatgtgaaatctgctcttgacaaagggatagtgaatggagcgtgggtccttctgtttcccaaagctgttgtttgctcttcccaaacgagcaactcggaccatagacccctgttcctggatacgagtggtccttctcctaaattcaagagatgtttcaagtttgaagaaggatggacgagggatgagagaagcaaacttgtagttgccaatgcttgggcctcaattaatcatgcttgggctcctgcccgagtattcaaaaaggtgggagctactaggattgctcttctcaattggaatagaacgcagtttggtaagatggattgggta

SEQ ID NO: 29128 - DNA, 977 bp, Cannabis sativa
gttcacccatcttcctttagcagcatctaactccttcttaatagtatcttttaaggttttattaagcattgtatcttaacactttgtatttttttttttaagattttcttggttttttctctatagcagtggaagctggcgccatggccaaaactagattgaaatagcaagcaaaatcgaagatctctatcacgaaccgaagaagaatggccctaacacgtattagatttaattcgtacaaaatctatggatgctgtaattggcatagctccgcttgagctatccaaagaggatgaagagcctgatgcatctcaagaagggatgaggggtacaccagagctcccaaatttattccaagctccgctttcacctattgcttctctgaatgagatcaaacgaggtaatgatgccagattgggtttcttgcagtttgtacaagcgacccaacaatgtaacagtaacttgaatcagggtgaggtctctatacctcctattctcagatctggatcagtcgttaggaatttagaacagtcttttaagcattttgataaacctaagaaggtcaagatcaccctggaagacattgaagaagaggttagctattggagaccctccatcgtgtgctatgttttgggatcaaaccctccgctgcacatttcggaaggttttgcaaaccgaatctaaaaagacaagatttacaaggttaaaatgctaacctatggaatcttcattataagattcaattcgatggagaatagggaccaagtgctgaatggagggtatatctttttcaataaaagacctgtgactatgatgcccttggatccaaatacaaatttcggaaaggaggatgtgaaacaggtgcctatctgggtgcaacttgaggatcttgacctcaaatattggggtcaaaaatctctcttcaagattattgttcaggttggtaacccaaaaatggtggatagtgttctaattga

SEQ ID NO: 29129 - DNA, 1089 bp, Cannabis sativa
ttttgtcatttaataaaacacagggtttaattggtaacttttacaaaacactgggtccaaactagtatttaccctagaaaattttattttgagaagcgaatttcattgttttacattgtacacgtttatatatgtatctctttctcactaaatattagtacaaacttatttttctcaatgtatataatatataattaatttttatttcttaaatatatttttttaggaaattcgtaccagacccgtccactcgcgacccgttgacttgttaacctagtcatttcacaacattatgcgtattttttttttaattcaaaacttgtgagcctaaaacccgatcaacttgctcgatgttcaatcctagcagcaatgacagttcaagagactatatggttgatagaactaataaattattcgcaccaactaatagattatgtgactacgttgtactatcaattgacaattcgtttggcaaacaatccaatctttcatgcaagaattaagcgcgtggaaaggaatttttattttatttgagagaaagttctacaagacaagattttattgagacaagtgaaaatagattagcaagttggagacttattcacaaaaattgagtattggaaagtttgaaaacttttgtcgtcaacttggagttgttcaaagaataagagctaacattgagagtgtgttaaaatcaatatttgatcctaaatcaaactaaatctaaattaagtatatataatttagtatataacataattaattaaccaaattaagatgtgtgattggtattctacttgggttgctatacatacccatttctttacatcttaaataaatataagtaaagaaataagacaattagtcttattattgagagttatcttgtaatattttcaattaaataaagtttggtgttgtttctcgacataggtgtgaattttctttaacacgtgattgctaagagttgattttcttccgctatttctctaacctgctttttcaagtacgcaaagacattatggaaagaatgaaaaacagttaagccattgaagcatctctttctcctttgcatctctcttttttaaa

SEQ ID NO: 29130 - DNA, 4080 bp, Cannabis sativa
  modified_base (3878)..(3883): a, c, t, g, unknown or other
ttataagtgatatttgtgttagtatatgtataagaagcgaagaatgaatgatggggtttgcttagattagcctacttactgagtattgggttttcaattgtttgtttagaagaataaagttttggtggattgatgtggctttagtttttcaatttgaaacaaatcaagatatgtatatcaccaaatgcagatgttttgcataaggtgaattgatgtggcttgagtctcctatatatctaatagcaataaatcactttatatattgaagaacatgtcttttcttccttgattgaagtcagtatatttaacagttatctccatgtccatcccatccttgaagattttaatatagaaattgtctgagtacagctgaccttctagtttttgatgttgaattttgtgaatatatttgttaattatttgtgctagaagtaacattgatgttcattatacctccttttttttcaatgaatagatttttacaaatttgttttaggcatgttaaagtatattgaactttagtttgtgcaatttttttgcagggtggaatgcgggtttatgtatgcgtccatgacacatcgcccccaggttttcttcacttaattgaatcctcagcttgtgaacttaaatatggagaaattgctaatcctattatatatttcatacattatttttttcttggaaaaaaaaaaagaaaaacagaaatttttaaagcaatgtctgagcatattcagtttgaataataacaattactatggtctcttgattttttgtttttctcattctttctttattttcaatatgcaggtaacagacgcataatgaaattttggcatgagactagagctttttattttgaggatttctgactgatgagtgtttgttcgcatccagatgatcaacagatcaagacaaatcaacagaacatattgatcagatcgcttacacttaggaacaagaaaggtgattccagttcaaaggatgtgaaaagtgcaggtgcaactgaaagttctagaaaaaggtaatgctttcaataagcttggatttgtcatccttctgttccctgcaaatgataatttatctggtagttgtcttgaatggaatttagtgcctggatacttgagtgtgcatagttgattgtggtccttattttctgtttcagtcatcacatttttttttctctattgttattgttaggcctgcagaaagaactttggatagcagggcttctgcgaaaaaagctaatagtcagagtagcacttctcgacaaggtagtcttgatattcttgtttgccatttctggtttgttagacctcattgatcgtaaaggctgaagttatcccacaaaactataatttatcgaagaaacagaaagcaatcgctttctcaatattagttcagatttgtatattgtgactcagaatgtactatcaccattattgagagtctcatagttgagaatggtatactcacatattcatagacttatgtctgcgcacacacacaaaaaaaaaagttctaagtgtagctacttatttcggttggacctatcctatgcttttgatcgttaaatttcctttagtctaaatgattacgttgtcattattgttttacgagtttaaatggctttcttgaagagggatcaagcaatcaggcatcaattaaggatttccaaggtctgactgtagagagacttcgtgcacttttaaaggccaaaggactttctttgaagggaaagaaggcaagtattaataaaaccatctagtgatgcatgcatatattgtcaatcgtggtgtgttgagtgttgatcgttcgaaggcattttcttttctttgtcagtgaagaagaaaatttagcttcgtgacatgttttatttcatttgcaggaggaactgattgcgcgcctcaaaggtgctagcagttaagcataacgtagaaaaaaggaccagggaagcagccggggaagagattagagtgtgttcacaaatcgtcgcccaagagtagcagtcacttttcttgatttttcgagtgaatgtaggaatggaacggtttagactggatatgtccataatttgaacataaaaacttttttgtgaagacaaaggattatatattgtataattttgtgttcttaatgtttttatgcttcaaacactttattataaacttaaaaaagttatttgatggcgtagtgcaattttcttgatcatatgcgatgaacattattgacattacaaaattgtattattatcaactttccatcatacatggaatgaaaatggagtttagtttaatcaaattgacttagttactgaggaggaaaggtcacttgcgattggctaggtcttatcctcatctaaagaaatatgagcatgtttggttgattggaatcaagattgtaatggaattaaaatcgccattacaatgtttggtttgtgtttctaacctttgtaatgggattccattataatgggcattacaccaattctattaattttcattacactcttacacctcatgaatgaggattacaatgacaactaaataataaaaagacaattttaccctttctttttctcactttgaaaatataaataaagcaagaatatttttgtcaattcaattctaattacaatgttcattacaaaataaaccatacatggtaatagtattcccattattattaccattacattctattactattacacttatattccggtaaactaaataccacctacaagtacactgttttcaaagtttgggaactctttgatgaagattgggttgagtgatataagaaattataaggtgattggtgtgtgtttgtccaattaagctcagcagcagcagatgaagagtttccttttctaggcactgctcctcatgagttttgtttttacagatacacaattggtaaagaaatattccaacaaattttcaagtgttttttcatatgattatcatacaacataccaatgtgatttaccccttgtctttccccttcttcatcctcccatccctaccaaaattcccatgcttccacctctctaatttttgtatttagttaggaaaaaagagaaacaaaattttttttattgtttttttatgatatttttttttattttaaatagttatttatttggactgataaaattatgtaatttgtataatgtgtccatgtgtttactatgaaatgttaaattgctaactaaacacaggtttgggattttaactatttttagaagattaattgttagtaaggtgagacttttggccgttttggcaatgcatgaagaataaggatatggagtgtattcatacagtgttttttcatatttaagaaaaaattgttgcttaaatacttatttgtttattttagaataattaataattttgttttttaaactttcaataatattgattctgtctcttaaaatatatgacttgttcaaaattaccttcgaacttttatcgtgtctttgtaaattagcaaatttgtcccctaaattttgacaactatcaaaacacgccccccaaaataaaattgacaaagattgaatattttttttagtaaattttaaaaaattaatttagatcttaaaaaaaataattttgaatgattaagaaaattaaaattttaaaattaattaagagatttaagaaatttatttagatataaaaaatatataaaaaatttaatttttgcaaaaattaaattttaccggaacaagtttgagtttattttttttttctccaaaaatctaaatttgtttaagtaaaaaaaaaaaaagaaatttataacattttttccaaaataagtttaagttttattgaaattttaattatttttctttattttttaagatatgagtttannnnnntaaataagtttgattttttttttcaaaaaaatcttagtttgtttaattatttattagatttttaataattttagtttgattttgtaagatatgtgtttatcaatatactagaagaaagttacgtgcaaggcacgtatatttagttttatgttatgtgttctataatttaattaagaaaaattcaataaataatcata

SEQ ID NO: 29131 - DNA, 6417 bp, Cannabis sativa
ggttagaagtggaatttggggagaccttttttggtgatttgcttgatcaatgtctttctatatcatatcatattcatgacctttaaatctaagatgttacttccaaatggggttggttcataaaggctagcgatatttgatctttttcggttttaaagttttataaaaaaaaaaaaggaaaaaattcaatttcaggtgagtgctgcaggagatctctgtgcaatttgccaggagaagatgcatgctcctatacttcttcgttgtaaacacatattctgtgaggattgtgtatcagaatggtcagttcctttaaccttaaacccttttcttgtaaaagatttttatttcttctgtcataagataacaaggtttcactgattattattctaatttacagctataacatcatcaaacatgttgaactcccatgaagtcacattttatctattccaattttgcttctcacaaataaattatggtgtattgtatttatcaacatcaggtttgagcgcgaaagaacttgtccattatgcagagccttggtgaaaccagcgggaatcaaatcgtacggggatggagcaactagtttgtacttccaactattttaagacacaccaaccatcattgatggaaacttgagcttctttgagaatcacaaaagggtctcatgtgttgcaagtaaatggattcatactacctatgaaaattcgaaattcgctgtccaatgaattcggaatagaatgtttggacttagatgaacttaaaatcaccccttaccagcatggtttttcaatccactgtagatagcctctacatgtaaaaatggaagaggttttatatttacttgtgaaatgcacacatataataatatatacatgaaatatacatatatgtagataacaaataaaggaatatttcgacataaaaactgagatatgtcaccgtaactgagttgacatcattattgatcatttgatttattgtttttaatgtccttgatttggtaactggtgcattgtcctcttttatttgcctagaacattcaaaaactagttattgtaattctttttttttttttactttaaaataaaaaacttgatattagagctgcaatcaattttgaagatattttatattttgactgtgatgaaaatgaatgagaaattttgcctgaccctaaagggtattgagagttaattaaagtatcataactattgtggtggtgatcattaattcatcaaagacttcataatcagttcggtggctataaattccaacttgtcaattatgaaccataaatattggattcgataaagatgtaatttttgttgtaggtggctccactagacagcaatgtatacatcaagtgacataagtgacatgtaatatttatgcaatttattcatacaagttaatatgcaaattatacccttttatgacaaaatatgtagcattaggtaacatttaaacttttttattttttaattataaaaatgaaaggagaatttttatttatttatttatttttaaaacaaaaatatattcagtaattatttttgttttttaattttaaaaacaaaaaattaatatgtgttttctaaattttatttttgttttttatttttatttaagtcgggattggggttcgagtctgactttaggtttgggtgtggagttcggttttaggttcgagtcgggatcgaggcccagggttgggtccaggatccaaggtaggagcttgggctgaggcggggcatgggccggttccaagttcgtggtttgggtttgggtccgaggacgaggtcggagtccgggtccaaggtctagtgctaggtctgtcttcgagtcccgggccggatccagggtttagggttggggctcaattttgagtctagggccagggtcttaggccaggtctggggttgggtctaggtccaagaccgagtctggggttcgggtccatggtctgagtctgtgttcaaggcgaggagtgagtccaggttcgatttcgcggtctgggttgactcatagtcatagcagaggactaagtaaaggacacaacaacaaatgaagatctaatccaaaagggtcagaagacacataaggatgtttcaactatgggaagcccgaacacttcaagaaagattgttatttcttaaacaagaacagaaagaactagttcaataggaaaagagacaactacaactcagaatccaaaaaccctaaacagaacagatcatcaaaatgcaaatttgagtgactgttatgaaaatggagaagtttatgttgttggatcatcttttaaagatgattggatattagactctggctgtactttctatatgactaataacggaactattttgactgatttcagagatttcacaaaaggcaaggtgatactaggaaatgaccaaagctgtaaaatcaaaagagcagggacaatggcattcaaaatgcatgatggggtcactagatcactaactggggtaagatatgttcgtgatttgtccaaaaacctaatttcactaagtgtgcttgatgatttgaaaataaaaagtaagatcaaggatggacaaataaagatttgcaaggggtcaatgacagtcatcaaaggagtcaagaaggaaggtttgtactacatgataggagaacttatagctagaagcaacaacacagttggacaaaacaacatattgcaaagtccaaaagatgctaaagcaatactatggcataatagacttgagcacataacagagaaaggaatacagattgttaatgagcaacaattgttgggaaagatagagtaagcaaagtggaattctgtgagcattgcatacttagaaaacatcacagattgaagttcaaaataggtacacataaatctaaagttatactagattatatacactttttatggggccctgaaaaaaatacctactcatggaggtaacacttattttatgtcaattgttgatgatttttctaggaaagtatgggtgtttctacttaagaataaaaatgatacttttcaaagatttaaacactagaaaacacttgttgaaaatcttactaacataaaaatcaaaaacctaaggacagataatggtctagaattttgcaacaatgaatttgatatgttttgcagagaaatagaaatacaaaggcacaagactgttaggctaacaccacaacagaattgtgcagctgaaagaatgaatagaaccattctaaacaagaccaggtgtatattgatacaatctggactgtctcatggtttttggggtgaagctgttatgacatctacctatctgataaacagatgtccttccaatgttattgaatttaaaatacctgaggaaaggtggtctggtaaaccacctgacctgtcaaatctaagggtgtttggttgtagtgcttatgtgcaccaaagtattggtaaacaagaacttaaagctataaaaagaattttgctgagatatcctgaaggggtaaaagggtatagaatctggttaagggaaaagggggattgtaagactattatcagcagagatgttatattcaaggaaaataaatttccatgtttacttaaaactaaccctgcaggtacatcagatactaaccctgcaggaatcatacagtttgatccatcctatgaagattagaggatcaagaagaatttgatgtcaattaggtggaaccagcaggaggagaacctgaaccagatcaggttcaggtggaacacacagaaaatactaacagagaggaggctcaaatagaaggacaacaagaagagaagacaaaagacacaacaaacaggggctctatatgactaccaattgaccagagatagagagaagataacatcaaaacctaatcccaaatacaattttaatatctggaatgaagatatagcttatgcatttatgacagctatggagtcaatcaactcagaacctcaaacatatgaggaagcaatggaaggacctaatgctaagaaatggttcaaggcaatggatgaagagatggtgtcacttaggaagaacaagacctggatgatggttttaagacctaaggggaagagaataatagcttgcaaatgggtctacaagcataaagaaggcagatctaaagggaaacctacaaggattaaggctaggctggtagcaaagggtttcacagaaagaaggcatagattatatggaaatattctcaccagttgctaagtacaagactattagaatcatgttatccatagcaaaccagtttgatatggagatttaccaaatggatgttacaactgctttcttacatggagatctagaggaagaaatctatatagagcagcctaaaggttttgaagttaaaggcaaagaagaaatggtctgtaagctaattaagtctctatatggactcaaacaggcccccaaacaatggaatagaaagtttgatgcttttatgataaagcattaattcaacatgagttataatgacacttgtctatactacaagggaagctctataaaagatgtcatctacctactattgtatgtagatgacatgcttattataagccaagaaagatctaaggttggcatggtcaaaaatctactcaaaacagaattgaaatgaaagatcttggtaatgccaccgagatccttggaatatctatcttaagagacagagataaagggacgttgataattaggcaggaggattacattgagaaaatcttagacaaatattctatgaaggatgtgaaagctattaagcaacctataaccagccagtatactctacctaaagaataatgccttaaaacagaaaaaaagttgaagctatgaaagatataccctattcaaatgcagtggggtctgtcatgtatcttatggtaagcagaagacctaatctaggttatgctatgagtgtgcttagtaaatacatggaaaatccaggaaaagttcattggttggccatgaaatgggtgttcagatacttacttgggacaactaaagtaggtctggtctataagagacaaaatgcaaagtactataatagagggtctgttgtggcactatcaacaacaaaagctgaaatgttgccacaacaaaagctatcaaggaatctatttggctaaaagggctaatgactaaacttaagctacttaaagggatacctacagtatactcagacagtcgaaactgcatatttctattaaaatatcctatgtttcacgacaaaacaaaacacattgagatcaaataccactttatacgagataaagtgaatcaaggtgaagtagaagtggaaaaggtgcctactgaagataacccagcagacatgggtacaaaaattatgactcttaataagttcatacattgtatgaacttattaagaatcgaccctagagactaagagtaggacctatcaagctaggaatatcagagataaataaacattacatcaaaacaggttataagaggaattcaggaataaatttttgagtaaattccacttataaccaatccttatacattcatccacatcagcatataacaacaaataacagaaaacaagattcatcctaagtggctttgcctctacaagaccagaaccaaaagttagttcatgttttgtaactaacttccagcttgatcaacaaactacactactctataattaagatacaaacagtagaaaagtacagtacaaaaaaagagaaagaaagaaaaccttggttgaaacttcagctccaagatccagggagaaaggttctagacagagactaaaactctcgtggtgaggaggatttgaaggaaggatgtacaagcacaaagagaaaaataaagttagatcgagtagttaaaaagagaagaaaaagcaaaaattgtgaaagtgaagcaatctagccttacctgatcaaatcttgtgacaggatgctccacaagttgtaaatcaccattgttgatagtggatctcaagccaaatttctgagataagtttgacagagatgtagccctaatttttggggtgaactctaatataattcttggtgttttctctccttttctctctttgattttcattctattaatttctgtgtgtgtgtgtgtgagtaagatactaggattctaacataggatcgagcaggatcttctcaagaacttgctctgctagggtttcgactctctgtgcgaatgtgtttgtgtgtgttgtgtttgctgaattttttctagacttttcttgaaagtctctttgctcttgcattaaacgacacttgtattgtggtcgtattgtacttgtattaccatttttgttctagaaacatttagacaaaggaaaggtcaagattgaacttggataatgataattagtgttttgttggtgtagggttaaaacaataaaaattcctacaaa

SEQ ID NO: 29132 - DNA, 1802 bp, Cannabis sativa
tacccggtgtttccccttacggatcccgggactactgactgtcacacttttagggggtggtttttctttttctttgtatatgttggtttttattgtggttataatggacatttactattttttgtcaaaatgtttagaataatttttaatatttaaaataattaaattgtacacatacaactaattatttaaatgtttcaggttaataataggaaaaaattatggtttctcgttcttaaatttatagttattcgagctactctaattcgatttttgttactgtgattagtcttgtctctgtgacatagttgagtgttttagtcttgtctgtatgatctgattttgtttcgttgttagttgttctttattttttgatggctcgtcattaaattattgttagtggttgggaataacaagttctttgcgactaaaggggttgttaatagtgcagttatatattttacataatagttgagtcttcaacctacgagactgaatgaaactgcaataatttttattggtgtgtcttatgaccgatgaataaaatataatataattgttcttaaagttaattgtgatgctgcaatctttttaatctaattttattttaatttttttatcaaacaattaattacatgctaattaattatttgactcattttttttaatagtatctccaacaaagagatatcctaattaaattacatgctattatttaacctaattgacattaataaaattcaataatttattcaaaagtgtttaaatattatttttgacatcataaaataagttaatagatatgttcagtatagacaaaaatcctccaatgaccgattgggataatttgcaatcgatcaaactagtgagtaacgaacacaattcaaaaaaatattattagtaattaattttagtttaatcaatattaattaaaaatagagactagagatttcgattaccatttgctcacctaaacttctttttcctccaaattatagaatttacaaaaccaattgcttcaaaaacttggtaccatatttgaaaaggagtctaaaccaacaaccaatttgtatctttattataaaattcagtgagtaaaaaagagtagtgcaaaatgtagtaaggtgtaatagattggtgattaattttaaaggtttggagggagttactagttactaatatttcccattcattaggttaggtggtgggaaagggaatgttaataagaaaagactccgaattggaattcgccacgtgtaaggagtccttcctatgcatatgctaaagttaagtaaacatcaatctcccttataaagatgatcactaggaagatacaatgtgttcaagtattctaaaactctccctctctatctctctctttctctctcccacaaagagcctatttgcctctttttcatgagaaaaaaagaagatttttttgtgtatttttttgaattcccaccccatccctcataccctctctttggtttttttggttttttttttttctctaatcaaatcaccaaagtgactgtacatttgagccgggaaataaaccgcctacttggggcttcgctgttgatgcccttacgatactttcccctgtaccttgcacagtccattcatttctgcaacaaagaaagaacaaaccgaaagaatcaatcactgatgcagatattagagagaagagagattgagaaatgtcaaaccgaaaatcagaacagaaacattaaaaaacttaactttacatgagtttttctattggattctctcattctaaacattttcaactaaggttttct

SEQ ID NO: 29133 - DNA, 4669 bp, Cannabis sativa
  modified_base (3734)..(3734): a, c, t, g, unknown or other
tcagctcaaaggctttactagagggaaagtccctaaagaagatacaatagctaatgcactcgctcgactgcccagcaatgccttggtaatcaaggaaaactaagaacattagagaactgagcatccctatcttaaaaggaataaacatgctggacatacatccaatatggatgacacctatagtaggataccttcaaataaaaaccttgccagaaagcagggaaaaggggtgtaatatcctagaaaattattatgataattaagtgggcatgttttattaaatatgtcattaagtgggtattaaagtaggattataatcttacttaaactaattacgaattaattagtgaaatgtgattaaaggaacgattaaagcgtaattaattaattactgagattttatcgaactacgggagtattatagacaccatttccaaaataaaatattttcgggtgtggcggccatggaaactcgacagagtggtcaaggatgtcacgacgatataagatggattatttgaaattggaattatacttgattagtttagaattttaagttttggaatcgacggattagttagttatgactaaaatgcgcctaggaatttattttaggccacaatgttatataaaggtaaaatagtctttttgggtgatagaaatggttttgtcttatttgttttattggctagataagttgaaattaattaacatttatttaattatttatgaataaagttagtaaaaatagttagaagaagatagggtagtagtcatcacctccatttctcttttccttcttacctgacccctaagaggagttgcaaccagggaattttctagtttgattctgcaattttgtgctgcattggcaagggatagaagttggttagacattaagataagttcttgatacttttccccttgaatttcttgagttttagattagtttaggtagggttttactaggattttgtggctgtatgtttagtctaagtttagagtttgttttggttttaattttatgaatgtttaggtttcaactagtttggtttcatggctggttgattttgaagttagaattgttgattcaggaggtataattttgattctaacatcgtgtttggtataatttgttgagatattttgaattaatgtactggatatgttcttttggtgggattatactgttctggagcttctgggttgctttggtggtgtttggatcaatttttggaggaggaaactcaagactgcaaccctgccagaaccagtagaaattggttctagtgcagcagaaccggtcgaccggtttgcctgtaggggagaattttcagttttcctcaaagcccattttagggctcgaggtgatttccagtggttagtattgattgtttagaaattctaaaacctattttagagctattagaagttaaggtttgttcggttttgggaattagggttaatctagagattttttatttaaggtatttattgaattttgttgtcgtgacatagggcccgagatcatcaagctttgtttccactcaggttggcccgcacatctaatttttgactaaggtaagaaaaatttatgcactgcgaagtagttaaataagaaacaattataattgtgagtgcttcgattaatatcgagattaatgatatgtatttgttatgactcaattatgatcgaggaaaacagacggtcattaccgttattgtgaatgaataaagatacagtcattaccattatgagtaattactcgttgaaaccgcgaataggtttcttacttatcgtttactttatcgggcaacaatagtgacatacatagctcgtggataacgagtggtaagggtgctttatgaagtactgcgattatgtgattatagggttatgagattagagtgctctgtgaagcactgaaaatatgtgaatgaatgtctgcttagtgtaatggtgaagtagttgactataagatgctagtattttcttatattgcgtgatatatgtgtttgtattgatgttaaactataaatattaacatgttgactttgggtgaatcacgagtatgtatattgtgttgtgatgcgaatatttgtgtttttaatgctttcgttctagtagcttttattgctgagtcattgtaactcacaggtactttgtggtgcatgtaaggaggttagaagttgtatttggccttgagtcagatgtctctcagcgatgtacatatcagtcgtggtgtcttggcttcccggaagcaagatcagcccctttttctatgtttgaaaatataactttacttatgtattagtgtttttttttttttgtaaattattataaagaatttttataaacaggggatccccatattatagtagtacttggtgtggaagtttttattcaaatttgaaactatgaaagattttaatttaaaccacactttttcctaaacgaatagattagtgaaagataagtttgtaaaagcacacacgtagcgtccctaagggtcagggcgttacaagggggatagctcttgggtgtataatcctggacaacagaatgcattgaggggatatcccaataccacctctaagatgtgttaccaagtaagaagttgaacaactattaacaggagtgcataaaggttttacggtaattatgccagggggcaaagctaactgagtgtagatgggatcgaactggtgcattgacctggcctcaaaaaggttggctaaccagggcctcagtaggttggtcagctagggaattaacaacctagccaatcactacctccacaggctagccagccatagcctcttttaactgaccatgcaatgctccttcaacgtggctggccacctgatctgtaccctggctggcccgatctgccaacagtctgctctcatacttttggtctactatgaccaagaagtaagccacatcttactagcagaatcccttgacaaaagggaaagaagaagagactaagcgaacttaaagtggcatgcttgccagtaaaaagttgccaagtacttcaacaaacaaatcaagaaaacaaatcctttagaggcttaatgctctaaagaatattccttgataataaagatcctgcagcaagcatgtttggaccaaactgaaaaggtccacaccaagtaacaaaatgacaagaaaaggtgcacataagcctcgcgagtacaacgagaacttagggttggctcttctaccaaaatattggaatagagaacatctcgttaagtgctctctctagctaacatgtatagtagttcctttaacgtttcaccgtgtaggaattcacaaaagaactagtacccatcgctcttcagcgatggcctcccatcactcttcagtgatggcctttgcacggtaagtcctatagaggtagccaaatataaaagagctagtatccatcgcttttcagcatggcctcccatccaggggcggagctaggattggataataggggcgaccaacatcaaataacacaaataaaattaattggagattttggtaactaaaactcatttttaaagagtgcatgtccataaaaaaatagggtaaatatcattttggaccctgtgttctgcaaaattactaattgaaccttctgttttgttaaatgataaaatggaccctgaactaattttttgtcaaaataaaatttaataatctgatctaaaggtatgaaaaaactgtttacattttctgtatntgttcgtgttagaaattgtctttaagttggttatatcaaaaaaagaaattgtcaaaaattaagctcagggtcttatttttactattttagaaaatagagggtccatttagtcatttaataaaacaaaaagtccaatcaataacatttacaaaatacagcgtccaaaatggtatttatccaaaaaaagtattgtatttttaatttttgaaaatatatatacaataaactataaaatatgaatcaagaaattaaaataaaaatataccgataatatggttagaaaactaaagtatcattatatcaaaatttacttgtaatttttaaaatggaaaagaataagagatatgtccattaatattaagaatattatattttgtatattccactaatattatacaaatttatatatatttgtaattaattagatatgtacacatatagtattgaaaaatttaatagtgcactgatgcactcttggagaattttttattcaatttttatttacggtcgtgtacattgtcattatttaagacattttgtaaaattttgataaattcaaaaaaatttaaaatactgaaaatagggttcaaagagtttgttgcactcgcacgtatctcttttattttataagcatatgaaatagactatttgcacactgttttctatattgtaaattattctaaatttatcaaaattttacataatatcttaaataactataatatacacaattataaaaaataattaaattaaaatattctcctaaataccaaaatagataagtgatacattagtgcaccccttttagaatgtattataaaagcacattttatgtttaacttaaataaaaagaataaaaaagacacaattatacaatattgaattttcattttaaaaaatattataattttacacctagacatatatataacatt

SEQ ID NO: 29134 - DNA, 2315 bp, Cannabis sativa
gtgtgaaagaaatcaattctactggtgtgatgtcacaagggtatgatggacattgtgaatgagagaatccctaggctgattgtgcaatcattgtaatcatttatttttctaacaaactttccgttatgcctaaatctttgtgcaccacgtgtactgctgtcataggctcattttattccctctgtattcctctgtattggccgtgtgcctatttaatgaaaagtttcctcactcactctttttgagttgagttttcataatcaaccattaaatttcacttggtatcagagccacggctcctttccctaccatgtcgactgggcagagccaaacagctcaagtcacacctgcaagagcaggagatggaaactcccatggaagctccggagcacagtcgtcaatggctgctgctattccctctctggcagctcctttcagcaacacgctgagccagctgttttcactcaaactggaccgcaacaacttccctctgtggaagacaatggtgttcaccattatcagaggtcacagattagaggggtatttaaatggtcagaaaccttgtccacaggaggttgtttctattgaatcgaaaaatgacagtgatgaagtcattactgaactacttcccaatccagattatgaagcatggattgttcacgatcaactactaatgggttggttgtatggttctatgtccgaaggaatcgcatcagaggttatggggtgtagatctgctttctctctttggtctgcacttgaagagctttatggagctcattctaaggcaaatatggacgatctacggactaaacttcagacagttcgtaaaggaggacagtctatggtagattaccttagacagaagagagtttgggccgactctcttgcacttgcaggcaacccttatcccgaaaggcatttaatagccaatgttctgtcaggtttggatatggaatatttatccattgttttattgcttgagcatcgtgttgatcttacctggcaggaacttcaagggtcactcctcagttttgacagcaagttggagcgtttgggggctgtctcaccaaacaacaaagctcttggaaatccatctgctgctcttgctcagaaaccatctcagccgagtaacagagggggctttcatggaagaggaggaggctatggaagtggttctggccgtggctatggcaataactctgcctatcaaaatcctgcaggaagaagtggaaacaataacagaggaagaggcaggtttggtagaggtaattctagacccacttgtcaagtttgtgggaaatatggacattctgctgctatatgttacactagatatgatgagggatatatgggtcagccaccacagtcagagaacactcaaagccaggacaaacaagctcaactaacagcccttgttgccactcctcaaactttaaatgatgacagttggtacgctgatagtggtgccactaatcaccttacttctgaagccgagaaagtgaacaacaaagtggagtacaatggtaaggaacatatgattattggagatgggagtaaacttgcaattaagcatgttggttctggtatactaagtctcaataattcaactcatttgaaattgaatgatatgcttcatgttccttccattactaaaaatctcattagtgtgtcgaaactaacctgtgataacaatgtatcaattgaattcttccctgatttttgttgtgtgaaggatctaacaacagggatggaggtgctgcgaggaacaattaaagatgggctgtactgtttcaatcctactgctgcatgttttcacacctctgtctcctcacatactcactcacccgtgtctgcaacaaagtctcagtccgagaatgttggttcttctttcaattccctaaaggatacttggcatagacgcctaggacatccatcaatttctgttttaaatcaagtgttaaagatttgtaatgttaaaaccaaaagtaatgaaacacatagtttttgtgatgcttgtcagtttggtaaatcacacttgttgccatttaaaaattccaatagtcgtgctactcatgtccttgatctaatccatactgacttgtggggtgcttcacctgttgcatctcacacaaactataagtattatatacactttttagatgatcatagtagatacacttggctttttcccttgaaacagaaatcggatgctctacaagcctttacacacttcaagaacttagttgaaaatcaatttgagagaaaaatcaagaaacttaggactgataggggaggtgagtttcaggctttct

SEQ ID NO: 29135 - DNA, 5928 bp, Cannabis sativa
  modified_base (41)..(41): a, c, t, g, unknown or other
  modified_base (198)..(198): a, c, t, g, unknown or other
  modified_base (225)..(236): a, c, t, g, unknown or other
atcatagtgcggaagacggtggtaaccaacccgaaggaganaaagagatctaggctcagatcttgttattactctgcgacagaaaggaacaagggttagagatctgagcggaaatagtcattattattctgttgtatcaatgtaagattttctaaactcttatgtgtttaatttcatcgtattagaaaattcatattnaggatgttaatgaaacatacatggtannnnnnnnnnnncctggtaaaataaatcccaacattaagcacatacttcgctgtctccagggtactattgataaaggactattctattctaataattgtgggtcacaactcaatggctacgcagatgcaagaaatttattagatccacataaggctggctctcaaataggctatttgctcacttatggtgacacttttatatcttggaggtcaacaaagtaaactatactggctatttcctcaaatcttgctgagctacttgcaattcacgaggcaagtcgagaatgtgtatcattaagatcaataacataacatattcgaggaacacgtgaattaacatctaatatagaagtactagcagttctctatgaaaataatgtttgtgtcgttcaactgaaatgagggtacattaaaggagatagaactaacacatttcaccaaaaaaattctttacgcacaatcttcaagagaatggtgatatcaatgtccaacaaattcaatcaagtagtaatctagtagacttattcacaaagtcattactgttgtgtaaaatagaaacaatcaatgacttacgattcagtataccggaccaatgaacacgcaacataatcaagaagcaataaataaagagatcttagaattcaagtaatgaattaagcagtaaaatagaaaagaatgacaccaggtttaacgagtttgagtcatgtgcaatgctctacatcttagtcagaacaacaacccatcatatctttattaatatcagtatttacaaggttacaagaatcttcacaaactctcagagattacgagaaaaggcttctctctctagtttagactctctttttcaaccttacactatcacgattttcactcaagcaataatgatctaattcttacacaaattacaaagattgatagctatttatatatttacattgttgcctaatatagctctgaaactatcgtggcacatttacaccgccttaaaagttctagctcatcaccagcaataataatccacgttagctttgataacacactttcagtacagacaatcgagaagctttaatactgactagctatctggataggtacaagcgctccttcctagatgaacagccaagattgacgtggtacatacgtggtacaagcttacctggaaacaccttccgtgttgtacaaagtcttctacataagactttctggatccacaccaagcttcccgtatctactcttcggattcacagcttccctttcggatgacaaaacttgtaaccataatcaacaattaccaacatcaactttcgagaagaaggttcacaagattagaatactccaagaatgccaaaatgagagggtgtaatttcatagtgcactcttttttccttgatcaagttttgtctcacaacaaaatttttaataagacgttattatggatattcaagggagagtattataaataataaatatttctaaatgtccaaatcttttcaaatcaattacttgtaattattattctctttttcttaattttttaatctataatcatatatttgtataacactaaaataaaattcttagaaaattctatctcctttctattttctttcacttgtggtgtattattttataatcataataatatatatacatgaaacaaaaatattgtcaatgattaccaaacataaacattagataatcctattgccaaacaactatttatttgaaatactaataataataaaagtctccatccgaagccaaaaagcaaggtcggtgactcggttgcatcatatctaatccttatctgacttctgactccaaagaaaccctcccgtattgttctttttttatcattaaataaatatggggttacctttttatttgtttattggtattaattaagatttatattttcgttttgagtccccgaattcccatttattatcacgaaacttccatactcattcatcggaaaaacaaaagaaataaagaaaactctctctctactctctttacgtcttcttcctccaatttccctcattcgaaccctaattctccatattttgaaacccttctccactcctgatcttagcaactatggcatctggatcttcgggtaggcccaactccggttccaagggattcgatttcgccacagatgatattctctgctcgtatgaagactacagtaaccaggaatcctccaatggtagccatggggatccagtgatcacttctagctccggccaggtactttgatgcttgaaatcccggagttgatattaattaagctgttatgttatggattcttatataatttagttttaggagcgagatagggttttgggtcatatcgataattgatgtatatctgttgctctcctgagcaagacctctatatatgtgtatgtgtgtgtatgtaaggccatttccatttatttatatgtggtggatgagaatagtctgatcttttcgatgttattagaattcatttgcctctgagtctgattcgttgtacatatagcaaagtacccaattgcttcggtttgacttttgtaaattgtgattcgaaaaaattgaatagaggcgtgtgcctttaacctaatatctgttggagtttcttcttttaaaaaattgtttgtttctttttccttcctttctgttggattttaagagctcaagattcgagtccgatggattgataataaagatatattttgtgactatttttataaataaatgagtcttcccaatgagcgggcaattaaaaacccagtctaagtctaaattaaagcgagaaggaaattatgggtatcgtgaattattagaaaacatgacactaaaattcatgtgttcttagttaccagttgttctattagagttaagatatcatatcactagatgttatttgaatttaaacgtattttcacctttgttttgttttctctgaggttttatgccaacattacctcaatttttatttcaaaaaaagtttatgcaggctgtataatgtccttgacttgctgtacccgtaacaagtttctgaacaacatattttttttatgcatcaggatttccacaacggtcgaaggggaagatcatcaatttttccaggtgctacttatagccagccagaagattctttcaaccaagatctggtttctgctgtggaaaaaagcttgaaaagaaatgctgacaacctcatgcgttttcttgaaggcattagctcaaggctttcacagttggaactgtattgctataaccttgataagtcaattggggaaatgcgatctgatttagttcgtgatcatggagaggctgattcaaaactaaagtttattgagaaacaccttcaagaagtgagttgaaactcttaagtttttaaattaggaatatcttattttaacttgtcttttgttcattcatgattttttttggcacttgtgtttgaattttagttcttttattcttgtgcatcagagaatttcttatgcaagctggagtaagttgtctggtgtctctcattaaactactgaagcagccttattttattttgcgtgatttttattttctctaccttctgagcactgcttatggttatgcaggaatataaagtttggtgccttctaaaagattacatgtctttattaaatcatatttcagggatagcttggatttattataatttaaacgagaaatacatggttaaccataggaaacaatatgccacttgaggctagctcaagttgttggctgtgtgtgtatgggaggggtgaacggaacgagtcctcttgatgtatatgtttatctgtatatatggatgatatactaagtattaataacatttgtagatttgctaatccacgttcatgatgttgccaattttatgagttcaacatttttttggaatgtcttctgctttctatagccaggtgttgcattttacttagatcactaatatggggtgtttggtatgggggtttgggttcttggtgatgacaatgtaaaaccaaaccaaaccaaaccagcttatgattaagtgagcccccactttcaagtttattagtgaggtaatctcaagctctttaaatacttgagtttgagattcccttaatctcaacccctcaactaaaacccaccaaattaaactcttataccaaacaccccatataggttttagcatgcctccctttatatctcttgttgatattatcgcgttgctttgcttcttcatgcaaataaagctagattaacttatttcacaatatatgttctaggttcacaggtctgtacaaatcctaagagacaaacaagagctggctgagactcagaaagaattagcaaaacttcaactggcacagaaagaatcttcttcatccaaccattcccaatccactgaggatagagcttcaccgcagactgcagatcccaaaaagacagagaacacagctgatactaataaccaacaattggctcttgccttgcctcatcaagtagcgcaaccacagcagcctgtggcacctccccagcaggctccatctcagaacgtctctcagcagcaatcatattatttaactccacctcaaatgccaaatccaccgaatccaacacaacaccctcagagtcaatatgtgacttctgattctcagtatcggaacacccaactgcaagaccctagagtggcaccacagcctgcacagtctcaggtaaatcagacacctccaatccagcaattccctcagtatcagcagcagttgccccaacagttgccgcctcagcaagtgcaattgcaccaacagcctccaatgcaaagtcaggttaggccgccatcaactgtgtaccctccctatgcaccaagtcagcctggaaaccaacctccacccccagagaatccaaatggcatgtcgatgcaggtgtcatattctggtattcctcaaccaggaaccagtcgctctgatgctgtgccttttggttattctggcgctgctagagcagctccacagcagccgcttccacctcagcaaattaagggagcttatggaacacaacctggagacggatatgcagcatctggacctcaccctgctcttccgcctggaagttcatatatgatgtatgatagtgaaggcagcagagctcattatcaacctcaacctcaaccttctcacttcacccatggtgggtatcctccagcgagtgcccctcttcagactcaacaaaatgcgggccctaatcttatggtccggaaccaacagttcatgcggaaccatccccgtggcgagttgattgataaattgttgaacatggggttcaggagtgatcatgtttcaagtgtgattcagaggatggaggagagtggtcaacccattgatttcaattcggtgctggatcggttgaatgtacacccttcaggggcttctcctcagagaggatggtcaggttgaagatgttttggtatcatatctgacatccaaatttcagtggtaatcattgcgtgttttattatgcattgaataaaggctgatatattgtccacggtgctctcgtgtatatggttagagtcatcaggggtattgtatatctattacctcattccaaggccttattggtattgtatttaaggcccttctttaattatgtcgaaatagaactcactttctggtagatgacaattgcttcatttctcctttttttttttttt

SEQ ID NO: 29136 - DNA, 4179 bp, Cannabis sativa
tggtttataacaataaaaaaataatgtaaactattgttgagtagtcacccatatatatttatataaacacaaaacacaaacacaaaagaaatcatctttcaagcaaaaagcataaatgaaaaggaaggagacactaatttattgatcaataagctcactcgagataagttcgtgatgttactaataacttctgacaacacctatttaactaagctgtgagccatgacattaattgatctaaaacaatgagattgactagaaaaataaaaagcaaaaaagctatgtctaaaatcaattaaaataggaggccatgaaaagttgattattgaatttcaacaccatattcatgcaatcagattcgaatgatacgtttcaaaaccctgtaatcgacactggattgtagctatggtatagttcttccaaatgtataagtctccaaaatttgttcttgttatggaaagttggaagtcatccggaacggcgttcccaaaagtctatcttgtccactctgaaaggagtttccagggaaagctagacttcttccggaaaggagtttcgaatagctagttattccctcctgaaagggagttccgaatggtcgactccagctgtcactttttctatctgagaagttccttcagcgtacgctctagtctttcctctaggaaagtttacatctcatccaaaagcactccatcttaagcgggtgtggaaatatttttatgaggagtttgttaaatttgttaagtcgtaactaacttaacaacttagcatttgtagccactaactttgggatcgatattccttatctataaataccactaacacttatcatttatagtaagtgattaacaaaccagtttctagaggtgattttggagagagagattgagaggaagagaaagagaggtacagataaaaaagagagaaattgagttttgattttgtatgaaaattctgaagatgaagaagattcatgggtaagagtgtgagagatgaacactttgataggatccaacagagaattgatcttgactgtaacgtaccttgttcttactcaatcaagaaagaatatttcggtggtgttccaaaactagagtagagtcatagatcacatatagatctataagacttgaactagtatatatcttggtgttgatttactgtttattgatttatttgcttttcgtttgattattcattttaggtttctagcttatttgtactatacggattctttgacttgtttgctaccagattacccataggactagcccatacttacatcttgggaattcagtagtacaattgagtgggagcattaattatagatataaattctatagcttctatagctatttagatgtgaaatgactatttcctaattagaacttggctaaacaacacaaataaaagagctcttattttggtaattatattagtttactaaaatacatttataagtagctaagtattttaaggataaaatacatcgaagggtaaaacgataaattttctctacttaatgtaagccattcatagaggatcaatgattgtttagattgaaagaatggataattcagagtgtatatgtatttggtatatagatcgatctatgtaatcaaaagtgcaattttgaatcgataataaagtaaggaggaattaatgagttgggaaatttacttagtgaatttcaagtctacttatttggagcttggttacataggcctatattcccaacattgtctcagataatatcgtcttgtagactcaattaattgatttaataagtcaattagaattcaaaaaatagagtatgtcttatttaagaattttcaccaattttgggccattttaagaagagaatagaaacaagggtttaattgttaattaagactctttataactctttatagatctaattaattctaattaataaatatatataaatatatctaaatatatctaaatatatctaaattgtataaattgtattttttgtattttatttattttatttaataattattaaattaaaattaataatatttaaataattagatgtgattagtagtaaaattagaaaagacacattgtttcactaagttgaaattgagtggcaaaaatctaactctatggcccattagtgtattttggctacgggatagattttaggcccaatcgtattttgatttttgtccatctcttctaacctgaccctagtgtgaaggctataaatagaaagaggtgagagctttgtcaattaatgattctaaatgattcaaccctaggtcagacaaagaaaaactctcttcctcttctctttcaatttcgaaatttgatagcctatttctcaatctcaaaatgtgttccaaaagttaattgagtaccagcccacactaatcaagatggtactcaaacctttatagaagatcgtgaagaattattatctagtttaaggaaagctatcctggttcaatacttggtgatactctgctacagaaaggatttgagggataaagtactaaacggaaggagtcgttaaatttttctgccattaatctatgtaatcctaaactctaaggtatttatttatcgttataggtatttcatatgttaggatgttagattatatattgtataatcaacatatatcttagtaaataaagagcctagtaaaataagtttcaacaccatccaaatcacaccaaatgaattcaaatcgttttaaaaccatattttcatgaaatgaaatcattaccatggctctgaggattgttaatgaaacttattttacttggatctcaatttactagcatgtatgttagattatcacataataatctaacatcctaaaatataaaattcataaaatgatcaaataacaagtaagagattagaaatctttacattggttgtagcaaaaattagtgactccttctgttcagtcactctatcccttaattccctttctgtagcagggcaagtgatgaacctagataacttccttaaactcaaaaagtgacaaatttttttagtcttctgcaaagagatctgagtatcaccttaaatagtgtgggttgatactcaactcactattggaataatttgagagggaaaaattttatagaatttttgaattcacttaaggaagataaaatgaacagcttttcttgacaaatttaggttaagtcactctaattaagttatctaacaaagctccatcatattccgcaaataagctctttattggactagggtttggttaaatgggctaggaaaaagagaacaggtcataaatcaaaagccttggccgaatacacatgtgggtcatatggctttaatttttgtcactttatttcattaaatgaaataatttatctttttctaaaattatcatttatctaatttatttatctaaatattatctttatctatttaatgattataaatattgtcaaacaacgtctataagagtaatagaataaatagcacttacatttagtgcaagcaagttggagatttttgggatttatgccctaaaagcaagttattaatggataatatattacaaaatatataaaatacaattataagataaatgatacataaattatagaagtagaattattaagtatatgaaaattccttattcatatggaaaagatattatcttgtaaggatgtacaagagaattgagattatacaagatgaataaagattatacgatttactatacactatacttctagtgtgtgtgattttgattcggatcacatatgtggatagacatgtagtaaaggtgttgtgtataattcgattatgcatgactggaccgatatgtaataaatatcttttattaacgcaccatttaccataaaagagttattcatatcacaacgatgatcattagtagattagcttgaatcctgagtatacatgaactcatgtttgtgttcattgagttctttgattcactcattaaagtttctcagagaagatgattcttacaacttctattttaggagcttataacatgagtggctggaaacttgttatacaatattagttcccttatagctagtgttaattttaggagtgctaacagttagatccaaatctataataagttataaattaattgttcacattgaattaatggtacataaggaatcaaga

SEQ ID NO: 29137 - DNA, 1028 bp, Cannabis sativa
aatgtcaatgcagatattttcaccccctttagcttccctttttataaattggattgaaaaaagggaagctaaaggcttagattgtagtagtgctaattttagaggcattcttttcttaggaacaagaacaataacaatatcattaattacagagaccttagactcattattaaagacatccaagatagccttataaaactcaggacccaaatctgaccaattttttttgataaaaatgagcatttagaccatttatctcggggccttatcactagaaaaatgaaataaagtctccttcacctcagcttcctcaaaaggggctgcaagcaaagaaacctaagagggataaagtctacaagagatcccagtcaaaatagcagaaatggcatcccaatcagctcattgggatgtaaaaagattagtataagagctaataaaagtgtcaacaatgactctagtatcactaacagggtgtcatcatcaagagaaatggacctgatgaagttggttttcatcctagcagagactttgtgatgaaagcacttagtgttcttatcaccaaccttaagctagttagtcctaaaatgttgcttccaataaatcatctttgtacaaagctagagatagctttgttaattataggttctcttaatatatttattttacttataaattttcaaacctgtcctattattgttgccctgttataaaatcaacacaaattaacaatattgtacatatgatatataattggcttttattttaggtaaaaagtttgttaagcactttttcttttctcatttattgtttagttaaacccttataaaattacgaagaaaggagaattatttcatatactattttttaattcttttttttttttaatttacagtttgaattgctctagtgataggttatctgttggttgcaatgtgagtttttacttgaattttcgtaaaaatgtaaaaaaaattactttgaagtgtaaaaataaaaaaaaatcttattatttatttatttttgtgtaa

SEQ ID NO: 29138 - DNA, 2935 bp, Cannabis sativa
agattaataaaaaatttaatcagaataacataataataatttatgtaaaagtatatacttttaaatttattatgtttataaaattatattttttagttaaataagacataaacatattaaattgtctataatatgtcaaaacaagattgtaagtaaacatattataatcatgttaatgagttgataatttaactaaaattatgcatgtttctttatataaataagttaaataggtcataccagatgatcaatttatttataaacgagttaggtttatgttttaatttttaatacgattaataaaaggatttggtttggattcgatcggcatttgcttgaaatatttaagtttcaacacaatacgaaaaagactcatgaacacaaattttcattcttactgtgagcttaactcttatttttttaaaatgttatctgtcaatttattcgaattagcaccgaacttttgaaaatgctctcgaagataacaaaatatttaaatcttattttttttaataataaactattttaaattttaaaaaaaaaatacaaataattttaaataaatataacctatataatcattaaaaaaaatagaatactagaaacctttttgaataaaaagatggaattgaatcccctttataataaacttaagatctttcatattgtcactttattaatattaatgccatgcaattttatcaataattaataaaaaacaaacaattttgttagaaaccattagaaagaattttttgatagtgtaatacaaatgatatgttggtaataattggattatcgtgatctgttatatctaggtggatcccaagcataaatatatattattatttatacatatttctatattaatattactaattttatgtcaatgattttgaccaatagaattgtattggaattaataatctaggcatggtcatatattggttgccagctgagcaagggaggtaaattgaaacttacactactcactaaatgaatgggaccatataccatcatatttataataataaaaataataataatataagtaatttatagtataaatatttaaatttaattttaatttataaattaataattaaacttattttttaataataataataattaaattatatgtttagaattttcataagtagaatttagtgtcaaatcaataatgatgtgagagtctttaattagtttatattattaaatttttattttttattttaaaaattaatttaaatataataataaaaaataacacataaataaaaatgacacttaatagctaaataactacgaaaattttaaaaatataatttaagttttacacgataaattacttttaataataataagaataataaaacaactaaaagaactaattaactactaaattaaatttctagtactgagagagatataaaattggaaaatgtttcaagggttttgtttcttaccacacaatccctatccattttgaatctaacataaatagttagttaaaataaataaatataattttaaaaaatagtaatttagccccacacaaatacatcctagtagtcctactacttttacttctttaagaaaagttggtgcttttaaaaggtaggtgaaaatggtaatgtttatcatgagtttaaactaaattaatatataaagcttgctaaggtagacatcacaaggacttaggggtgaacatgatgcttaatttttttttacaaatctaacttggattcgagattgttgaatctaaaaaataacaaaataaattgcgacatgtttctgttccgatttgatattgagtatagtttttcgctaaaaaagatgcatctcgtttcataacaagtaagaacttatatctaatctcactttgtttattttacaagatcgtgacaaaatcaattactctaaaagtgtatcttcaatagagtgttaaaaaaatattgtatagttaaatttaacacatgttaaaaattatactaaatttaacacaagatataagtgttgtgataaatttaacctccaataaatactgccattttatttattataatattattaattattatgatccacttttactaaattttatattttttatttagtatattaccattatttattcaataaaaagataaaaacataataattttaatatattttcaacaaaatataaaataactatcaatataattaattattttacaccttagcattgaaatacaattgtaaataataaactaaatatcatataaatttatcttttatactaaatttaacacaaattttaaatcttacattaaaaatgatcgaatattaataccaaattaaacaaacaatatacaatataacccttctctaaggaaatgttggagaaaacaagactattaatttctatttcacattaacatatttgaacttcaccaaaagtaatatttgaaagaacattttcaaatatatgttgcaattataagattttctttgataacaaattaagaaatgcttttgagagattagatagtggtagtggtagtagtagtagtggtggcatggtgtaccataaaggtgagttataattataaatattatagatttactcacttacactccatgcatgtctcattcattcattcatttcaatatctaaataaccaaaaaaaagtgatattcatttttgtacaaatttgaacaagtatatcaaaaatggcaaaaaggggtagctggtaaagtatagaataagaagatgggattattacttgttaccactttacagctatgcctacctattactaatactatactatagcttacagtactctacactcatctatactgtttagctagcttcttgtttttcttttggaacttgtggaagtaataactcttaatttattatactaaaacacattaatagtgtgtt

SEQ ID NO: 29139 - DNA, 1018 bp, Cannabis sativa
  modified_base (102)..(108): a, c, t, g, unknown or other
accactataatcctttgtctccttattatttccagttttctgttaattatttctcattcccagtttgagtactcgccactctaggttgaatactcgcacttnnnnnnnatataaatttctttctgttattaacaatatcatgtaaaattggtgttgtgaaattcactcgacaacacctaccaaaagaaaataaagacaaacttatctggaaattacatgtggacgggtcagccactgatcagcttattggtacatgaattgctctcatcacacctggggcaacctttggagggagtaatcaaatttgggttcatagcctccaacaacaaagcagagtatgaagcaatcatagctggactaaagcttgctctggaggtacacgctgaatacagtaaagtctacagtgattcacagctggtggtaaatcaagtctcaggggagtacatggctcgtggagaaaagatgatggcttatcttagcaagagccaggacctactcgcacaatttaagggttacaccctcaagcaaattccaagggaagaaaaaacaactacagatgccttggcacaggttatgagcatcacaatgacagatacggccaactcagtcccaatctaattcttggaggtatccagcatcacctgtgcggaagaagtcaaaatcatagacacgacactgacctacccatagcagcttatcttaacactggagaacatccaaacaatagaaatgaggcttagaagatgacgagaaaagctacacggtacatcatagtagaaggtgtaatgtatagaagaggcttctccatgccactactaaggtgtgtaaaaaaagaagaagttgcacgactcttgtctaaagtacacaaaggattctgtggtaatcatgttgtggggcaaagtttatcgaagaaaattctaaggtaaggatatttctggccaactatgatggaagattcaaaagcccatgtaaagaagtgtgataagtgctaaaaattttcaaagatcccccgcgcacc

SEQ ID NO: 29140 - DNA, 2014 bp, Cannabis sativa
tggtaattaagtaatattttaaattaagtttaattttaattaattacctccgttgagccaaatgacgagaggtttagacaagggtttatgaagagcctcagtgagccagtaaaagagtgctctaccagccactcgattaactgtaacataccctgaaaattggtcaaaagtgacctttggctgaccaggaagtgccttaatccgatcaccttcttcattttcctcttctattcctttgtttggctctatatctactccaccattactactaacaggtgtcccaaacagaaaaaagctgaccaaacaaacggccaagatctgtactaccactactcttgctgccataaccataagctacctgtaataattagccccttaaaaataataatcaaaagaaagaagaagaagaagagaagaaactaaacaaagaaagaaagagaagaagtgtctttcttcctagttgtgtgtgtgtgatgggaagtaacgagtgtattattattcagaattggattaaataggagagagagtagttgtgatatgtcatcactatttactgatcagtactagtaagtagtaacataaatttggattgagaaatgatattgttattgatttaattaagtattgggtctcgtataatttatcattagtcatttacaagatgatatgtctaaaggtgctaagcactactagtatccaataacaatgctcatttcgattttggttttggcacctctctcccaaattaataagttgctaaattgagcagccttcacctgtgatatgacaatactacccccgtgaccataattaacatatatatgtaagtaactctatctagggtggggggtggtcttaattggtattaaaaataggggcaatgggatcacatgccatccgcgtgcccatgaaacaatgtccctttaatcctccattaattcctcttgtattcatataccagactttgactaacttttatctttattggctttattattctctccgatcctactactaccacccaatgtttatttttattaatttgtctaattcaattctttttgtttttctctttgattttctttctgttttttgtttggataagatacaatgaacactgtgtttttattagatataataattaattttaattcagaatataaatatgagaattgtgtcatctttacacatatataaatatgtatatttatggtagttgagagcatatttaattttgggataattactactatatatatttatgtagtgatgatcttaatatgcggtttctggccattattgtttatgggaaagagggtattggacaggtatgtatccaaaaaagtagctagctaggatgctaacctgggatttttttaattcttgaaattgaaatgggtattcaatatcaattgtcaaatgctagcttgctgtaatcttcattctatatatatactcttaaactgcatttggtatatatatgcatgtgctagtacactcatcaatatattaatattatatatatggtatatgctgaattttcaagcactgatattgttattatatgtatgaatgaattagcttcaaggataatttaaattgtaccctttacttctaaaagttgtttaattacacttattccacatcacagcctcatttgagattttcacatatcaaaatcttggaactatgtacaactattactccttcctatttaatatgtacccttaattttatgtgcatatatgtgatgccatattaaatatgtacatattattagtctattaatctcttatttatgtcatttaatatgtgcatatatgtgattttatttcaactctcattttaaattatttgctcaattttttaatttccaattcgccctctctttctcgctttctctccttcaatctgcaactaccatcctcaacaacaagccactaccacctctatctccttcgctatctctcactctctgcctgtccgtctctccttcgtcccttctctctctctc

SEQ ID NO: 29141 - DNA, 3217 bp, Cannabis sativa
catctacactcagttggctttacctctggcatgattgccatagagcctttgtgcactcctgtcaatagatattcaacttctttcttggtaacacttcatagaggtggtgttgggataccacatctatgggttatgctatgcaggattagacatcctgtagccatccccctaaaccctgctttctggaaaggtttttgtttggaggtatgttgctgtaggtgtatccatgttggttgtcttacaagtctatttcttttgataagggaggattagttctttggagaactaagcatgtaccaagtttgccttggatatcaaggcctagctagctagtcgagcaagtacatcagatgttgtgtcgtctttggggacttgccttttagtactgcctttgagctaacttaacaagtcttgaaagtagctcaagtaggtcattatctccttgtgttgagttgtatattcacctaggacataacatacgactacttgagagtcgtggtgtatgtctaggtgttcagcccacacttcgtgtgctagcctgaggccagcattcagagcttcatgttcgggctcattgttagaagctttaaaactgaccttttttttttccttatgcagttgttgcccctaggtgcactaaggtcaagggctgcatcgaaaaagtggccaatgcacctactgggttgagctgttttagctcttgctctcacttcttctctggctcctgcttttctcccaaacttgagagatttagggagatatacttctatgactagccatgaaactggtgagagcttggcctttgctagtcatgcttggttgataaacaaccttttatttaccaggtcttgatggttctcttgagtggttggcctgatgctttaggtttttgtaaaacttgctacaacagttgatcagtgtacacttttatagagtgtgcttggaaatatggccttagctttctggaagccaagagcaagctgtaggtcagcttttccatgagtgggtaactttcaacatcgattagtctcttgctgaagttatatacagggtgttgtgcactgccttcttcttttgtgacatcactcacgacatgttctgtgactactaggtacacgcctagctcttcattgtctaggggtttagatagcacaagtggttaagccaattgttcttcagctcctggaatgcagtttcacattcctttgtccactcaaattttcgttcctctgagaatgttgaagaagggtacacatttatctgtagacttggacacaaatctacttcgtgcaatagtgcatcctattaagctttgtacttcctctaatatgtggcccctgtattcttcagcccgaaaggcacaactttttatcaatacaagtatgtgatgaagcttgtatgatccttagctagtagatgcatctcctctttcttggctttggacaaggtcaaggtgtaatagtgacaggtagattgttgatctcctcttaaacatcttaccccatgccttgttaagaatttcaggcagagtggtagatggatgtttccaccttcaggtcgtataaggctgatcaacctatcatggcactaaaacctgaaggaatgtcaattacgacgaactgaaccatcaaagttcttgtggttagattttctccaacagtgaggggtaatctgatatacccgattggtgtgataccttggcgaaagaagccatgcatcacttgacttcagggtgcaaaatcaacgagttggagccccatcttttcatatgttaatttgaaaaaaatgttgaaggaggctccattgtccaccatgcatattgccacaatcatattcccaatttgtgcagtaatgacgagggggtcattgtgctggaaattgacttgggcggtattgtgggttctctaagctttggatgttttgagccttgtcattcgactgcaaggatgtcacttttgggctcgtgacggggtgtctgagcatagcattccctagctttgctagtcttgcctataatttggggtccaccaatgatgacccttaagtgtcctactactggagtttgggcaaggttgctggtacctgcctgcgtgcctagcaagtcatgtggttgatggatggcttgtgattgcctgttgctgacttgccctatctgggtgtctttgggcatgcattgctttaggagttttggtaggagagtgaagcatgtgcacttttcctccttctcccttacacttcatggcataaggcaatcgttgaagttccttattttgccattatcttggccagagtcctcgttgatgcgtttgcctccaccattctcattgttggagaatcggcagagatcgtctatgctggtcagcacgtcagatagtacttggggcaatataatgccctgtgtctatccagcatggacttgccctcatgtctgggcttgccggatagctttttccaactttataaagccacgagctcgcttaaggaacttcttcatgttgctcgttgagatcctcctaatatctttccagaagtcactcaatggtaagatgcctcctagtatggccgtatatcaaccttcttctgtcaggcctttgaacttggtggcctcagccatgaaccattgaatgtagtcctttaaaggctcatcttgcgttttctttattttgacaagatcctctagtcgtcaaggtaattttctttaagaagagaattaaatatagaactcttgggagaattctttccaagaattaaatcttcccgaggttagcttgaaataccattgttgggctattttagctaaatttgtcggaaagatttggcatcgcacatctccaaatacttgttggagatctgtttgcatctctaagtattttagctgtacttggggatcttctttccccgtgtatatcttccacgtcgacatcttgaacttgggcaagagcaaggcatttatgtatgctgagaatggtgatccccttgatctctctagctcaagttctgaaggttttggactagctaggcccttgatcatgtctgtcactttgaccaactatacttgcatagagggatctattgcaacaggggcctggttgattggccctccttgattgagctgcagccttggattggcttaagcctagccggccataccctaggagacgctatgttcaaggattgccagacttgagtttagtaactaatcttggctggccagccc

SEQ ID NO: 29142 - DNA, 2701 bp, Cannabis sativa
tcctcccaaccaaacgctacctaaatctcctttatcctctctcaaatgcctaaccctcctcgactcatttgttttgtcctctgccatggcgaccataactctccgacccgttgccattgaataaataacaattgagaagatagattttaatggttgaaccaaatttggaccaattctttgcagaaaagtagagcaagactgcaactaattatgactagatgattctacaagaatattgaatgcgcaaattgccttttgaaatattgaaatgagaactacattaaaggaagcctgatagtttcagaacaatccttttctcttcctctatacaaaatttgatgttggagcctaaaaatagagcaacaccaggagcttgaaagtacaagaaccataccactggtctgctattcgaatattaaagataatctctctcaaacattggtgttcatgaaatttattagtactgtgcaatggttgaactttattttgttaaatgctttttttatttttattttgtgttaagtcactcttgacatcaatctgtgtttattaacttgatcaaagtttcattttataaagtgccgctttaaaactctactaagatcaagttaagattaacgcatttaagacatttcaaaacttgagttactaaaccgagatatcacttcaaatgggggaaactatattctctcttcctattgattccaaaacttcaaaccaaataaaaagcaaaagcaaaaagaaagaaaaagtgcctcatcatgttcaatggttagtgaaactgattgctgaccaaactaactacataggggtcgcacagatagtgctcctgtattagaacaaaacatagatcttttgagcaatgaaattttattggcagtgttgtgcattagccacagctgcagcagcagcttccaaaattctcctagcttctgtctccggctcaggtaactcacttgggatctgacaaggaagatcattaatcaggaacatgaaaatggattggtcgattattgaaatgcaaagaatagctaaaaagaagactgtaaatgtaaagagagatatatgcagacctttccgtacaagtttggcgtagtaggtgacgctccagaagccagcaataatcttacaatatcatcatgctcgcctctggctgcatgatgaagaggctgaaaaagaaaatataaaaacaatgagcactgtagagtgaattttgtagaggaagtaacatggaaaattagactaaccctttgtttggtagagtggattgaaggagagatggattaaggggtttggaatgagtcaaatccatccttaggttgcttttgtttggtaagaaggaaagggagcaaatgatggaaattgctatggattgtcaatctcttgggaccaaatgatcctcacacatatgggtggattgatgaaaaaaaattaaaacttatttttaaaataattatatggctaattttttaatattgttatttattgtaaataattaaaaaataccacttctttctttccttcctattataccaaacaaaactaaagaaagatcaaacctatattcacttggtacttttccataccccttacgtaatctgacttttcctatttccatccttcttaccaaataaagtataagaaagaattaaaattgaattagctacttactgtatcaccctctgcatcaactgattctaacatcctctttaagcagtctgcattgtttgctcggctgagtagaaattggactatttcagtgaaccctgcaaaatatccattgaagcacataagttacaatcaatatggaaaactctcaacagaaaagattatcatttatcaattctaatggcaacctaccgctggcacaggcatcatgtaggggaatagccccatcttcatctttagcctccaagttagctcccctttctatgagtaactacaaggacacaactactctactcagtataataaatctaaaattcaaccaaaagaagataaaaaagaataaatgaataaactgtttaactgacctgaacacagggcaaatgcccatagaggcaacaaagatgaagagcactgtccccgtcttctaccggttgatcaatgcttccttctaagttatctgcgtagaggtaaaagaagaaaaataaaacttcttctccattcaaaagtccaaacaccataatcatttaaatgtattatgtgataggttttcccagagaaaaaggtatagctttacaggatcatatagacaaattttgtttaaaatctcaaaattcaggttgtattaagccaaaattaaactttgagaccatagagtagaaaaccctaggttcgattctggaaggttgagactaagaaaaggaatggagttttatgtttgttcgttggtgtttttggtgggttgaagcaaaacaaatgaatttgggcaatgaaaatgcagaaaaaattggaatcataaataaaagagataaaaaaaagtgatattaaagttgaggaaaagagaagaaagtaccaagagcgagacggaaggcgtcgacgttgccaagctgagcagcggaggcgagggcacggaggtgaggaggcgtgtccaagtcaagctcacccaaatcttcgtcgaaaagagcattgtcatcttcaaagtcatcttcttcctctagaccattacgcctccctggaaccgccattttttcaattc

SEQ ID NO: 29143 - DNA, 1581 bp, Cannabis sativa
ctcagatgccaaaatagaaagagtgtgcatcggtggaccctttttagaaggtgcattgtagaagtatccttaaacatatggtcaattactttaaagtgaattttagatttatcggttatcttgaagaaagttttgtcaaaaaaaaacataagacttgccactcattagaatcacagggttcaaaacctggttgcaccaaaaattgcagaggattatagagaaagtgaagaataatatttacctgtacggctcttccaccgtcaagacatccaactggaagcatattaaaagcagttgttgttaagccgcacctgcaaaatgcaagaatgacttaccatgaaatgcttatggcgaagaggaacaaatctaaggatgacctgagaatgttacagttacattaccagccagcgatcataagagggtgaattgcaaccgttgcagcatgcattgctctgcacattcgttcataatggtgaaactttaattacaaatgtgataatagataaagtatcatttcggcataataaagattgaaagagaaatagggacatacgcgtaaccaagagtggctctactgattaggccgagaagcaaagaaccttgaaacagcatgcttggaacctgcaccaggtctcccgcagcatcaggattagatgaaagcagcagaccaacaacaaacatcgaaaaggacagtgtagcaccagcaaatggccccgcaagtgatatgtcaacttgtgtgctccgatctggaagaatggatttgaactgcaaaaataatgaaacaccacttgaaaaaattataaacacaaagtaaaagcatatatctaatgaggaaacaattacatcatgtacgcacctgagtgattgcaccaaaacttccgagggtgatattaggaatgaagtaaggaatgctaagtttcacttttttgggaaatgctgccagaaagtgcccaacttcctgcactcaattcataatatgtcaaagaattgaaatatgatttgctctagcagtgtttttgtgttatttctgtgttgcacataatgttgttttttttgggggctgaaaaaaaagggatcacgtggagcagatcctgtccccactcattcggccctaaggcaatttcgaggaccacgtgctagttatagagaccttatacctcatcttgttttacttgggtcatcggtacttacacctcacgggtttcctattctaaatatagcccaccacacagcaagttagtcttcaaggaccaaacataatctctcacaattgaagggccaagtgagagtcaaacccttgacccaagcaagggaggagaccagtgaggcatccctaccacactacactacacaacacgcggtgtgttgcacataatgttgataatatgtcaaaatggtgcatttagagaaaaccaatgtggactatgtgaatcttctagatgacatatatgaaatacattaatacaaaagaacaaataaacaaggcatagatagcttttgatttagaaactctaaagaaaaaactcaacttagtgaaatagtattcagtatatttagttcatcacctcagttcctatcaat

SEQ ID NO: 29144 - DNA, 2215 bp, Cannabis sativa
aaaaaaaattaaattaaatacctgtgacaccagatgaggctcctcttgagagaggagggttgatgataaatttaatttaattaaattaaattaaaaaaaaatagctgagatttgtgaaaaagagagagaagagaaatgaaatgaaagaaggaagatgaagattgggtttgggtttgctatttatgattgaaaatgttattatcctctgtggttgagtttagagtaattggtgtggtcttggctttatggggctttatatgccgtcggattaaaataatagttttgttatgaagaagaatagagagacaaatggaatcattgaaattttttgtgttgggagattgcttttattattattattattattattattattattaaatattggaaaatataaggtgtattttttgtatttagaaaaaaatttagtttaatttttttttttatgattgtgtgcattaaaatattttgtaaaattttgagaaattcaaaaaaatttatcatattaaaaatatagttcaaagagtttgttacacgcgtaattttttattgtgaatttcttaaatattttataaaatattttaaataactataacttacacgattataaaaaaaaaattaaaaaatatttttaaatgtcaaaacattactagtgctcttatttattataaaagcacttataaatatttattttattttattaattatgagaaggaaaaaaaaagtagttggtccacatgatgcattcttctctcctactttattttttaatttttctaaatttaattaaataataataataatataatgggagccaacatgatgcactcaaaataaaaatctttctcaaatatttggaggtcccgttgtttttctccactctaataaaattattatatctatgccccctacatgtctcttatgtattgtacacttataatatataatatataaatatgttataataataaaatcttatatatttaattttatgatgtaaccatgtacatgtattttattagaataagatgatttcattattgggttttaatgatacaaattatatttaattataattggatatgctcctattgtgagaagtgtataggtagcttccttttttttggggaagtttttaataatctattttaattaatatggcattctcatatggacatttaattatttttttaatttaagattcaaaaagtcatattatttatgtgtggtttattttttcggtttaaattttttttatttgtaaaaatacgtactttagtaaattatttgatattcttttttgattgtttcatagtcaatttatagttgttataaggttgattttttttttttgttttataatttatttataattattgtgaggttgatttcttgttgtcttttagttattttcgtactatttacttaaaaaaaattatattttgtaattttaaattaaaaaaaaaaaaataggccgtaaaattattaaaaaaatatttttgaaaaaatcccccccttcccccttttcctaattaactatatttttctcataatatcatacaattaattttaagaattaattcaaatattcaaacgaaaatattatagcatctccaataaaacgttataaaatatgatttttataaaactttcaattgaggggcaaataaaatattcatttgttaccaaaatcccaccatcactaaaaaaaacaaaataaaataaagactataccaaacaaagaaatatgtgaaaaaaattatgcaaagtaacaattactttacaaacataattgatcaaataggttacatgttagtgtagccttcatgtcccatataacatggtacctaaaactcctttaaagatggagagagatacaaacatatttatacacataatttgatattataatagtgaaatactataagaaattactacttttaataaaattattatattaaattatatgagacttaatacctaattatactaatagtaatatgataatttaaataatattgattagtgttgcatttttatatttttgataatatagctttttttgtatttaaaaatatgtaccaaaatattatacgcagtcttatgacaatgatttttaaaataatagattccaatttagataaatttgattggttaaaaaaattactactctttataatattggtttatcggtatatacattataaattatgtg

SEQ ID NO: 29145 - DNA, 2141 bp, Cannabis sativa
aataggctggggtacaagttggtgtgtgtggagacggattcttcgattactcattcttggattacttgtccggataatattcttatgtttaagcctattgttgaggagattatttctcttttagcagctgttggtggtggttcttgttgtgccatttcgcgtgatgcgaatggtgtggcccatgcactagctaagtctgctactaatcctttaggggttcatttgtggacagatgcttgtcctagatttattggtcctcttgtaacagctgatttgctttgatttaataacatactttctttcaaaaaaaaaaaattacaacattctaatactattacaaattttaggcccatcaatccttgtactactctttataaagtcatttataaggttctagctaataggttaaaactgattttggataagatcatttctcccttttaaagtgcttttgtcttgggtcaagttattttttataatatccttgttgctcaggaagttaattatgcattaattctaagaaagtcggaaaattgggttgggctactcttaagcttaacatcgctaaggcttttgataaggtttagtgggattacctagaaagtgtcatgtttcactttaatttttctttcagatttgtctctttagttatgaaatgtctttttactattaatatttactttttaattaatggtgttgttaaagggaatatcaaacctttcaggggtcataaacaaggtgatccattatccccttatctgtttattctctatgttgaagaactttcttcccttcttcgtgctaattgggagagagaccctcttaaaggcctttctttctctaaacgtgctccctctcttactcgcttgttgtgtggtgatgactgtctcattttttttagcggataggggttcctattcgggtcataatgatttttttctacctactctaaagcatcgggtcaggttattaactttgctaaatcctccattttttctctccaaatacttcccaagatattagaaacattttccatagaacctctagccttgaagacagaccttttatcagtaaatacccaggacttccccaatgtttttctagatctagagataattcttttgccttcctcaaagacaaagtcatctctatgcttcactcttggcactctaaatggttctataatgctgggaaagaagtcctccttaaagtagttattcaggctatctctgcttatgctatggcctgttttagattgcatgttaagctttgtaagggtattgaggttgcaatggcccgattcttgtggggatcttctagggactctaagaaaattcattggaaacaatgcagagctatttattagtccaaatttatggggggtttagggttcaagtctctaattcatttcaatctaagctatgcttgctaagaaagcttggagaatctttagaaaccctaaagtgttgctcaatcttattcttaaagacatagacttccctaactcttccattcttgaagttgttcctggtcacaatccctctttttcttggaagtgtatcatttggggtaaggatctcttagcctcgggtttgatttggaaaatttgagatggttagaacattacaactgttaaagatcattggatccctaacaataagtttaaatcatttcgtcatgattgcatcccaaatttgaataagctttcctttttaattaatgcttatggatcttgagatctgggcaagcttcaggaatattttgatgatagtgtgattgatgatatttttgatgatccgatgactggggttaatggtacggattatttggtttggggatgggagattctggcccttttagtgttaatcagcctaccaccctgctctctccaatcagtataatattcctttagcttcgtcctttcacacttctaaaaacttttagtgtaagatttggaattctagagtccctcataaggttaaacattttatttggaggattattttcaattctattcatgtcgctgcttcactctttcagaggcatgttcttagctctcctatctgtcctctatgcaatctatacaaaatttagtaaatgttttctatgatggtttctcgatgggaattcaatgtgttctc

SEQ ID NO: 29146 - DNA, 1843 bp, Cannabis sativa
ttttcggattagaaccataaaaatcgaaaaaccgaattttggattttttttgtgtaaaaaaccgaccaaaccgaccgttgctcacccctagctcttggggtggctagctcttcgatgagtgattaatatattgtattacaacctccaaatggtcttggaccagaatacaactctattgtctctgatatcacttcaagaagtgatgctttgtccattgagaaagtccagaccctcattctctctcacgagagtcgactcaaacatcatcatgccatgacagatctatctgtcaaaatgcaagccaatcttgcatttggtaatgagagaactggaggtgttcgtgttgattttttatgttccatatttgtaacgccctgatacttagacgcactacagtaattttctaattaatgtgccacctttgctaatcaaaaggttttcctcaaaaaccgtgccaaattaaatatttaatttaaaactattaaactttataaacatatatatttacataaatcgggatcccgtgtttaaactgttacaatttatatatcaaaatacttttacaaacttgtcgcacagtgattacaaaatacagcccaagatgtcccgagactgaacacttcaggtcacgccgtttcgacatgtacaatcatcatctgagctcaaactcactcatgttcagacttcaccttttctttacctacacacgaaagtagtataggtaagtcgacagactcagtaagaaaaacatataacataaaatatattactgactctcctcaaggcgcccatacacctatccacaaggcttatcagataagtaagaacgttctttacatttggtactatcgaccatgatatcagtcactaccagcgctatgattgcactgcgggctcgatactatgttcgtactgctatgataacatcgataatacccaaaagtataattgaccatagtatcactcttaaccagtactatgctcgcactgttgaatcggtacgatgctcgtaccactatgatagcatcaattaatactttctgaaattacatatatcagtcaaacctagtactatgctcgaattgttgactcgacactatagttgtgtcgctatgatatcgattcataatatttacaaatcacatacacatcatgcatatattacacgtacacatattaacgtatataacatattctatgttattcttacctcgtctcctaattcatgtgtgtcggtcaacctgaatagaaattcacgcgttgaacggaggccctatgtcacaatgtaaactggtaagtgtttactctagaccacttattttaaacctgaatagaaataaggattttccaccaatctacctacgtattttggctctaaaattatacacatgctataaagctttgaaacggtatatagaacatctaaaacggacactcgagtaaaaagttatagctaaaatactaaagttgaccttcagggaaggtaaccttcggggaagctaaccttcagggaaccaaccttcaaggaagctaaccttcagggaagctaaccttcagggaaccaacccttcagggaagttaaccttcagggaaccaatcttcagggaagctaaccttcagggaagttaaccttcagggaaccaattttcagggaagctaacctttagaaaaccaacctttagggaagctaaccttcggcaaaaactgggcagcaatggcacagaaatttctatttttaggcccctaaaactcgctcctacctgaaccaaaagctaccaaactttcaagaacaacaatttggggtaatctaaacataattcacaactcaaaagcatctaaaaca

SEQ ID NO: 29147 - DNA, 3306 bp, Cannabis sativa
atgaggggggtagtttaggaaaatgaaaaaagttggcatataggaacaattttaataactatacatttaggaaaaaaataaaatggcattttaagcatagaatttcaaatttccctttgaagatttgtaatcaaagacttttattttattaataaataaacataataaataaatgaaatccacacgagaatcatacatttggattggatcacttatcattgaaaacttttaagtgatgaaacttcttttccaattaatataattttgttttaggtacatattaatcagtttgaaaaaatcaaccaattactcaaaaatattctattctattttgtagaatttaggagtgtttttttttttaatcattttaaaatgtaccttatgattatttaaatgtaaatgttatgaaatattgtttatgaatgtccaactcaacatattaattatcacaattaatttttggttgtatttttctttgttacattgatttagtttctcattcttttaattatatttttgtataaatagggattcaccttaacaataaacaacgaaaaaaatctcaatcaatttctctttctctttttttttttttttcttatctattttatattattctatattattttatatattaaaacataaataaatttatgtaagaattaatatattaagtttccaaatttatattttctcaaaaaaaaaaaattctaaaattatatataaaaaaagatgttatgttattttttatgggtttttttatttttgcatttcaaaatagtttatttttgcatttttacggaattctacataaaaatatctattccaactagtgttgtaacttaaattgcaacaaaaaattttatagaaacccctattgcaactagtgctacaatcactttaaaaattcaaacataaatttaaaaaaaaaattaaaataacagtatatatagtaattctcttgttttttatacggtgaagacattttttttcaaaagggtgaaaacacatgcatatattgaactctgaaaaaaaaaattaaacaaaatcatatcggatgggatccatctagaaaaggaagttttattacttacgatatcattaatttatttattttctattttgtaataaatctatccatgtataatataatattttttaacttgtttaatctgcatgtgtttttatcttatgttatatgatccagaacaaatcccttaaattcttctgtatgttggaaaatggaaagtcaaacatacttcgaatacatttttcagcgggagatacatcttcagtccctttcaaaaataaaacccatatagtgtttatttttaacattataaattatttaaaaaaatttaaaaaaattataattactcttaaataactacaacttatacaattatacaaaaaaaaaaaaaaaaaaactaaactgaaaaactcttcaaaatatgttgaaacatttaaagagccgccctaaaccctaatgttgaaacaatatttagagagcatcccaaaacagtcatttacattaaaatatagtatggttggctaggtttgtcaaatcttctgatatggctaaaaagattggttggtggtttcttaaactccaaataaatacttcatgagctgttttttccttttcatttcttttatttatcaatatcttttttacattgttattggactttagtgtttttagtatcaattagaagttaccttttacgataagttggtaatattttttaaaaattattattttaaattatataagactgaaaataaaaaagagtactaataagccgcgagtgccttctaacatttctcatatttttttaacacttgggaggggattgagcttggtaccactctttgggaggagaatttgtgaagctaataggtaggcagtgaaatatgattggatgcatctaaagatgagagagaaaaagagatacaataagatagatattggttcatggataaaaaaacatattttggtataatatttttaaaattttgtatttttgaagcttctattaagacaaaatgggtttgacatttgctcagcattacgttgatttgtttgtttgtttttttaaatttttttaaataaaggaaatagtcctctctgaagaataaatgaagttgatgaaagggactaatcttgactcgagggagtttttttttctttttttaaccatttcttgggaatttgtttataattattatatgattacaaataggtgatggggtaaggattaaactttgtgggaactttcaactttggttggaaagagttaagccactactctagtaatctgctgagctctttctcccaaccactttgccaaaacagacaacctccttcaaacttttctcttgttctctctcttcatctctttctatttattttttcgctatactcacaacaaaaaagaaatgtattatagtgtttgtttatatgcactctctttgttaggtttgttactcttgtttttgcattgcatggttctcatgattttcttctaattattcagtttttatctttttttaataagcttttatagtattgttttagccgtccaactaaccaaataaaagataattgcttgagtttaagtctctttacatttacaaccaaataaaaaagaccaaatcttcagagcattgatttgacttcagtctgcaaatctcatctctctattgtttcattcaaattttcttttcttgtttttggaacagaaagagttcatcgaaatgtttgtaaaaaagtctgtttgctttaatcactaaagatttcatttttcaataatcatttccatttgtattttgtttttcagggtcaggaatgttgtttaagagaacttcagtggttttggtacttattttggtgtcatgggcatttcaggctgcaaggcccccaccacctaaaacatgtggctcccctggaggaccacctatcactgctccaagaattaagcttagagatggaaggtttttggcctacaaagagtatggtgttgcaaaagaagttgccaaatataagattgtctttcttcatggctttgtatcttgtagacatgatgcactggttgcaataaccctctctccagtacttaattctatctctgttcactctcttatgcgtgttgtatatgttatatgtccatgtacgtaaagactacaattttttattttttttcaggaaattattgaagagctacagatttatgtagtgggatttgacaggccaggctatggagaaagtgaccctgatcctaaccgcacagtaaagagtctggcttt

SEQ ID NO: 29148 - DNA, 4099 bp, Cannabis sativa
aaacataacaacctggactaactgcctaataactaacataactgactatgaactaactaataccctctaatactccccctcaagatgaggtgtagagattgatgatactcatcttggactataagtagttgaactgagaggggaagagtgctttcgtcatgatgtttgctatgttgtgccgtgaaggaacatgagagagtttgatgtgttgttttgtgatctgctcgcgaacaatgtggcaatcgatgtcgatgtgttttgtacgttcatgaaagacggcattcttggagttatgaatggcagcttggttgtcgcagtagagagtggctggttgtgtgtgtttgattccaaagtcagacaagatgtgaatgagccaaagaatctcacaagtagtattggctagagatctgtattcagcctcagtagaggatttagatacagttgtttgcttctttgatttccaggagatgagattttggcctaggaagatacaaaaaaccagtaagagaccttcgtgtgtcgggacaagtgccccaatcagcatcggagtaggcctttaagtgtagtgattgctacataggtagttgagagttattgttagaatgaaaaaaaaaagtccttggccaaggctacctttaaggtattgaaggatacgatgagcagccttcatatgtggttgcctaggatcactgataaattggctaagcctattgaccgcatatgagatgtcgggtcttgttattgttaagaaaagcagcttgccaatgaggcttctataagatgtgggattggatacgggaggaccaatgtctttgctaagagaaagattagcttccataggtgtggagacgacctttgatcctagaagatcagtttcggttaggagttgaatggtaaatggcctttgagacatggaaatcccagattttgatcgagcaagttcaaggccaagaaagaatcggggtgagccaaggtcttttagttgaaattttgagttaagaaaggttttgaatgcagcagcatctgtagtgttgttactggcaattaagatgtcatcgacatagactagaagagccagaaatttgttaggagatgatcagatgaaaaaagagtgatcatatgcagattgtatgaagccatttttggttaagttagtgcttagtttagcaaaccattgtctagaagcctgctttaggccataaagacttttgtgtaatttgcaaaccggattgggaggaagctccccgtcatgcacatatcctttaggaagagacatgtatacttcttcatctaagtccccatgtaaaaaagcattatcaatgtccatttggtgaagagaccaattatgaatggcagctaaggcaagaaagagttttagagtgttgaattttgcaacaggggcaaaagtttctgcataatcgatgccctgttgttgagtgtatcctttggccactaggcgtgccttgaatctctcaatttcacctttggagttgtatttgattttgtaaacccatttgtttccaatgggatgaaaacctgggggaagggacacgacagtccaagtgttattctttttaagagccaaaaattctttattcatggcattgagccattgtgtgaattgagaggcttgtttgtagtttttaggttccaactctatataagcttaaaacacagcatttctaaaagatttattaaatctttcatagctgagaaattcagcaagagggtgagcagttgaagaattgcatatgtaatctttgaggtgaatcggtttggaaatatgtcgacctgttttggtgacagtaggtaagctgtcatgaactgttggtgtagatgtgagatgttcagaggaagaagaggtggctgtggtgattggaaggccaggaagaggtgctgcagatgaagttggagtggttgcaggcttgctgactgcaacaatagtgtgatatgcaggattttgtgctggttcattgttgacagcagaaggagtttctggtttatttgtaacagcagtagaagattggtcattattaatagattcagtgggaaaaaggatattgaattgcaattttggaatagagcctttgaggggaaatatggtttcataaaatatgacatctcgagagtgaaagatgttgttggtggcaagatcaaggagtgtgtaagctttcattccttgaggatagccaataaaaatacaagtatgtgctcttcgagagaatttgtgccgcttgcttggtaaagaagaggcataagcaaggcatccaaaggttctcaaatgatcatagttaggtgatttaagatgcaatttgtcgaaaggagttttgtgctgaagtaatggagttggtgttcgattaatgagatatactgcagtttgaattaaatatggccaataaactaaggcaatggatgattgaaatgccagagctcttgccatatttaaaatgtgttgatgctttctctcaactacgaaattttgttgaggtcgttcaacacatgagttgcagatttgtatgcctttttgaaggtaaaaaggtgttatattcaattcttttgcattatcacaccgaactgctttaatattggcagagaattgagtgtgaatgaagttatagaattgaggaataatagtttgtacatcagacttggattgaagcatgtaaacccaagtaaaacgactatgatcatcgacaatggttagaaaatatcgaaaaccttcaatactatgtatgtggaagggtccccatatgtcaagatgaatcaagtcgaagcatgaattagcaatgttattttgagaattaaaaggtaatcacttttgttttactaaatggcaaatggaacaaggaacaacattttgaggactactcaattgaaaatttttattgatgaaattggtggttgatatggacggatgtccaaatctacaatgccaagaaaaattagaattacatgattgattagatgttgagtttattctagagttggaaaatggcagcagaaagtataaatgtccaaatcttttagctgtcccaatcttcctcttctgtgaatcctgaagaaaacagtagtcatcagtaaatgatattttgttggaagtattgctaaggaagctagacacactaaaaagattgagttggaaactaggtacataaagaacattatgcaatgttaaagtagcaaagagggaaatagtctctgatttttgaacaggtatcttggtgccatttgggagggaaacaaaaaaagctatggcattatgatgtaaagtggtaaaaagagataagttgaaacaaaagtgatgagttgcaccgctgtctattacccaacaaagagagttagaggcattaccagagatattcgaggcaaagactggtgcttcagtaggggtttgttgcagcttctgactgaggagagaaatgagagattgaatgtcttcattcttagtcagattagacaacaatttatcagatggggcagtggcattatgagcagcaggttccttatcagaaggtttcttgttgccatagccagggggaaatccaataaggaagtaacatttatcctttaaatgccctagtttatggcaatttgagcagtagggtctcattttcttattgcgtccattattattgttgttagatgctaatgccgagggagtttgggcaagagcaacagaaggattttcttggacagatgcaataagaggaatgtgaggatttttaagctttctctgtctttcttcatgaaagatcatggaaaagactttggacagagagggaaaaggctcaattaaaagaatttgagcacgaacggggaagaaagattcattcaaaccattaaggtattgcaagacttgttcttgattgaggaaagctaagttatctgcagatgcagaacaagtgcatggaattcgtggtctaagttcttgaatctcatcccacatacatttgagttttgtgaagtaagaacttacagagtcttcaccttgacgcaaggtgatcaatgtttctcggagctcgaaaatccggggtccattttcttgatcgaatcttgaatggagctcagtccacatttcagcagcggtgtcgaggaacat

SEQ ID NO: 29149 - DNA, 2830 bp, Cannabis sativa
tttatgtacaaactatatatggtaaaaataaataataaacatacatgttttatttaaaaatttgtatttaaattttaataaacacattataataacatatcattacatacttggtaaaaaaaatatatcattataaatattatcataacaaatatattagattaataattaataaacattatcaataataatataaatattgcaaaaacgagaaaaactaggattcctaaaaaaatgccccaaccggaagatcggttccccaaccgaaattctaattttatggggtttcctagggaccaaacggtccaccggttcctacaggtccccctaaattagtcgaatggttcagtgcaagaaacactcaaaacctcactacaccctcaaatcgaccccaaacttttccaaaccttctaaacctgctaaatataccgcaatagacatatttcatgcaacaaaacatcacaacatactcaaaatcaaaaattaccattaaagactaaagtttgaattctaaaactcaaactttgtctaacaaccaccacaagccctaaactaacttcgaagcaactcaactaacatcaaaataactacataacacaccaataaaagcaaaacacaaccacaacaaccctaagtccaaaatcaagcataaaccttgcttgaaacttaaggaactacaaagaaaaggtgttaagatgtttaccttgggttgattcactagaaaacttgctaaacttccagaattaagctgaagaaccacaagccctaactggcttctatggagctcgagagagactagagagaaaaagttaattttcttcttgatttttcttactttgggataaatgaataagtctaatcgtttttctgattttattaaaattatattcagatcaataaagcttaactaaagctcactaaaagacaaagaaatcccttggcaaaaagaccatttcgccctcctatatactaaaaactacaatagtcacttaggggtaatttggtcaattctaacatctctaataatcccaacattcccaatttctaactatattgccccgctactactaaaatactaaaatgtgattctaatggccaaatgccgcgctccaatgttgcagggcacaaacgtacaaaaacataaaatgtcatgtatggcataaataataagtcctgaattcaaataaatctccataaaatgttaagtcataattaatattctaatttataattaaatcctaattatctactaattctaaataaaacaaagcgagcattacaaatgtagtggccgaattcaaagtaccttccgtggtagcaagattgatcacatctgtcgtgttcatgggaattccaattgtggttggaacatggacatcaggatcgacaggctgtgggtcttaaggaagacctatagatgcagatggtgcaatcaaatttcttctcgtgttaaccatggtatttgatcagatatgatatcgactcgctctcaatgaaagcaccaaactgttaacctcgaatagtggccaacaaacactggagtcgtatgaatctgatgtttgccacgtattacacaattaaaacttagaagaaaacaacacaaatacttttatagaggttcagccccttagttggcaggtaacgacctactccccttttagttgtattgatactgagggataatactattcagatcactataggtgggatctaatatagctcccttaaggatacaaagtaggaatcaaagatggcaaatctccagtgttgagactgcttgtatgggtgtgtagaggaaagagagaaagagagggatatcagacttagagatttaggcttagaatgaggttctagcattaatgacttggaggctagaattagacttagggttttttaggttagagttaaggctctttatataggagagcttaactctaatttacaactgaaatacttagttatttgtatattaaattgattaaatacaaaagactaaaatgcctttaaagatagatattttctagctacttttttgagttgttagggcccaattcacagtccaacttgtagtccacgtgtaaagctgtatagaggatcctgcaaggtgcattcctagccaatcagatacctgcagaaagtaggctgaccagccttgtgttgtctagaggctggctagccatagggccgaccaggggtggtcaaccatagatacctttgaggaacctggtatgtcacttgttgtcccgtttgagtgtcgggatccccgttggccaaggttctgactagacctccttgttggtgagttgtattgccacatggcactgattttatccatgtaagcaatgccacgacaggtgggaaaaaattgggataacactctaaaaccttctacagcattctaattcctctaaaaaggattaactccttaaatagacaaaataactaattcaaccaagaatctaataactacatggaacattacaaattttcccttactaacacaacacgtctctactaaagcattagggatagaatggtcacaatccaagtaccacacatagtctcataattcaaactatccataaattataccatcatactattagaatactagttggtactattgtgacattgttggccaatatatcaagttttcactattgttgagcaaatatacatggtgttatctacgtttttggtataggatacgtggattccaagtcaacacccaagacctatcatttggaccctcatcaaaggtagagtggtccgagcccacttggatatgtccttccaggaacgtatttttggaaatttattttaccaggat

SEQ ID NO: 29150 - DNA, 2245 bp, Cannabis sativa
ttaattctgattagaatttttttaattatcatatataagtttgcaagaacatctcaaatgagatatgtaaaaatttactatatttggaaaaaaaaaaataagattttgtgatatgtttgcatcaatttgtagtattctattccaatgcacaattgtaaaacttgatgcaatatttatttattattttttttttcttgttatgaataatctttgaactaaattttttttggtaaataattttttatactattattattatgtaacaccttaagatgcctaatactatatcaatgtgatatcaaataattggttagcaatttttttaaataatttattaaattaaattttttgagagctgatattaaaatacactaataatggtatgatactttttttgatgtttaatgttaacgtagattttcgttaactaaaattaataagcctttcagtaataaatacttttcagaaataataaaaataaataattatataactctagatattttacgtgattttgcagttaaatctgcatactccacgagtcttttttatttatgatctttttttgaatacagaatacaatatcaaaatgatagtatttttctctcaatttttctgtcccttttttgtggaatctgcccctatttatagaatataggttggcagttattttcttgggatcagttttaaatgtaactattcatgaaatgtggataattctcacgttttatttaatcgcatgtcagataatatctaataactgcacaactgccttttgtctttattccttaagcagttattgctgacttgaaaggttgtacctcgcttaacatgagttatcctccttatccctcttaattagaaaaaagtgttaagtgttggcaaatagtttgcctcgtcacatttctttatttgggttaatattgcgaggtgactgtctggcaatgtgtaacgtgaggttgctgcatgtgattacgcttattctgcacgagtgaattaatatcttctttctatttatgtattttgaggcacgtgtatgtcttgtcaataccagtccaataactttttatccttatctcgcttaagactatacactcagcgagttttgaatatcttctactaaatttttatttaatattgacgagttatttttattcgcatttaatgatataattttattatatcattaaagttgattcaaattctatttgtaggacacatgtcaacttttgaagtgtggctgaattttgggtataacaattaccccttaaaaagttctttttcaatttaaaagagctttttaaatgattataagggtatttttgtgataacccaaatttgaaagattgcatgctttgggttgtggcagtttgggattttgaggcacatcattagcattaaatgcccgccttttccaattatacagtgttcccatccattagatcttatttcttttgatctaacggtgatcacttccagaatataagaatcaagaataaacactcatttcacaatttttatccttcaaaccttcaagcctttctgtgaaaatcatcctcgacttctcatcaccttgtatgcccttactataactgacttactttttgctcgtttcttcggattttatcttcaatctcaaaaattttcgaatatgttgattcactcatctcagtcccagtcacagagttcttccttgtgtgataatcctcatcagaatagtaagtgatctgtacctttcttttttatatttacagtctgattttcgtgattaattttcttctttatttacttttgcttggttattttttaagtaatttttgtgttgttggataattttagggtcagagaaaaattttaggtttatttgattcataggtttttggtataagttgaattaactttttctagaaattaagattattttctttttgcaagtatgtcccaatctggttctgaaatcccaactccaaatttcctagaaaaaaaaatgtcctaaaaaattagctcttccatttgaacccaaaatccaaaaacctaaatctaaacttgaaataaataatgtcaaaattaggaaccatttaatagaaacccaccaagctgaaattgccagtcattatagatggtttttacaagaaattcctgagagtgaatgccattttttgcgagatgcagcctagccaaaacctcaaattgtaacttctatccctttagcgggaccttcatttttacctcgagtcactgttgc

SEQ ID NO: 29151 - DNA, 3742 bp, Cannabis sativa
ccataacataagtctaacatcaagttataaattataataatacatgttacaaaaacaagagtacacaaattatgaatatcatagaatccttcaccagtcccaactctaaagtgacaatgtcactcaattctgaacaaatagttttttaaggtttgttaatactactcttactttattaatttttattttttttttcttaaaagaaaaaaaaatgatactaaagattaccaccaagatgaacgattaataatgctttttttaaaagcaaagaaagtatatagttattatgaatttaagctcataacaaaattggtaaaattggggtggaagagggaagaacatatgatttggatggtggtcaactctgaaacaaagaaatggacaaaaatgttgtgatttttgtatagtactgatctgaaatttaaaataaaacattcagactttgttgaattgttattttgtctatgatccggtcgaatcaaatttattgcaccctcattgttttttgtcctgccttcacttctttaatgcaactctcttttatattttatttacatgtatctataatacaaaaatctaaagaaaacacttaactttgatgtcaaatgttagcaagttcattccaacaaaatttaatatctaaaaaacacaaaaacatatatttacaatcaaatatgtattctgatttttcaactcatcaaattaactattatgattacatcttttgaccaaattaattagacaaattatgggacaaaaatgaactaattaagtcactggtttttgggttacttttaactatgaaaaatgaaaaataagagaaagttaaaagacctgagttgctgccgtttgcgagggaggagctgtgtcacttccgtcgttgcagaagatggccgtcgacgacttagggagctatgtcacttccgtcgttgaagatgccgtcgacgacttagggaggagatggccgtcttagtcagcgagtaggggagaagatgtcgtcgtctccgtcttcttcaaatcgttgggcggcgaatcaccgtcgtcgtccactctctgagcagagggcaggcggcttcaaagagagaatacgagagagagagatatctgatgagaatatattatattttttttaatgttttttatatatgcattaaaatatatatatttttttttgaataaaaatataatatatttttgataggtcagctttatttttgtgttttttttattttggtttttaaaatataatatatttaatattataatttataatatatattttctattttaatattagatgattgttggattggatcggttggtttgatatatttgatttacatgtcatccaagaaccaaccgatccaatattgaattttcaaaaatatcatccgatccaattcaattataataggatatccaatttttagtggtcggttgacattagatcggtcgatttgttattggattgaattatttctgcacagacccagtctaaactaaggcgggtcggcccccgatccaaaataaaaagtgtcgggttggattggggcagcgacccgaataaggcccagctgtcacacaagttagaggttgttccgttggggaagggcccgacccaatatgcgaaaagacccaatttcctatcatttagcagcctcaaaagtgaaaaccctaacagagtttctcctcttcaattctcaattagttggttgatagtatttttagcgtaacgctaatgattatggtcccggaactgaagaaaggcaatgttagtagaaagattattggagaaatatgaccgattttgggtatgctattctatcataattgggcttgggccttatataaatgagattattttataagtacacaaaattaacaaaaaaaaatatatttttacaaatttatagttttatatttatatttttgaagattttaactttttctttacaaaattacaaaatgttatgtgggaaaactacaactaatcaaatcaactaaaaacttaatcaacaaacaattagcaatgataagaaattaacaattcacaaacaaacatcagagataaaacaggagagaacagagtaatcacaaccaaaaactattgaagcaataaaacaataaaatcaacaccaagatagatattagttcaagtcttttagatcgatgtgatctatggctctactctaattctgaaacaccactgaaatcttatttattaattgagcaagaacaatcaattacagttgagatctatcctttgtttagattatctcaaagtgtttaatctctcacgctctttacctaagaatcttcttcattttattgaagattcttcatacaaatcccaaactcagtctctctacctctcaatctctctattcgtctcaatcttcaactttgaagtcactccttaaactctcgtctttcaaaatgataagtgatggtgtatttatagattagggatatggatcccgaaatcggtggctgcaaatgataagttgttgagttaattacgaattaacgaacttaacaaactcctcgtagaaatatctccatgttagctcaagttaaagcgttttcggatgagtcgtacgctttctataagatagactgaagtgtacgctgaagggaatttccgaatatcaatagcgatagccggagtcgactatccgggactccctttcagtagggaataactagtcgtctgaaactcctttcgggaggaagactagcttgttagggtttatgccttgaaaaacctataaagacatttctcattattaataaagagttcaacattttgatatatacttgaatgttattgaataatctatattaaatatcaaaaaattatttattcatatatgagattgtggcctgtagttttacaaataactaataccacttagctatgaataaaattatcaacaacatattaaagaatgggaatctttaatcaatagttgctagtacggttcactgatgcttgttcttcggtgcaagtaatcttagttcgaattacggatgtagtatgacatcaaagtgaatgtgttgtatataatagaaattatatatgacaaagaccgatatgaatgaaattgtctttatctaacatgatgtttactgtaaagacctaattcatattatagcaatgatctatagtagatcaacttaaatcctgaataatcatgaactcttgctcatgttattagtttctttgattcactcgttaaggtttctcataaaagatcattcttacaaattctattttggggaagctaataatgggaatggttggaaacatgatctacaattatggaatcatgactttcctaactgatagaatactggttccctttaagtgttaattatagaattgaaaagttgtgcacaaaattagatgggattcaaattatacttccactagtgttaattctaaaagtcgacgacataatacggaggggagagaaaccctacagcgagtcgactagtcgaggggtgagaagtcgagaagcttctgccataaccgtacaggcgattgaggctaggagcgtcgcttgcgggtcgtcgtccgttcggtccacatcggccggagtcgccgatcaacgacggccaccgccttgtcttttgtcttttgtcttccgttcagttccgttattgcaagtcttgtcttttgtgacatggtgtgactgtttatggtctgagattggttcttgtttattggtttgagattgtt

SEQ ID NO: 29152 - DNA, 820 bp, Cannabis sativa
gttcagtgcagggaaatccaaaatcgaccccaacaccacaattcaatcccaaactttccaaaaaactctagaacacctgtataaaccatagacccaattcaaataatagaatttaacaattcacactaaatctcatttcaccattggagagcaaggtttgagttcttaaactcaaactttgcttaaacatcgcaacaatcaataaatccaacccaaatcaacttaaacaactttaaataaacttcagaattttgactcaaacatcaattatcaccacagtaccttaatttccaaaatcatgcatctaaacctaatttaagctaaagggtatcaaagagaagcaagctagggtatcatgccttgtattaaaggaccaaataggaaaacactacctatctcgacagtttcaggtgtggagattgctcaaaccctagatgacatactattatctcgacaattcaaggtaaaactatcgagatctcttcctatctcgatgattttcaatcgccatttttgatcatgaccttatcgaggcggtcaaatcatcagcagtcaataatcgccgagataggtctattacgagggttcttaacccccgagataagataattttcttgtagtaatgccatctagtatatttgtcaattaatattcaagcattataataaggttcccaatactataaaatgtgtgacgttttataagtgtttaaggattatttatatcatttattacattatgtaaaattaaatattaaattatacttataataatgtaataatataatgattgctataaacactacaagaaatgtcacttt

SEQ ID NO: 29153 - DNA, 1314 bp, Cannabis sativa
atttttaacggccaataaagttcagggggcacgatttaatacatgtcaaaattcggggagaaaaattactcattagcctaaaaagtatgctcatgtggattgtcatgatctatatatatatatactatatcaaaggtacttcgtacgtacactcctttctcaatcaatgtatgaactgtgaattgtgtaaatattattattagtcatgatgaaattaacctatatcatatatgaatttaaaatttacaatatataatattaatgtttcatttgtaaaaaaagttctttattagtggtaggtatagtgatgcaaaagaaaaatctaatttttgctttatctttataacaatgtgatacatatattaatcgctttcaccaaaacaaaataaataaataaaaataaaataaaatagaatgagagcgcgcattagccgaagactaagaagtcttggtcttggtctccttctttttccctcaaataacatttttcttttgaaaacgaaaccattaataatagagcatttttatttagatttttaataagatttttttatatatatttttttttgtatttttataaatattaatataaaaatattcatagtaactaagggttacgaatcagtctaaattacaaccaaaatttatataacaactcgtataaaaattattaaaaaaagtactagaataactaaatttaaaaaaataaaataagaaataatatataaagtaactctacttttaattttaaaatacaccacttgaattaaattatttagttgaactcataaacttaataaattgtgttgtgaattgttatataaaattgttaataggataaatagtgatataagtatttaaaattttaaatttataagttgttttaagcgtcataagtactcaacattaataaaactgtaatattcttatagtttcgtcagtacaaactccgttttaaatttattaaaaaatatttaaaagaaattgatattacatattccaatttgaacccactaatttagaattcaggtcttacagtgtttatgacaataaccgaatttgacaaaattaaaaaaaaaaattacaattttaaaaacattgagtatttaaggtgctaaaattaaaaatttaatttatatcatttaatatattatccttcggaacacatattattttaaagaatttaagattaataaatcttccaattgtagaataattaaactctataccttaacttaatccaaacgaattaaaatcccttgttaaaaattagtttcttatactgtgttaaacctattaaaatttgacacatta

SEQ ID NO: 29154 - DNA, 1445 bp, Cannabis sativa
caaacttgtttttgctagtacctacaaagctcatacgtatttgacaactttcttaatatccatgctaatacaagagacacatttgcaattaagttcaaaaatataattatttctattaacccaaatataatagacaatagccaagcaaacaacattgaacaatttttcgtgcaagctcttgagggatttggaaaaccaatcatactaatctttggagctcttcggccagtttaatctccctaaccatttgctaacatcagtcacaaccttcaaagtaaatggacacaaaactgaattattcactgccttaaataataattaatttggctatatgtttaccacaaataaatgattagtattaattcacgttctattaaatgataattccaacatcgctttttacaaaatagatcaaattatacttcaggcataaaatatacttttccaatatacctaatttcaaatcattgttggatatgtaaatttgaactcaccattaaaaaactaaacagagataataattgcatattcgtgttaaacacatctaaattattatttctcctaaaatgatgaatactcctattaatttggtatttcaccttcactaataaatatagccaattagtaggtatattgtttttttgggtcaaaagtttaggtattaattaatgcattaacattcatgcccatgagatatacattatgtatatcagataatctccaaggatttacaccattttggtgtaatttctttaataccaattttgtgtagagatctccatcatttttggtggttatttattacaactcttttttttttttttttttttttgaaaggatttattacaactcttaaaatgacaccaaatataatattttgcttttctttttttagtgaagttttctcccaacattttggtgcatataatggagcaaatatttcactctattttagcactttgaaccaaattggtgcactttttgagatgtcggacattatcaacgaaaattattaagatttatagaataaataagatttatttccttttaagtatatagtctcgatgtttgctatttattaaaaatctgcttgaactactcattttattgaattatgactcttatgtttgtttgtcctaacaaactgcttatactacatttttttttttttgataagtgcttatactacattttgttcatagtgtatataatttaattgaatatttttatttatctattttttaaaaacttatttgaatttagtaattatttaattttaattaaatttatacaagtagcgctaattgccacattaacatcaataaaatgctatataagcaatttgttattagttatataggactgaataaatagacgggaaatttgatttttttatgtttttattggattaaaattttattcttaaacttaagttaatttatatt

SEQ ID NO: 29155 - DNA, 1118 bp, Cannabis sativa
  modified_base (1060)..(1064): a, c, t, g, unknown or other
  modified_base (1090)..(1091): a, c, t, g, unknown or other
cccccattcaaaatctgatctctatcatccactgagtgaaatcgaattatgaaagttccatgagaaagcagtttcactcggtcaaccttacccttccagatcctatgcacaaaaccatcaatcacatgaagtggagggtttgcccctagaacataacatacaatagagggaaaccaaaaggagatctcatctttaatgtcgtctaaagtaatcttgaccttatcagtagcaccagattgcttaaaagagctatctaaattccgaacaacagatatagatcgcaatatagggggaatcaagttcttaccctgagtaatggcactgttacattgatcattggcatggaggaattggataaaatctgaacgagcatcttcttgtctctaaatcgcagctagagacgaattaggagtcagaggtggctaaaaaacatccttcagggcagggtcattctccaccagctcttcctcctcctccgagacctccaaagcatcaatttcatagatttgctccatcggaatggagcaagttgtagccttcgtacctctcgaccccttcttcccaagtttggtagcagatttgagtttcccctggttcttcgcacgagttttcgccatggccccagctatcgcagctgtacggacaaagaaacagagagaaaatcaaaacttgaaactctaattttgatatcgagtctcacataatttaatataataatttttatagaacattgtcaaaacaattgtaatgagccacttttgggtgatcctaacaatacttttatttaattgggtcaattataattaaatatttacaaaccacgtctatattgttgtttttagggtaaatactatgttggaccttgtgttttgcaaaagtgactaattggaccttttgttctgttaaatgacaaagtagaccccgtattttaaaatagtacaaataggaccttgaattgattttttgtgaaaataaaatttaattataatttgatctaaaagtgttatgacaaaactgtttacataatctgtatcagttcgtattaagaattgtcttcaannnnnttatattaaaaaaaaagttgtcaaannttaagctcagggtcttatttttactat

SEQ ID NO: 29156 - DNA, 3221 bp, Cannabis sativa
  modified_base (1319)..(1320): a, c, t, g, unknown or other
atagcaacggtttaaaaccgtcaactatactataggccacggtttaaaaccatcggctagtcgatggttttaaatggtggcctatagtattaactatagctgacaattttcaaccatcaaaaatttgtttccttgatatttgtaaatgtcaactactctactcagtattcacgacgctcgcataggcgacggttctatagatcgtcaggaattctttacctgacggtgtaaatccttcgaaaattttgagtttttttagtagtgaaccaattaagcaaaaaaaatagatgtgatcgagatcgagatcaagattgggatcgcgatcgcgatcttgatcttggagagagatgaagatttttattttttttcctttatgtttccagataaccaagagatatggatggcgtatgcgggagagaaggagagatgggtagtggtgggtggtgatttttggtgattgattctttgacaatattttttagaactgctcctcttgctaatggaaattggagagttttggtagagcatatcgggactgggcaggttggtcttggggtgaacgagaagaagaagaaaaaaaataaaaaaggtatataaaaaaaaaaagttaattagttagttttgaaaattatttgtttatttatttatttattttaaattattttaaactataattatgatttagaccaataaattatcaacacgtggtattttagggagtaacagacaaaataattaaattaggcatttacggactaacgagaatcttgagcttggggctattaccacaattttttcgagattggggacttgtatcaaaataaactttttgagaacttatgctgcaatttaatatcaacacgtgacatttttggagcaactaacagatctgttaaaataagaactaacagatttacaagaatctcgagcttggagactattgccgttatttttcgaaatttagaacttatttgtatcaaagtagattttttgggacttttgccacaatttacctaattaattataatatatgtgtaggttataaaaaaaatataatatatggcaaagcaaaaaagaagtcttatgtttaataggggtgtttattgaatcacatctaatgaatttagacctaacctaacgaattcaatccaactacttattagatgttaaattttttcatctgatctaatcgaatcgaattgattcattcgatccaatccaattaaatggatgtattggattgaatcagttctaaccattagatgtattagctgattttttattggattagattggatccatccaatccattttagctnncattttaagttgatttcattaaaaattaaaatatatatataaaaaaaatataatttaaaacctaataatccaacatacataataaatattagtttagtccaacataattctcatgatcccattataactaattctcatgatcccataataaaaccgtcaaaaaatataacttatttaatatgtatttacaattttattaacgtttaggaagataaaaattaatattttaaatatattttttttatttcatgtgttaaatatatattaaattaattaatatatatttttttaaataaaatctattaaatatataaaattataaatgtattttaaaaatataaaaataactggatcggtttggttcggttatccattagatcatatgtcacatctaacaaccgatctgatctaattgaattttcaaaatttacacccgatccgatctaactatgattagatatttgattctattagatcgattgaaattgaatcggtcgattgtaattagattagatatctttcaaaacatgatctaatatacatatataatgtatgtatacatatataatatatgtacatcactatttaatacatatataatatacatatatcgacaattcactaacggatagattttcgatttctttgaaaaaaaaaattaatttaaatttaatatttggtagaaataaattaattaagaaattattgtggggacaaattggaattacaaaaagtaatttaatcttctctaagttgacgaagcttaaattgtgttaccaatcctcgtacacacaatacaccaaaacaatttttttcttaaaaataaaagatttccaattcaattttgagtaaatactatttataattatgtgttttgtaaaaataatcaacctctttgttttgttatataataaattagacattgtattttttaaaatgataaaaattaattttttgagcttaattttttttaatataattaatctgaagataattctagcacaaacatatgcaaaaggtataactagtctattcataataattataggttaagttattattaagtttattttaatgaaatgatagtttaagagtattattttgtaccattttaaaaaatatagagtctgaattgtcaattaataataataaaaaaagattcagtcaataatttttgtaatataaggtttaaaatagtattactctttatttttattgccctacctacccaattagactaattaaaatttttttcttctaaattgtaacatgtatcacatcatacttaacttttcaagtaaaacgtaaaattcacaataattcttcaattgtgtttttgtagacttattatattaattgttgaaaacagaaaaggacaaattgaacatgcctacattaaattatataataaaatttttccaaaaaaaagcatataataaaagaaatgtaattatttgttgtggaagatatccatgtgcatatgatggtggatagaggtgaggtcaattccattcaattattataatgtaattgtaggagcaatgtggtaatgtgagtgccaattaatattctctataaaattacaaaagtgaagttgtttggagtggtgtactaataagtaataagatattaagtgtcacaatagactagacaaaatcatcaaatactttaattattttcaatgtagctaccaaccatagattcccaagtgtttccaacaaccttaacttaaatataattaaatatttggggcttatctagaaataaacaaagaatataaaaataatgtagtcaatataaggagagttggatgggttgaaattagtttagggtaaatactattttgaaccctgtgtgttgcaaaagttactaattggaccctgtgttttgttaaatgacaa

SEQ ID NO: 29157 - DNA, 1567 bp, Cannabis sativa
ttatttagtgcacaaaactcaacaatcacaacaacggtaaatcgataagtgtctattctaaaacactgcctaatactcgcataaaacaatctacagttttctaccaaaccttgtggtaaaaataccatcaaataaaatacgtattttggctttgaaagataaaccatattgtagatctcatttcaagcttcaaaatggtataaagaacatctaaaacggacaccgaagtaaaaagttatagccaaaatacgaaatttggtgtttcccaaaaactgaccaaatggaattttggttggtaccatcgaaaattatagttttgaacaaccagaacacgatttttccttaactttaaaccctccaaaataactccaaatctaaccaaatcattctaaacttcataggacatatatatatatcatccatataacagttcctatgtaacagaaatgagaaacgagtccttaaaaggaaaataccattaaagtttgagctttgagctttaaacgctcaaactcatttttcacttcaaaaccatctcaaattcagcaagtaattatagaaaccaatctcccagcaacttagaaactaaattatgtagtctcagatctcacaactactctaaacacaaagtcaatatatagaaccaaaattcttcaacttaaaataaaaaccaatcattacctcaagctcttcctcttcaatggttcactatccaggtactgacagggcttgaatcactaggtttttggttgaaaattgaagtaaaaatagatggtggaggtgagggtttcgtcgcacggagaggggagggttcattttgtgtttttctatgttttcttttaaacataatatatatttataaacagagaagtataaaaatttttattaataaatataaaatttcttagccattaagaaatctctacttatagggcattaggtcgaatcccaagtatctctaattaccttaataaatataataccgacttatcataatactctcatcaaagtcactaatttaacatgttatgaaattttggccaccgatcgagtctctaaggtcgctaaacctgaaaatatttttattccataaaaaactcatattatattcacacatgctatataattctccgtaattaataaattattatttatccacttatgaaaaaaaaattatgatttatggtaagatagattagtaggatcatcatcccactcattacatggttagtccataatatatatataaaatcctaattattcaccattaggcttatcgaaatattacaaccattctctccttatagaaattttatcctcgaaatttacctgaataattttggatatagttcccgcatctgtgactctaatttcaaagtcacttcttcaactttactatttttgcatagcactttaaccaaagagatcattttattccagagtactttctctttttggtctaaaatctggataggttgttcttcataagataagtttgattggagctcaatatcatcatagctcaaaatatatgttggatctaacacgtacttcctcaatatagaga

SEQ ID NO: 29158 - DNA, 1341 bp, Cannabis sativa
ttacaaaaaatggtgccttatgtaattatctcttttaaatatgggcttagccctacatagggttacatataaaagtttaattagtttatttttgattattttatttaataagataaatcaaaataaatgttaattatcttttaattatttgaattacatatatattataaaataatatatttaatattaaaagattatataaaataaaagaatataattgatttcagttattcagttatatgatatttattttgaatttcaaattaaaataaatattattctttttattttataggattaaaaggtttttaaatattataatatcaatatttataatattttaaaataatatatataatatatagcatgagatcaatagaacaacgatacagtaaaaaaagtgaatagaattgaaaacaattttttaatctctctctctctcttccccctctctctctacacgacacacatacaacaagtttgttgtgtaattattctaatctcgagttacagtctatcatgagttgaatacacgctgtaaccgaaaattgattcatctaagcaatcctataagcccactcttatcttgagtgttgaggctgatctggaagatctagtgtgaactcttcaacaagtcttttattgatttggattggatgatcgatattatatacgaaaagattcaaggaaatcttgataggcaacaagaggtaattttagaatctaattagttagatttattttatgtaatattatgttgagatatggggtttaaggttcatatcttattcaacaaaatcatattttacacttccgttgcgactctgatatgaaccctaaaaaccaacatggtaatctcttccacaagtcttcggtagatttggataatgtcaaagaaaaacatagacattttgcatcattgatgacctgcgctacctgcatatcaatctattgtgtttggaaaggtgggccttggggactattttgtccttctacaattccatttgaggccttctgaagttctccaatagtggtgccacgacgattctcttcacacatggttctggatcctcattttctaaatggaatatagctccgcttttcttctggactaatctatatgtgagcttagttaatgtgtctattttatttctctagttgtcttgtgtgatcatgcgggagctcgcgtcctcggactctatcattgataatatttctcaaatgacctccgcgaggctttgctttctcacccttgactttttctctttttgcatccaagcgggcccttaggtttgttgttgacatgttgtctctaggtcaaggttctccatctgaacacac

SEQ ID NO: 29159 - DNA, 2746 bp, Cannabis sativa
ttattacaaaaatgttgaattttgaaaaaaaatttataattttattactgtacggaattttttataaaaatattatctttttataaaataattgtacaacaataaaacagaacaattaaaacaacagtagaacaataattaaaacttaacacaatacacaatataaaaaatatatagtatttttggaaaaaaaattccgtctcacaataaaaaaagtaaaaaagttaaaattttcagtatgtggtgtaaaaaccttaatttttttattgtacaatccaaccctatttagtacaataatatagagattgggttagttttattgagttgagatgaataatttaagctttgatatttatgttaatttaagctagtgcattcaaaagaaaaaaaagatacatgtaaattaatttaagtttaattattttcaaccaattaacttacacaaaaatatagttattttctaaacaagcccattatggaatactaaggcggcccaatggtccaacggcccatatagatttcagcccacgcaaaaaatgaggttggcattacatataaataggagcaaagaatccaaaacccaaaaaccctagccttccctaacctcatttctctctctcagccgcttagggttagcagagcaaagcaaaaatggtttctggttcaggcatttgcgccaagcgcgtggtcatcgacgctcgccaccacatgttgggtcgtctatcttccatcgtcgccaaggagcttctcaatggacagaaggtagtcattgtccggtgcgaggagatctgcatgtccggtggtctcgttcgtcagaagatgaaatacatgaggtttcttcgtaagagaatgaacaccaagccttctcatggtcctatccatttcagggctcccgctaagattctctggcgtacaatccgtgggtaagctctttacttgaatcaatccagatttcattgcgatttgtagattttgttctgttttggtgtgtagctatgatatatgattttctgctcttatttgtatatttctaactttattgtttagattgcaatattttgattcagttggatttagttgattcagttttggattatagctgaaatgatttgttatatgagatatgatttaaggtttcatttgtatctttggctatagtttttgaaagatttataactggtttgcttacattttccatattcctagttttgattgatataaaaagtaaactttactttgatttgctaatgtgtttggaatgggtattgtatagaatgattccacacaagaccaagagaggagctgcagctcttgctcgtttgaaggcttatgagggtgtcccacctccatatgacaaaatcaaaagaatggtcattcctgatgctctcaagtgagtgttttttattttggggttcttactgtttttcctttatgttttgttttgttatattaagggaaatgacatgtttaaactgttcaattattagggttttgaggcttcaagccggtcacaagtactgcttgttgggtcagctttcatctgaggttggatggaatcactatgacaccatcaaggtcagttttacttccttttcccatttgtcgattttgaagtttaaagctttttaacatgttggtaatggtgatttgttgatttttgatgattcgacaggagcttgagaagaagagaaaggagaggtctcagttggcttatgagactaagaagaagttgaataaacttagggtgaaggccgagaagatagccgaggagaagctaggtcctcagcttgaaattattgctccaatcaagtattgaaatgcatgaaacttgttttttggaatgacaaagttgtggagtattgagtactattcgtcaaatttgttttccattttgagacttctttctttttggtttggtcatcatatgctttttgtagtagtgattttgatttataatagattgttgtcttgtcatacatttgtatgcagttcagtttctctttttgataattagctaagctatcagcataatcaaaactataatttttccttatattcttaaccttgtctcatattttgccattgatatttcttgtgagtttttctttttaatcttgttttaagcattatgcttctgtttttaataggcaactccaaatgatctgaaaaagctttatgaactttttcatagacatatctacatgtgaaaatgggtactaagtgtatttttaatagggtgtcattgcataccattaacctcttttttctgtgtaaattttttgacaagtaagcttttattttttgttcattccaaattcgattgcgatgaatttgcaaacagccgtcgggtgaaccgggtaaggctagcaaatggttttattttgttctccaattatggtcattttgggagggtttagtgaagaagctaggcttgtgaaaacactacaccacataagtctagatagaacaaagctacccaatgtggcattggtaaaagcataaccaacacaaatgtgttggctatgaatttatgatgattgtttcgagctgctaatgatgaggcgatctgattaaccaatattaatgcaagatattgtcaaaacaatctgaaaccatgtacaaaatccaaaagagatttcaagtgtggagaagaaaatttaagcataaaaatcagttatttgggtctaatcgaattgaatagtatgttatggctgccgatactcctacttctagaaaagttattggg

SEQ ID NO: 29160 - DNA, 2487 bp, Cannabis sativa
  modified_base (2444)..(2446): a, c, t, g, unknown or other
ggattctgcaatgcgggatccactacttgtggattttctgaattgaccacgcctctacaggtctgtaccaccatcgtgtttatgactaaatttgaaataaatagcgagtttgtgacccttcctttcaatgaaagcaccaaaatactgacctcgcttttagccaatgataatgagtcttaattgtaagcgataagtgatataatataaatataatatggtaagataaataaagaatacagagtttttaaagaggtttgggcccgaacagttcggtaatgactttgtattgacttgagaacaaaaaatacagtgattcttctcttagagctcttacaatgatatctctgagtgtactttcttagataactttttccaccccatgcccagtgagaatggatcattatttatagggttatgtggttgagggattatttccccttcttttacaatgtttataattggtaagattacacattaaatgtatagaatacactgattgagggatttggagagcttgagatatctctgtgatacgatccaagatttaaagagattgtttttatccttcatgatgtaaatgctgaggatgctaagtgttgatatgttgttcggactgtctattgttcggctaggaggacctcgtccgtgctggtatatgtggcgctctgctcggaacacctatttcgggcagatatggagaatcggttccacgtgtcaccagtgtgtgatgccacgtcagagtgccaaaattaggataacaaagtgttttatgtattactaattagtaaataaatttagaatataatatatataagaataataaacataaaacataatcaaatttgtacttgctccaaaaagaaaaactaatctatattttcttaagaaataatgtgtatataaattatattttgttttaatatcaaataaaagtaaaaaaaaaattaattaaatttataataaatgaataatataaactaaattaaaaaaaattataaacgacataaaacttgaaagaaaataatgtaataaacaagtcatataggatacatataactttgttgaaacaaaaatactacatggaccctctaaagtagtagtaagccttagtaaaaaaaccaaagaaaccaattgataaaagcatctttgggaaaaaagagcatttactaccttaaattagattaataataagctataaaaaattataaaataaaattaaaaaaaaaagtagcagcacaaatgcttctagaacaacttacaaaaatgaaatatttgcataacaccatataacaatgtttctttcattgtgatcgctcaattaaagcattccatcttctgcaatttcttctaaaaattaattagctcatttcacactaatttcatcaatttcttattttgtataagttttttttctcattgcactggaatgagaaaagataaggattattacatatagtagtaattgtaataggatagaaaaatattttattatagtgtatataccccaaatatatatagcttacttgagtggttagccaatcaatagatctaaaattcatgcaaaattcacacatgtatcttagtatataatatccacactcgaaattcgatatttgttgaggacactgcacatatttatgaaataaaaatacatagataattaaaaatttgtagaataattactacattgtaatatattaatgtaattttattttataacttacttttatagatttctatgtaatgttagacttttttagttgtctcttattggaagcattgcaataatcaaaagtcctaataaacaaaagaaatattaaaataattttaaaataaaaattaaattagactaaaccataatattatttaacttacattgccattagagatttaattttattaggtgggggtaatccaattgaatcatgccaataacatgtttcacgcaatacatcaataattgctagcatccaatgaaatctgttgaccaccaaaataagatattatgtgtaagtaaaatatattgatgatgtaaatagttaactaaataattcttacccagtattaatagaaagtagccaaaattattccgcttctgttccttgcatgcgatctaccattgtcattgcattttgcgcttgacatgaatccaaagctaaaattggatgaaagaaacgaaaatattgtgctcgatttgccttcaccaacatttcatgtaagatcttaaatattacaattggattataaggaaaaactattatttagtgcattaagtgtaattcaacgaccaatttttttatctaatgtaaaatattatgcaagcagcttcaatctgtttcatagtgcctaaattaattacgtcaatatgtgaaatatgtaaatattcatcattatccaaaatttatgggtccatgaccatgcaaaatgtgacagtcagtagtccnnngatccgtaaggggaaacaccgggtaagctgtgtaatcccac

SEQ ID NO: 29161 - DNA, 2029 bp, Cannabis sativa
aattgggcacttaactaatattagttgatgaaagaataacgaaaaaaacatttacaacagaaccgatcgcattgagttctgcaccataaggttgatcaaccaaaactaattccagtcaaggtagtagtagtagtagtattagtatctgatagaactggatcaaaatcatgagccacgtgttttgtttactaatcaactaggaattgggacagataacgagacagaaaccaacaagttttcgatacttaattgagaaaaagagagagggatgctatcaaaagcatgataaattttcattaagctacattaccctgcattctatattaggctatctttctctaacatcaatagtcaaacattcatctaattcctcaatcatcacaaaatagtaaaacaactaagttatctcagttatctccaccaagctcccactcacaaaaacacccagaaacatcaaacaaaatgaatccaaaacatgcacaaaatcaatacatgcaaaacacaaaacaacaagaatcatatagaaagagaaaaacaagtcatacctcattgaaattacaaaccccagaactttgacggccataagactcctgagaattcctgatatcccttgagacatgaggcacaacaacatcatcatacaacaagagatccttggtatgctcaacgtcaacctcaactatacgagacccagaaactcctttacaataaagcaacctagtatcaaaattaacatcgaaaccccttcctaatgcctgaacagagttcacagcagtgtgcaaagctgctgcattttcccccatttctcatcacaaaacccaaacttcagtcctcagtcaaatcaagactcaaatacacaaaaaccccatctcaaatttcaccaagaaaatcaaggaaaaccccaagtctgatcaacccatatttacccaagtcttcacgttcacctctttgtctgtcctcgataatttgacccagtaaacaaatacaatataataaacacttatataatatatatatatatttatatataatattgaataatatacaatacaaagtccaaagaaataatcgagattcgaatcaataatccaaaaacaaaactgttcatgtacctcaataatcaaataatccttattatctcttccactggatctcaaacaacacaagattttccccaaatctctgtatacacttgtctctctctctctcttcttcttcttctttctgtaaaaaagtttctctctctagaaatgtaatcaaagtgaaaattttctactaatgactttgacttagctacgtttttttggggggttaatgcttacgtcagcgtcgaatcttgaccttttattttcttgccacgtgcatacctgattaaatccaacggctgagaataaacgagaatatactcaatgttagacttttgggtttgattacgtgggaagtgagtgtgagtgagtgcgattgccatgggatttgggtcgataaatttaatttatcgtttctcgtttcgatattttatcgtgagaagagaagcttaaatatcggattgagttgccaccgcgaaattattcaaaaacggaaataaataatatttttgtgttttgttattaaatattattttgattaggatctaattctttttcaaaacaaaaaagagattaggatctaattttttttaatatttaatctaatttaattagtaattagatttaaaaatacggtattttttttgttatttgttattattttgatgttattttttttattatttttatgtatcatttttattattttcgtgttatttttataaaaaattataaaatataacaaaaatttaaacataaaaacataatatttttttataaaaaaaaatcgtacttcgtgtaattaactattcttctatttttctttctaaatcaactacataatatatttaaagggctattttcaaaaatatgggaaaaattattaaggttatgataaatatggcataaaaagtaaatgccactaaatatggcataaaaagtaa

SEQ ID NO: 29162 - DNA, 1633 bp, Cannabis sativa
  modified_base (449)..(458): a, c, t, g, unknown or other
tttccaaacaccttaatctcaattaagcaatgctaatgatatacaaccaaaaaacacacacacacacactcaaaagaagacatataatatataatatataataataatagaaaaacaaaattgttttaaaaattccagcttctttttccacctgcccacaatattggtacaatcttttaataacattataaaaacaacaacaccatttcatattagctagccgacaaaacctaccataatacacaactatattattcctcctatatatatatacacacacacacacaaaacataatcaaattagacaaaaacaacatcacaaatttcctcttctttcttacaacattttcttcttcatatcaatattattattaattatgggaaatgcttcaacctcatgtgctccctcattactaacaaatattagtaacaacaacaacaacaacaannnnnnnnnnaacaacaacaacaacaataacactaatggggtagtaatcaaagtgttatctttatcaaatggaagaatggagttttacacaaaacccattaaagtatctgagctaatgaatcaaaatccaggtatgtttgtatgtgattcaaccacacttgaattgggtcaaagaattcatggcctaaatgagcaccaaatattagttcttggaaaaaagccccaaagaaaacaacatcatcaacaaagccaaaaactctatttgcttctcccaatggaccttctttactctgttcttactattgaagaaatcaattatttcaattctttgttaattggtactaatttcatcatcaacaacaacaacaacactaacaataataatagtaataataatgttattaattttggtaacatttttccttctcttggtgagttttgtatgtttcttcctcaaaataatgttaataataataattgtggtgagtctattgagaatgatgataatgagagatatcaattcaacaagcaaagatcatggagaccagctttagataccattgttgaaactacttcatcatcttctagatgaaattattatttttttaattattaattgtaatttttctttttttaattttgggttgtaattatatttagtttagagtaaaatgaaatacattttttttttaattaattgtaatttttctttttcaactttgggttgtaattatatttagtttagagtataatgaaatatatgtttttttttacttcattataatctttctttttaagttttaggttgtaattatatttagttttttttttttttgaaaaggtaattatatttagtttagagtataatgaaatatatgttgtacttttttaaattattcattataatttttctttttaaaatttgggttgtaattatatttagtttagagtataatgaaatatatatatatatatttggttatgtatagatatacttgattcatgtgctggctataatttatttggtagatagttgactggatttttaataatttatttatcccacttgataaagaatcttaaaatatatatttatatatgatgaatatgtgacaaatgttattattatttattatttattatttattattatatgtaatatgtatcttgcctgtattattactt

SEQ ID NO: 29163 - DNA, 1257 bp, Cannabis sativa
gagaattgttttgtacaattaatattaaatataaattatatatatttttctggagttttttcattattatatttataacaaagtttgttaagtgtgtcacctaaaaaaaaaattgttaagtgatgagtatattaattgtacgtgacaattttttatttgtttaaattattaaatttttattttacaaaataaattagtttaaatatactaatatttattagtcatgtaactacaaaattctaaaaatataatttaaatattatttctgtaaaaaaattgaacttatatatttatttagaaccgaaaattaaaattaagtatttatgccacaaattactttaaaataaatattgagcttatgctatttacaaatttaaaattttaaatacttataccgttaataaaaatgttctgttgttgcagcgaagccactttgtagctcattctttattattatttttttacagattatgctcttttaaaggagctgacgaggatggtgaaggacaatgagaaatgtgcaaattgactagatcaatatcaatttatctcttattctcttttatttatttatcattattcttatctgaaatttagtatgcaagttaatacatttgtaacatgtaaataatttaagcacttacatttcagaataataaataaataattatttaagcacttcaactacaaatatcaaatattatttttataggtttttgactattgttaatcaaagcaacatatagaaagggagagaagagaatgtggttgggtagccgggtgtagagtggggctggggcctgatatgtataaacataacacctattgcatgtgtgacgtgtattgtggacaatgtcccacatggaataaatggtgaagaattaagctatatataaaaaggactactccactaccaattgcttttgaccaattgcttttgagatggaaccccatgattctcaacaacgtattacaattccatgaatgaagtttgataaatgtgtcaaccctttccatcttctgtatttatgactaccgctaattactcatcaactgccactctatggaatgcttttactgtgaattgacatgtaattttgaaacaatggagcaactcatgtgactactcataaaagtattaactttaatttttttctaaagaaaagtatgagtaaaaacactagactaaagacacaccctatctatcagttgccgaaagcttgttgacaatcaattcttctttaattattaactgca

SEQ ID NO: 29164 - DNA, 1385 bp, Cannabis sativa
cctcagcctctgaagctgcctctgcccctagaacttcctccttttttgtcggaggaagccgtatgacgtacgatttcttagggtttaacccaacattctctgagaccaatctacattcaatcaagttgggcaaagttagaagatgatggcagagcttgcttttatagtcggctttgaataattttagcatactggaagtatactcctcttttgtgagggaagtagggtggcacgcctatgccaacgaagaaagaaaaagagttgaatgatcatcataaaagggttccttattaattaattaacgtaagtagaaacaacaaagtcacttaccagaaattcataagactttgatcacgtctgcttggttgggcatacagaagaattcttgttttcaagcttttcaagtgttagaaattgaatcgacgactatcggatcagttgaaactttcttgtgttggtacgaattaccttcttaaaggcaatgaagaagaaagtcggagtgttccagccattaggcatgagctgcaggggagctatgccaaagtaattcaaaacctcctcgtaattaaaaagggtgaagcagccgagtaacacccatcttaagaatgtattcgctaaaagctaccgtgccttgaggtggtaaatgagcgtgatcattggacaagggttcgtaaccttgcgttactgcatactggtttaccatcctcctgccttcaaaccaagtcacagtactcaccatgtcaaacattctaaagggaatagatcagtcgtaggttggaagtggtgcactaggcttattcgagcagtgtggtttttccatatctacaaaattgtaaattgagttagaacaagaagaaacacacttcatgttcttcattcagtgagctagaaccttccgaatcaatttaggctaggtcgtgggatcgtcgcttgagtgaccctgggcaacgaaagatggtgaggggtagtaagaggaactgctgccttcgcctggctgatagacagctcgcctcacagccaaaggcatgggagccgggtgaggaggggacggctcaggaggaaaaatgtgctccaagtgagcaagtttctttgctatgtcacgatataactgtctaaggaggaaaaggtaggcatccgtattagcgtgcacctaaccttctaagaactcaatttcttccttaagcttagccagacgctcctaaaactcacaaatttcttctaagcatttcaaacactcatacattagcaagtgatactgtgcccaagggtcgacaacgtccccgtctgaatcgaacaagaccacaatgggggaaaccctctcaagaatgaagggtgttctattgctctccataaaaaaagacaaaggaggataaggcgggggtatt

SEQ ID NO: 29165 - DNA, 3248 bp, Cannabis sativa
gcaaactaattgttcatatgtctcttaattataacaaaaaattaatgagatagatctgatttgggggagttttcatacacgacgatttaggaacctattaaactatattaaactatctgggattctttacgacggtccaaaatcgtcggtaatacccaatatagctgacggttttaaacagtcacatatttttaatagcgacagtttttcaaaaattgcaacttttaaaccgaaggaaattatgttttttgtagtagtgttatttttataatttgttttgctgtgaagagttttggagtggaaactttggaaattatgatgggaagcacccacaagaactgttttcatctttatcatcagctcagtgttcatacatataaatctttctaagggttgttttggcatctttatgtataagctttgtgattgtaaattattgattattagaggcggctttagatttattttaatgtgattgcttagtgtgatctactttaaggtttgctttgtgttaaattattgtttatgagggacgtgtttagaagtgttaattttcttggttgaaatgaatcaccatttggaatattacatctatacaattttagtcaaacccaattaaataatgtgtgtagaatttgaattaacttaagttgtgacttttaagaatcaagaacgtgatattagtttagaacttaagttattattattctttatatatatgtataagagaatgaaggaaaaaaaggaaagaaaagaagttacttgtttcaagtcaacaccatgaaaagagttggaagaacttgtttctctgttcttcttgttcttcctatctttgtgctttccttgcttccattgaagattagttcgtcaccaagaacacaagcagaggctcttataagatggaagaacagcttggtgttgagaccattttctctcgattcatggtccaacaacaacttcaataatctttgtaattggactaatgttgtctgtgatggttccaatggagaagtctcacaaatagacctctccaacttggaactcaatggaacattggacaagttcaacttctctccattccttaacatcaccgtcttcaacctcaacaacaacaaacttgctggttcgataccaacagccattggtaatctcaccaagctcactttgttggacttgagtgacaatcacattgaaggggaaattccagtggagataagccaattgtcagagcttcaatatctcagtctcttcaacaattctcttgaggggtcaataccttaccagctcaccaatctacaaaaggtatggtacttatcacttggagcaaattattttgagaattcagattggtctaagttttcaagcatgccttccttaacttaccttgatatttttttgaataagtttaattcaacattcccaaatttcatatcaaagtgtaggaacttgacctttctagacatgtctcgaaatagttggattggctcaattccaaactctgtgttttccaatctcatcaaactccaatctttcaatctcacagataacaaatttgtgggacatttgtcatctaatatttcgaaactttctaagctcaaacaccttcatttacaatctaattttctcaaaggtaatattcctagtggaattggtcttttgcatgaacttgagattcttcaactggctaacaatttcttaagtgggagtattccttcttctattggccaacttaaaaatctattacaacttaaaattttggatctttcttctaacaatctcacgggtccaattccaacttctatgtggaaccttaaaagcctcatctttttttctgtaagtaccaaccaactatcaggagcactgccaattaacatatcaaggcttgagaagttggaggtgttatctgcttttgcaaataatttcactggttcgattcccttagatattggaaacttgaaaaaccttaaaagtctggttctttcgaggaaccatttcacaggtcctattccaacttctctatggaacctcaaaagcctcacccttttgcaacttttcaaaaacaatttggttggaaccatcccacccaagattggaaatttaaagctcttgtcaatttttgatgtaagcaccaaccaactatcaggagccttgccagttaatatttcaaggctgagtagcttgacgattttatttgcttttaaaaataatttcactagttcaattcctttggagattggaaacttaaagaaacttaaaaaattgtttctttatgagaaccatctcacaggtcctattccaacttctttatggaaccttaaaagcctcactagtttgaaacttttcaaaaacaatttggttggaaccatcccatcaaagattggaaatctaaaactactatcgacttttgatgtaagcaccaaccaactatcaggagccctaccagttgatatttcaaggctaagtaagttggcaaacttaatggtttttaaaaataatttcactggttcaattcctttagagattggaaacttgaagaaacttaaaagattggatctttctaagaaccatctcacgggtcctattccaacttctgtatggaacctcaaaaacctcatccgtgtgagacttttcagaaatagtttggttggaactatcccaccagagattcaaaatctaaaactcctctcaactttagatgtacacaccaaccaactctcaggagccctgccagttgatatttcaaggctaactaacttaaaggaattatttgttcataataataacttcactggttcaattccttcagagattggaaacttgaagaaacttaaaagattggatctttctcagaattatctcacaggtgctattccaacttctttatggatcctcaaaaagctcaccggtttgcgacttttcggaaatagtttggttggaaccatcccaccagagattggaaatctaaaacttctatcatcttttgatgtaagcagtaaccaactatcaggagagttaccaataaccatttccagtcttagtaacttgaagacgttctctgttcttaacaataatttcacagggacaatccctagagactttgggaagaagagtcctaatttgaggttttttatgtttgtaaacaacaatttctttggaaagttgccaccaggtctgtgtaacgggttcaatctagagtatttgggtgtaagcaaaaacagatttacaggaccattacccgagtgcctgag

SEQ ID NO: 29166 - DNA, 1276 bp, Cannabis sativa
tgttatactttagcttgtgttttgggttagagttgattttagggttttgcatttgtgaatagttgttgaacgtgttgcaatggcgattacgagaagttcgatttctccaccgccttctaattcgaagagaaaaggcgatgaaggtggtgaagtggcgatatcagaaaatgtattttggtgatgagaggagtgtctgtttggtttctaaataatttttgttattattttgtttagatttgttttttttttaggatttttgagattttgttggtttagtttcttattctgtattagatgggtgtttgtgtattttgtttgttaaaatgtgttaatagtttagaatataggcttttttggatttttttttgtatgttttgtatatatttttaatgatgttgtatttgtgtttggcaagttacattttagttttttactatatttttgtatcttatgatttggtggctcttttttatttgatattttagtataaattgtaggttgtcaaattgtgtggttagtgttttgagtgtttgttgtttatggtgtaatttcattgatttgttgtagttctataagttactaataagtgatttattatgtttaagtgatttgttgtgttttatatataatttagcgattcacattatcatatatgtattattttagtttcttatttggtgcttgatttttttctcctaagtgtgtttgcctttttgtgtgtttttatgcacactgtgtgttataagttactattttagtttcttttcgatatatgtatgtatcagcttatgtattgtataaatattagtttattacttttgattatgttatgatatgttatacttcagtttttaatttatgtgtgttttttgtgtgttgcagttgtgggaatattgagtcttttttttgcctattgtgatagaggtatatatatgagttactaagggtgtgtaatgcgcatagcagttgttcatttttttaggaatgagtcagttgttgaaggcgatggtttctgaatcggagaagatggtggttttctaatatatttcagcaacaagtcccacgcgtattactttctattttcggtatgaccagaaacggtatatcacacaattaaatgatgcacaagatatccgtaaatttgttataataggtatattattaaaaattaccctaaaaaatttgggatatgatttcgtcccgtgatgtactttcacggaatgtattacgtggtacattagatgggtctcagggtacattaaatgagtgtcagggt

SEQ ID NO: 29167 - DNA, 1679 bp, Cannabis sativa
atcaacccaaaagaaattgacaagtaatatatataacacttggcactcttttttctaacatgtaaagctaatacaaaaactttgataatatacttactttgttctattactctttgatattgagatgatcttgatttaaagccttaaacttgttctattacttagtcaactcaaccatcactagtttaaaaaaaacactagcaaaatcccaaaataaaattaaaattaaaaaaagaaaaaaaaaaaaaaaacctacatacttaaactcaaagaatcctctaaaatttgatcagttggaacatcataaccataaaccatagagtagtcatccaactcatcagaagtaaattttggaatcctccaacttcttacaacttcagaatcatggccattggttaatagctccaacacctacaatattagaaaatgtatatgtcaattttttatgtaggacccgatacttaattacaccaataataatataaaatttagaagagtgctaaacactactgatgtcttttagcatttctctaaaaaaatgaaagaaaatctcgaatatggaatactataggggttgtttgtttagttcggtgggaaaataagtgttgaatctttttcatgttcgtctcaacttttaaagtgaaaatttttcggtattttgtgggacccacatgttttttagtgggtaataaatccctatttgagttctctttccactcgtacccaactactcaaaacaaacgccctagaaataaaactcgaaaaacaaaaatattcgatttttaaacgttcatccaaaaccctaaattcacatcgagttagtacaaaatcaatgatataatttcgctaattttaaactttcgtgttgttagtttagcaaattactcgtacctcgttcatcgatggacgccaaatcgaggattgccttacacaataagaagcagtgaggactagtctatgtagttgctcagagtcatatttaccttccatcattggatcagctagactagcaatatctcctgattccattagaggttttgcctacacaaaacaatgtcacaacacaatttaatttaaatgtaaccaaatagtgttataataaagttcataggtaaaaataaaaaatgttggtacccaaataagaagatttcttctagaagaatcgacaggtctacgaccagttacaatctccataagaagaactccaaaagcaaaaacatcagttttctcatcaacaattccatgcataaaatattctggtgctaagtaaccaaatgtgccttcaattgggatcacagcatggtgagtccacttgtttggtaaccattttgctagtccaaaatcagtaatctgtattaacaatgtaaattttttaaaaaatgaatagatatttagaaatttattgtactattttttttttggttctttgttttggtacctgtggttcataatctggtccaaggagaacatttgaagcttttatgtcgcggtgtatgatccggtgcttgcaacacttgtgaagatagtgtagacctctcgccacgccaatggcgattttgtatctaattggccaatcaagagtggtttcttcgttacctgagaaccgtttttgaagatagtaagctaaatttgttgaaagccactaaggctagcttagtggtgagggaaggatgggaaaa

SEQ ID NO: 29168 - DNA, 1498 bp, Cannabis sativa
  modified_base (93)..(100): a, c, t, g, unknown or other
ttgaactgcattaatctctcctttgtgtagcttagcttccatgacataaagagtatttactttgttttctctcgccattacaagagaaccatnnnnnnnnttccatttactttcaccaaaccagtttataaacccatcatcgtcaagtcttctagtagatatcaagttaaggcaaatatttgtaacatgcctaacatatttgagaatcaatttgctaccaacactggtttctaagcaaatatctccaatacccacaatctttgatgcattctgacattgccaaaatcaccagtagtataagaagtgaaaaaattactatgagcagtaacatgcaatgaagcaccataatcaatcactcaactgcaatcttgggttgcaagactaacacaccattatcacatacaatgacaacatcacttttagtggcaactgtattagtctctttctcatttttcttccattgattttgctctctttttaatattcgacaatcctttattaaatggcatggcttgttacaatgttaacacttgatatattttcgagacttggatcttcttctagaaccatgatgatttctagcttgacttcattctcacctttcatgctttttgaaaacaagaaccccaaaagaaaaagaagattcaccttatactttccttcatgtctcttcattaagaaaaatatctttaaccaaatccatagtcaaagtcctttcttgcgtggaattagaagttatcacaaaagtttcccaactgtcaggtaaagaactgaggagtaacggcgcttgcatcttatcgtccatattcatcttcatgggaactatctactttgcaagactttgaaattgacttgtatgctcaaccatattaccacgatccttgtacttaaaatttacaagtcttctaagtagaaaaattttattgctagccattcttttcgcaaagagattttctagctttttccaaacaatatcatctttggtttcattagagatatgctcatgacgatttatatccatccatcgtctaatgtaggcaatgaattttccatgttgaacttctcattcctcgtcatctaatttagatagtttctcactacctttaataggcttgtataaatctttataatagagcaaatcttccatcaattgcttccaagcagaataatttgataagttcaatttcatctcattctatctaattcatccatttttcaacacacaagaatataacaccaaatataattcggctctgataccatttattagaaaatcctattgcaattcatcacaatactttctctctttgtatgtcaaaaatggaacacttattaaatacccaaataagcaatattaaatacacaaccaaagcactagaaaatacacaaagcatgcaccacaagcactagaaaatacaaaaatcaagcataaaagtgagacaccaagatttttacgtggaaactcaatgcaggaaaaaactgttggaatatgttttac

SEQ ID NO: 29169 - DNA, 3161 bp, Cannabis sativa
caactctgaagttagtgaaggagaaggttctagtctcagcagaagctagtgtgtatttcatcccaatgtttaatttacaataatcttaattagtgtaaaacttttgtaccatgtcaatatttagcttattctttcacatgcacaaaaactgttttgtattatatacatactttgggagttatgagtatatttacttttctgtttctgttttttttgtttgtggggtctaatgtcaagtcaactacttgtttgggaaggagtcaaacttttgagagaagtagtctttgctaattggctatgagactgtgacttgtgcactaagttacttttctgaaagtacagacgaatcttataattttcatattattaggtgactagatctttacactgattgattttcttcccttcaaaaatgaaaaagttgaaactcaattgtcagaatacttgtgtttcaagttcctaattaatttctcagtgaccattgcttatagtttggacttgagaatccaaaacactccttggaaagtaagccctagaagatttatggtatgttgatttgaattgatacctgatttaagtgtagaggtcaactcaaaataaattaaagaacatctccaattattccatttttaatttctcaaacaaatattattatcattaattaatcacaatagtaatagaaaattatgcacttaaatatgatgagttgaattctaatgccaacaaaactgtttttagattggccatatatgctaatggttctccttccaatatatataatcctctttacttttttaaaccttattttaatgatccaaaggatagaaccaaaaatacaatcttttaggaaattgatcttgatgttccctttttagtctttccaaacttgtaataatattataaagattttatgattgacccaataaccacattgaatattgttattggtccaaatggataactctacactttctcttaattttccattattataggtggaataaatgatttaatctacatattagtattgcaatgaaacaagggcatttctgtaaattaaaattgatcacgtgacctcgctcaccctcaccaccaattaggtttcaatttgagccataagcaatccaattaaatcccattcaccatagattggcacgtgatcggtttgccgcttgggcttcgtttggaattttgaaaaaagaaaaatgaaaattaaagaaatatttatttatttatttttattttgtataaaaacgtaaacaaatgaaaatcaaaattcgtcaactgggtctgggtagtttctttctccttcatttcgtctagaaaaaatctcttgaatcaatagattatcgccctaattttttttcaattgggaaaaagattatccttttcgatttcgtagaggatcatttgacgaaacaagggatttttgccgaaagaaatggggccgggtatgggcttgtcgccggccaaacaagcggagcaacttaggaaagatgggaatcattacttcaagaaaggtcgatttggtgccgctatagatgcttatactgcggtactttcccttttttattaaagaaaaagattgttttgattcatgggctttgttttttctttctgtgatttttgaatcatttatgggttttgtgattgttctagtaaagaacctaattttggggtaagttgatttctgggttttactcaaattaatggtttttttttttttttttgttcttcttctttaaaggcaattaccctttgtccaaatgtgcctgtatatttgacgaatcgtgctctatgccatctcaagaggaagtatgttcgttataatatgacacatttcctcaagttgatcagtttttgtttttaactgattatctatagttgcaacttctaatgtaaatatgtttttcaattggttatggtgttatgcagtgaatgggctaaagtagaagatgattgtagaaaagctattcagcttgacaaaacctcagctaaggttagaatcttaattaagctggtttaaacttgttctatacatttttttggtacttaaattcccatatcacgaaacctgtaaagtttggtcttttaagttttcatttgctcgttgatgattggaagtttgattgtgcaagtctgcaaggaggcaatctaggagttatatatttatatttattttatatgcgtgttgttctgtgtactatgtttggaaataagtgtgggataagttaactgaaatgtatgcttttgggagttaatattgtatgtatgtctagtgtttatttcactttcttctacttctggttttcaacatttcctttgtagcatctaatttgtatgccattccatttttctttacttgtttcggtcactacacttatacattttcctattaatgttgatttgttgtgttcagggtcattatatgttgggacttgctttaatgcagaggaaagagcatgcagaaggaataagggaattggagaaggtatgaatgaagctctttcaatcctggattagtctttagcattgttttgcttgttgacttgggatttttgtagtccatgagtgttctatattattttcaaaaaagtgattgaatcacatttagattgaaaaaatgatacagcgagatgaaaggaatttattcattcaggaaatttacttttctagcataaggttatacaacatcaatacatggaattcaagaacttgattcccaatagaatcccaccaattatgcctcttttattctttccactgatctattaaacccctggaaatcaaataacatttacaagttatagatatatgcaaaaaaaaattgtacttgtaaacgcaaaacacaatgaagactcaatactgtctaaagtttgaactgtgtttgtgtaggctttggaccttggaagaggtgctgaccccaagagtaatatagtggatgagatttggcaagagcttgcaaaagcaaaatacctggagtgggagcatgcatctacgaagcgttcatgggaattgcagaatttgaagtaagcatcctttataactttaggcctttgggatgggaaacaattttgtgattgttaattagtgcctctgctcattctgttatttaatgggccattttgttcttcttatggtgctgtagagaagcttgtgaa

SEQ ID NO: 29170 - DNA, 2999 bp, Cannabis sativa
  modified_base (28)..(39): a, c, t, g, unknown or other
  modified_base (2949)..(2950): a, c, t, g, unknown or other
taggatgttaatcaaacatacttgttannnnnnnnnnnncctagtaaaatatttccaacagaacaggcccgaccaaatactaaagagagggatattgttggggacgttgaagtccaagaggtggaggaccagggcgaggtccgtcctgctactcctcttgatgctaaaagagatgaggaagagggcgtagctcagatgctaccatttggtggctgcaatgaagaaggagagctaatttctgaggtaggcgacgtgctaaaggtcgacaaggactatgttgttgaggaatacaccgaggctattcctttgaggaggtgaggtgcattaggagatcaatggatttctccaccattcgtggtggccatgacacagatgacaaatttgctcaattgtggttacctcgggaatgtcgaatacttccttccctcccccgaccaactggcgactaacccaaaagaaggttattatgcctggtcgggagctcacaccaagcagggtgcgatgtttcccttgctctcatatttcaagaagattgcggactactatcacataagttcgactcagttcacccccaagggcctcaagtatttgtctgccctgttcatactctacgcctcgcaaggatggggtgagtcgtccccccatgacaccaattggcttttcgatctgaagtcaagccctaagcaaaataggtcagggtacttctatttttctcaaatcgggaaaaatggttgacgggcaccacggccaccgaggtgacaaaaataggaggctgcatggacgagtattatttcgtcaagggtatggacaccgaccataccagcttcctgcaggtgacgtcctattgccgccctccattcacactagagcttaagaagagggcgtagaagattcttcaactttctcctactgaacagaacatctctctcttggccaccgaggccaatttcatcaagtacaagttgtttctatccaattttgtgccaaaggctatggcatctaaagagactgtgcccaaccaggaagcccgagcttgaagaagaagaagaggaaggcccctccaaaaaagccagtatgtcctattgagcgatctatcaagatcaggaaaggacctgaaagagttgctcggtcattcgccccaatagcggaaaagggaaaggcatcctggtggagcaggaacaagaggattcctcagatgatgatgctccatctctgcttgttcgggagaatgctcctgcctacgtgcaaggtaccttaacttgcatttaattttcaattgcattggcttatagtgtattcacttttaaccttcttgttttatttatatgcagatatgtctcagaaggtgtttcaagccttgaagaagaggttgggtgacagctttggctaggtacctttggccaaacagcccaaggtggacgaggtaccgccccaggagaagagtttggtgagtcagtcatcgacctttctaaggaggtagtgttggaagtggagccaccagtcaagaagagctccaagtccaagtgtgccaagggggaagcacgaatgttcctagaagaccagtctagttttcctttttattcatttgcacaaataaggaaataaatgctcccaaattttgacagaagattatatcaagaaaaaagggaaaacttcctaaataaagattaaacaattaattcatgattaattgcccacgattataagatacgattttgacaaattcaattgtatctaatctgcctagtcagaagattgtctccttcatgggttggacttcacgagacgacccaagttaagtaattcaatgtaagctccctaatagtgggaaaagagaaactaagtacaattctcttaacactataaatacccaatgaatccttcgaattaaggactaaattctcttacaatatttttcaggaaaacttgagaacttatgctcattgtattcccaaaggtttttctagcttaaagttacataataacattgactcgtggactaagactcgttaacaccccaaccaagtaaaaaatgtttgtgttgttcttactctttctctgttaattatttatttcttcagttctaattatttataattggtattctgaaaatctcataaacactttcgattgttgttactgcatttacaatatgggttgatttaaaatgaaaataaagaaacaagaatgagaataaaatgacatttaatatgaggaaaataagttacatatattcattatgcattagaatatcctctcctctcactttggaaggaatcgccattccattgttttcaattgcaaccaaaaatacacttacttataagcacctaagatgagattcatttcatattattatccatgataaaaagaagataaagatggaaatagtatagaacaaaaagaaaagcaaattgatcctattattactcatatatattattatgatattacagattatagaaatctaataacagagtttcataggcagtgtcattttataaccaaaattttgagatcatgccaaagtaaagtaagttggctttcctatgtcattttccacatgttttgttaagcatttaattaatagactatgacatataatctgacatttttgtggggcgtgctaggtgctctcaagacagtcttcttagcagatcgtggagtggaaagaattactcaaaaataccacatagagatacacttctatctttggtaaggacacaaacagaatgcacatagtgaatgtgtatttctatccctcctttctgcagagaaaaaaaaaagaaagaagtaagcatcatctgcagaatttaaaatccaaatacacagattattgcaatattagtatctaaagattgttgttatattatttgctacaaaattatttgttacaaatgagatattatttaatctagtgggggaatgttatattattttatataatannatatttagattaaataattaagttgtaaataattaagtgtgacaaagta

SEQ ID NO: 29171 - DNA, 2292 bp, Cannabis sativa
  modified_base (1175)..(1186): a, c, t, g, unknown or other
  modified_base (2047)..(2057): a, c, t, g, unknown or other
gagagagagagagagagataaatgtatatattgcaatcaatgataaagcaacattattatatcaatactttattctccaaaaaaatacattattatataaatataagacctattagagtactctcacattactaataggtagaattaaattactatatataagatgaataagttactcttcctgccaattggttttgaacttttgagatagaactactccattcaccttagctactttcatttcaaattctaacaaagatcagttctgatttgatttggatcttaggaaaaacaaatttttaggctatttttgtaagaataaataatatttttaaaaattattaaaaaaaaattatttagacctctgagatgagtggaccttaagcgcgggcctaaccggccttagtttagggtcggccttgtataaataatattacataataattagtggaagtgatatatgtgtatgcaatttttttttttatagtaaactaaaatatcaatcgttgatactataaattattaaatttttttaaaaagtttacaaactttgatattgtaacagtaagaacataaaaaaaaaaatagatatagttatttaggcagaagaaaaatattgtctaaagataaacttattgttaatgttataattatttgataatattctgaacttatcttaactttaatattgtaatcacattatttgattgcatgataattcctctcatttcataaaaaaaaaaaatggaaaaaattttgttgagaatgttataagaatatagtttcaaaaataattaatatcaacactctaccatgccaaaggattaaagaaacgacaaaatgattaagaaacgacaaaatgattaagaaacgaccaagataaagatatgaataaacgacaacttaaaaagttatccagattctaaaaaattatcattaaaaaaatggtaaatattattttagatcttatattttacgaaagttactaattgggctttctgttttgttaaatgacaaaatggatcctgtattttccgaaattgaccaaataggaccctaaattgattttttgtccaaataaaacttaataataattcgatttagagatgttatgataaaactggttacattttctatatctattagtattaaaattatcttaaagttagttatannnnnnnnnnnnattgttgaaaattgagctcaaagtatatttgtacaatttttgaaaatataaaatctattttgtcatttaataaaataaataatctaatcggtaatttttacaaaatagaaagtcgaaaataatatttactaatatgattgaaataaattactaatatattatatgtacaaattcatggaatccaattcattattatgagaaaaaaaaaatgggtagttgggctcctgaaaatgacaagagccaaattaatgaaaccaataattgatttactataaacaaataaatgtgtaaattgtgtacaaaatttgttcctttgaatattaaaaacaagaaaataaaaaaatttccacgtaaattattacttacctacataaattagcagccatcaatagtcaaagtacaatataccaaaacataataaatgtgctcaatttcattttattttatttatttttgaagaaaaatgtgttctatccacatttttatcctatatttggtagagaagaaaaataaaaggaatgaaaagaatggagagaaaagtcaagagaagaaatgaatttgatttgtttggtaagaaaaaaaaaaacaatatatatatcatactaggtattagtaacatgctcatgtttgcttagaattgcattagaatcagagtcgggcttaagcttaggcggactagacttgtacttagcgcccgggtaggtttagaggcccaaaaaaaatattttccatatcaaattatacatattttttttagtaattttctaaaataccacattttttaaataaagacctaataatttttcaggcctacccaatctcaaggcttagagttgctattacttaattattaatttaaannnnnnnnnnnataataaaattaaatctaatacaattcaattatattttttgaatatataaaatttaatctagttttaaatttatttataaaaaggtaatatctaactaattttattaaagaataaaataagcaaataagtctagataatttaaataagataattaataaggggattatttcacaaatacataaaaacaataaaaaaaaattataaaaatactgttgtacggaattttaaatattt

SEQ ID NO: 29172 - DNA, 2090 bp, Cannabis sativa
  modified_base (1322)..(1329): a, c, t, g, unknown or other
  modified_base (2030)..(2061): a, c, t, g, unknown or other
ataaaggaactacaagcttctaactaacatgggactttattgctataaagtcatgccattgggattgaaaaatgttggggaaccatatcaatgacttgtgaatgaaatgtttgcgaaacaaattatacagaacatggaagtctatgttgacgatatattggtgaggttggtaaagagtggaagtcatactacagaccttgcggagtgcgttgaaatattaagaaagtacaatatgaagcttaacctgaaaaaatgttcctttggagtttccttgggaaaatttctgggatttatagtcaacgtgaggggcaatgaagaaaaccctatgaaaattaaggctttgataaatattccatcacctaccaaaccaaaggaagttcatgccttaacaggaagaatggcggcacttaacagattcatttcgaagtaaattgacaagtgtctacaatttttcaatgtattgcgaggcaacaagaaattcaaatggacagaagagtgcgaggaggtcgttaagagcatataaggcatttttcaacacctctagttttggcaaaactagtaactggagagacactactcttctacatggctttctcggaaagtgcaattagtgcagcaatagtgcaagaagagggaaagcactagcaacctatttactatgctagtaagaggtaactgggggcagaatcgaggtatccccctcttaaaaaacttgccttatgcctaatccatgcatcacgcaagctacggccttacctccaggcacatcctattaaggtgttagctgatcaacccctgagacaagttttatcaaaacaagatgcttctagaagattgatgaaatggtcaattgaactggggcagtttgacataacttatcacccacgaacatccattaagggccaggccttggcagatttcctgatagaaggaataactccagagaaaaactcacttgttcagtgagacgcggatacttggatattattcgtggatggtgcatccaacgagcagggcttgggtgtaggggtgatattaattttgccagaaggccttaagtttcattatgccttgagatttcaattaaacgcaaagaggctgaatatgataccttgatcactggtttaaggatagccaaagcattgaaggtgaaaaaacctcatatgtcatagtgattcgcaactgatagtaaattaggttctcgaggaataccaagctaagggcttgaaaatggccaagtattaagagaaagttcggaagaacttggaaatgttcgattatttcaaaatcaagcaaatcccaagagaacaaaactctaacgnnnnnnnnttagcaaaactggcctcgcagaatgacttgaatgaactaaacttggttctagtggaaatgctaaatgagccgagtatatgtgaaaaggaagatattaccatgtaagataggctcgtgtaatatgcggaattttaactggaaactgcgtaaaaaaacttgtgttatttcttttccttttactactattatttttgtgcaaatccatcacgaaataggttttaatttagttaacgaaaatctgcattaacatgcgccattcaatttcttaagaggaaatagaatgacatcataagcaaacgatttataaactatttatccaatgatagactttctaagaaaattctaaatgaaaagctaaggaaaaataaaggataatttcgattaaaataagaatcacacgatgtcccgtttaggcatgagtcaaaattattcttattttataaattcttcaatgttttatagtttaaacactaatccaagttgtcatctttagatgtacaactagatgttgcatttataaatatttatctattaagatctaacactattatgtttgtctaacggatgacaatcctttgagatttgtcttcaaccaatggaagattcgaaattgaaactacaataattaataataaaaacaccatagttcaatatcaattcataacaatttagaaattattaagcatttagcaagtaacaannnnnnnnnnnnnnnnnnnnnnnnnnnnnnnntaaataatttccaaggtttccaataaact

SEQ ID NO: 29173 - DNA, 2114 bp, Cannabis sativa
ctaatttgttgtctatcttacaatattgacttaacgataggaatgaaaatgtagttagcgaaaaacaaagtaaggataaaatgatttgactaaaaggaataaaacgattcttttgaaataaaacagaaaacttatctaaaggaatggagaatttatttagaaaaaatagagttgtttcagtaattgaataaaaaagatgaatatggctaagtgaatgataactttattcagaaaaaatagaataaggagaaagtgattctactaaaggaatgtaagattattttgaagaaaatagagaacttgactaaaggaataaaaagattatttggccaaaattaaattaggagaaaatgattttactaaaggaacaaaataaataatttagctaaaggaataataattttgtttggataagacaagaattaggagaaaatgattgaacaggaatataagattatttttgagaaaataaagttattgcctaagggaactaaaatttattttggaaagatagaaatgggagaaaaagatttaactaaaagattcttttgagaaaatagataatttggctaaaggaatgaaaatttgatcttgaaaaaatgtaaaaatgattaatctaaaggaataaaaaagatttttttgagaatatagataatttggcctaaggagtgaaaattttatatggaaaatatagagttattttactattagaattaaaaaagattattttgagaaaataaagaatttagctaaaggaatgagaattttagttggaataaaaatattattttgaaagaaaataaagttattggctgtagaatgaaatgttatttggaaaagatagaattaggaataaaaaggattattttgagaaattagagactttgacaaatgaactttttatttggaaaaaatagaattgggagaaattgagaaaataaacaatttggctaaggtaatgaaaattttatttaaaaacattggagttaggaaaaaaatgattttactaaaggaataaaaagactaattaaaaaaaataaggacttatttagaaagccaaataaaaactatgagataatcatattaaataaatcatcaaacccaaaagcaacatttatatgaacacactagaaagcacaacaatacagcaaattcaatcaaacattatgaaaataggcatacaagaaagcaataagtgttaattatgaaaataggcatacaagaaagcaataagagctaattaaggcaaaagaaaagagagacttagctcaattagaccaatgtcctcactgtgctcatcatccaccatccccatcgtcacaatgactttattgaaactttaaccttgaaaccacattcgaaacacatttctgttattatgcatatatacataaatattcatacaaatgtatgaaatgaaggcatttaactaagtaagctcatggtatgtgtatatgtatagttaattaaatgccttaaactaacttttacaacagaacagaacaactcagatcatggtatgtgtattcataaaaaaataccttaaactaattttacaacagaacagatcatagtatgtgtacataactaaaggcactttaactaacttgctatcagaaatgagtatgttaagagcaattagaccacataattgggactgcaagtatagcatagaacctcccaaacacttccattagttcttccttcactacctcccaatttgattggtaaatagccattgtgaatccatctagtcaacaactacaatttttatctcttcttcttcaaaaagtctttcaaggtttaatttttttcccactcagttctttcaattcctatcattgcatgctattgggattgatccacttgcagtcttaattcttgagatgaaattccttgcacacaacaacttatggaatagctatgaatttgcaccctcttctttggcctatttgcatcttcttcaatagcaattcgcttccattctattttgagccttcttctttcttccattaactgtgaatcccactcacctcgttcctccatcatgtccagcatagacaaccgtccttcccgtgattgtttctttagtttactccccacttcattttgat

SEQ ID NO: 29174 - DNA, 3192 bp, Cannabis sativa
cctatgatttatgttaggaatattcataaaatctatatgaccaaattcaatccctatgtctcaattcaatcatgcaacatattgaataaaattgaaaattttaaaatttacacttcttcgaattaaaaattgattaagacataaaaataaccaataaattcaatccaattaaccaccttcaactctactactaatatgtgaatatgtgatcaaaattcaaattcaatagacacaatgaaaatcatattgtttaaacgacataatatttctttaaacgacattcttagcgtaagcgaggtaagcgagaaatacaagtaacgagaacaaattcataataaatatttataaatataaagtatgagtctaccggaaagagagagctagctttcgtcgtcgtctgaggcaaatagccagatatcggttgtcagcgtctgcaatcggacgaaggtgtgccatcttaattgtttcttcaaacccaattccccatttcttttttcttctgttcttctcatcataaatatctgtttatacatattgttatcaacttttatgtatttcaaatcttattcacgatcttgatttgatttgatttggatgtagttgttgttgtaggttgattgattagttttaattaattcgttcttcatttttaataatcttgacagtaatgttaatctaaaataggaaagaaaaataaaaataaaaagattatttgtttttttttgatgagattttccaactttcgtttttgataaagaaggatcatgatgggataaaatgattataatcaaagaacattttaattattagaatgaaggtagaagtttagatggagtattgaccatggatttggagattcggttcaaaatttggaaagggcttctgcctatgggtattacctgatttaacatttgggattaccgaaagaggtgactgttaacagttacgatgaattttaagtggaggtaactatttgctgaagcagggttaagcattatggaccttccaatgttagttgaatttataaattcaactagcagtggctgatatttctcattttccacaactttcaatgtggatagcttcttactagtgtggattttggcattggtggagcattatgtataataggttcttgtttgaaattattatcagaactgtgaacaaaattttaaaatttattagttataactgtttgtttcagcacctaggcttgttggaaacacgcagtagcttggtttatccacgctaatactttatattccctttaaagagttagaaattgaatgccatagtcaatggggtagaattcaacttgtgatttgtcatctttatattccctatagtttcacatgatttttcattgcagcaactgctgagaacggagtgttcttctcacatgagttcaacagtttcaacatctagaggaatacttcctccaacaagggttggtacatatgaatccccagaaagagggcctacaggctcttttaaccaacttgaaccagagatgaatgacaatgatgagacagaattactttcagtatcctggaaccaggattatggttgctttgctgctgggacaagccatggttttcgcatatacaactgtgaccctttcaaggaaactttcagacgtgatctaaaaagtggtggatttaagattgttgagatgctatttcgttgcaacattcttgcacttgttggtggaggagctaatgcccagtatcctcctaataaagttgtaatttgggatgatcatcaaagccgctgcattggtgagtttgcatttaggtctgacgttcgtgcagtgaaattaaggcaagatcgcattgtggttgttctagagcacaagatatatgtttacaactttatggatctgaaactgcttcaccagattgagactctggcaaatccaagaggactatgttgcttgtcacatcattcaaatacatctgtgttggtgtgcccaggccttcaacgagggcatgttcggattgaacactttgggttgaatatgactaagttaattaacgctcatgattctcatattgcatgctttacaataacaatggatggtctgcttcttgctactgctagtgcaaagggtactttgattagaatcttcaacactatggatggaactcgtttacaagaggtagcttggttcaccctagattttcattttgtgaatattgatttttactttgttagtttgccttttctacacagtttatgtcttcatgatttcacatatgagcttgtgttctttcaatgcagttattctgtattttccccttcccccatctcatgttcatatgagcttatcaaagtttgtgaactgtacaataatgatgatttctattcaattatcatagcagtttgtgttctttctaatttgtatttttcccttttccccatctcatgttcatatgagatgtgaactgtacataatgatgatttctattcaattagcttcttcaagaggttttgatggttttggatgaagtgctgcattgatcaatttccttcgtataggtacgtaggggggtggacagggcagaaatttatggcattactctctccccaaatgtccagtggctggcgacatcaagtgacaaaggtactgtacacatattccgcctgagagttcgagttattggggaggattcatatgctaattcaagtggcccccaagcaccacaactggatcaccagaattcttcaacttcccttgattctcttatttcgtcaaactctggtgccaatcccagttcatcgctgtcttttatgagaggttgaatttacgtatcatcatattgtttcaaatactcaaatgaatgatactatttgtattgtaccatatatgctatctaatcttctaatacttttccaggggtcttaccaaaatattttagctctgaatggtcatttgctcggttccacttaccagaagacactcaattcattgcagcatttggatctcagaatactgtcatcattgttggcatggatggaaggtacagaaatattctattcacatttttgttctctttttatcttggttgttccagctttcctacttaccttattacttaaaaggtatcttccaattcagaataagaaattgttctttgaaggcttcttagatgagaagttctttgtgagcaccactagctattttagaagcta

SEQ ID NO: 29175 - DNA, 1778 bp, Cannabis sativa
  modified_base (1509)..(1517): a, c, t, g, unknown or other
tgggatcaaaccgggactcaggacttgggatcagaccgagactcgggacccgagatcgaactggggacctggaccggaccaggacttacacctagaaccggaccgggacctgggacccgggaccggactgggacccgggacccaagactaagactggaactgggacctgagaccaggaccgggaccgggactcaggactcaggacccgggaccgagaccgggactgggaccgagacccaagacttgagaccgagacccggacccgagacctagacccagacccgggacccaagacccgaacacggactcaggaccctgacccagactcggattcgaacccaaacttcgacccaaacccaatctcggacctagacctgagaccttgactcgaacccaaactacgacccggaaccaaacttggacccggaccagacccgtagctggtgttgaaatagagtttattaaaaatatattaactttacacaatctattaatacatgtcaataccaaacacagtattgtattaaataatactaatacaaaattaaaatgaatataaaattataagttaatattaaaattctttaaaaaaaaaaagttgggtcggatcagatccgatccgattaagtccggtcagatctgacctgatccgagtatttgatctagcggggcggggcagatccttacatgatttggatcaggtcgaatcttagctagatcatatatgacccgacccatttacactcctatgaataatggatttttgtttttatttttctttttttaaaaagaacaatgcactcttttttattagtataatctcaaattatttttcttttgttataaatttaaaaaagagttattatatttacaccccataaatatacaattaaagacaccctatttattataaatattaaactaatttattttttaaaaatatattcttatacttttttcaatttaatttttacattattaagttattttttgtaattattttacatattttaatttatttttcttttatatttttttaaattatgaatatatttttaattctttttttaacatgcaaaattatttttagagtaataattgtggacagaacgtgcatcatcgagggagtagccaatttattaaatgaagcaatccctaaacgaatatcatcacaaacatgcattttccaagaaaaataaataaacaaatatcatcaaaactatttattaatgtattattgcaaaaggaaaaactagtataaatgtatattatgtggtattagatcgcctttgatttaaatatagtattaaaaattatggattttttcatttttacacttcaaaataattttttttagtatttttacgaaattctacatagaaacctctattgaaactagcgttgcaacctaaattgcaacaaaaaagcgtatagaaactcctattgcaactagcgctacaaccaatttagaaacccaaaccttaaatttgaaaaaaaaaaaagttaaannnnnnnnntatggggtaattcccctaaaaattaattaacactacatttgtaaataccattttagatcctgtgttttgcaaaagttatcaattggaccatctgttttgttaaatgacaaaattgatacaatattttttaaaatggtacaaataggaccctgaattaattttttgtcaaaataaaatttaattataatccaatctaaaagtgttatgttaaaattgcatgtttacatttttgtatgtgttcgtattaggaattgttttcaa

SEQ ID NO: 29176 - DNA, 5197 bp, Cannabis sativa
agaattgggattagggttattaccctaaagtgagtggttatatggcctagggttattaccctagtgattaatgattttaaatgttatgccattctataaatgttgaagtaaagaattatgcgttcaaggcataatttggttagacttggtaactagaactgagataaaccgttctagggccttattgtaattagacgtgcgagcgtaacacgtgggtctatatgccacatagatataaataggcgtgtgagcgtaacatgaatgtctatgtcaaaaagacaataagtgtaatggcatttatatagatgagaaatgtttattgtgtttattgatatttatactgttttattgggcttagctcacgggtgctctactgtgcaagaaaggataaatctatctctaatcagccatgagttcgagagcttgacgatggattgtacatgttcgggccacactagaccaagcgagttgggtctaccagtgaatgtattttgtaatctcggattttgtcgcttaggtcggcatgtaaattaacttgtaatattttgtgaaaagttttgtgggatcccgaaacatgttgtctttttggtttgtttgaaaagtttaaaattattacaagttatatttttattttgttgtaacccaagtttaaaatttttctgatcttacttctttagtaatctcgatttagcggggttaggttttattactggttttcgtagcgtgcctaattattaaggtgttacaatgcacatgattggttcatccatctcaacatgggagacattcgtagatttatttatgacccattttcaagcgactatgacatacaagctgccatacataaccctagcaaacattaagtaggatataggtgagtcgttacaagattactttaagcattttaacgctgaagtaaccaaaatagagaaggcccccgagtcttcgcttgtttgcatgctcattacaggtgtattgccaagggcagatttttggaaagagttgcaggcacgacgaccagaaacactagtcgagttttttgccttggcagaaccccgcaagtggattaagaactcattggctgaactcgagaaaagcaaagaaaaatggagatctctaataccaagaacacggtctcggagtccatgatcaagaaattctagggggcacatccctagacacagcctgaaaagacgcaatcccacaaggtgacgaagcctaaagcttgccaattcccattgcccttccgtctttgctaggacttttgatcttagtggctacctctaaaaatcgttgaacgtattcctttaggggtttgtcttcctactgcttgacatccacaaaatcattgggttcgatctgacattttcgtgaaggagcgaattgaataccaaaataatccactagatctttccatgagtcgattgatctaggagagagcttaaggtaccactgctgagttaggtctgtcagtgtggcagggaagattaagcatctgatgtcatctctcacaccttcctagtctgcacttgaaagtagtatatgtgagataatacatcttccttcccggtgtattggtgttacgaagggtttttgaacttcgaaaggataggaagagctttaattttttcggagaacagtgagcatcattctctgtcaagttcaaattcataaatcttagaagtcgtaatccctttcattaaggttgccaaggtgttgaattctccctggttgatcccataaatggtggtctgcatcgcagttggagtttctattacccgagaaggatcccctttagaaggtcacgcaggtctcatggtctttcaagtcaatcatgtactccagtcaacttaggtcttgtagtggatcacaagtgtgaagagaattgaactagttactcaagtttaacttctctccatgtactcgaggaaagtactcatactgttggccattggggtcataggcaaagtaacaacacaactcaccccttttatctcagaagcatttttgagtatgaagtggttcattggtccttaccagtcggatgtcgtagcttctaattgcaaagtagtgtctcttactacctctgtcagtttgagtagcaggtccattttcccttgcatggtctcagggcgttgtgtcatgagagtgttgagaaggacttggtggatgagtcctattgtttatctcggtgttgtgaggtcgttcaacatcaggtggaaggccattggttggcgcctttgagcttgagtcctttcaggctcttacttgaatgtactttccctttgggaagtctccatgccttgcctagtgtttgcttagtgcctgcttggttaccaagtgtggtagtggcattctgagcattaagggtttccccttgagcactagtacccacgtgaccagttggttgacggggagtctctctcaccaactcagaaagacccctatggggagtacttccgcaattagagagataaacttctctaatctgatgagacaagttacctctctaatgttcatgttcagctcgttggctttcaatgttcatccaattttccatgaactagtgttgaaaatgttcgtgttgattatcgatagagtctcgtagctgttgttgcaagttagccacaatttggctaagctaggcaatctgaggatcagcctccttagggtcattaatctcgatgtgaggctccctaggtgggatctggtcattggtgccagtcccgggagcatttggtggccttagaggaagatttaaagagctagttttgaggcctactctcgacacctagggcgtgggagtagctccaattctaactccatcaactagcgtgcccctagttgattgaccagttgttgggattcctctgtcaacactcatagagcgtgtatcaaacatcttgttagtaattcttgagttgtggctctcaatgagagtactaaaatattgactcagaaatttagactagacttctaagccacacccgctcgctagattgacgagaatgaaaaagttattaagtaattataagagggatacaacacatttatagtagttcattccctatatcgcgtcagcaatagagctacgtctactttgagtttttatttctcacgagatggtattacagaaataggctaagtatcaaaaactccaatttctagagagagaagctatggccttgtgggtagttttttaaatgtgtaaaatgagctaagggagctctccttttatagatgaaggggggcacaaaaataggagaaaaatataaattaattttttgaccatagatgacgatccaacgataaaaattagcttctgatggtcatagtcatttttcgtagcttggcggggaccctctgtaggtaacctagagcttatttttgtaacttccttgagggtgaaatttgaggttgatagctttcgaattgcgattgaagtgtaagacattacttaatagatcattaaaatatctttgaaacgtaagttgaatcgtgcttgtcggattaatattgagtgagttatggctattttattgaaggtagtatatgacccagcgtctaggttgacatccaatgctcaggttgacatatgaagtcaacctggatgctgggtaagtgtaaaaatgtccaagggatgtactttaagatgcctaagtgatattttgacatcacttactctgtttctatgttttggtgaagctggtcaccaattctcgaagatgttgctgttctgcggaaatgagagactaaaaactcttcatttctgagttagtttcccgtgtcggaaatgagaaatatgaagttgtgaatttgacttctctcacttcatggatcttagttattgtgaaaaactagacagacagttgaaatagaatcagaattggataagcagaacccaacgcaccagtccatttgtcaacttgggtgttgggtactcattcccgagctcccaagatattattttggtactttcaaggttcttgactttgaggatgaggtctcctacccctttttgacaattcaaaattcattggttgaatcaaatttgacatttgagtgatcgaaaccagcacactaggttgattgtcaacctaggtgctgagcccagcactaggtcaacctgggcgttgggccctgtttctaggggctcgggtttgtggttttctccctgagtttgcttgaatcttcattatttctgatgacggcaaaaattctcgaaacactttttcaagaacttgaataaaaacatcccaggttgacaatatgtcaacctaggtgctaggcccagtgctaagtgtcaacctgtgtgctgggtcccaattatgaccctttggaagttccgtttggtcccaaaaatagttgaaatctacatcttttctgaaaacagagaagatgcttagaagagttctcgaaaaacatcatcggaatcagcccaggttgacaaaatgtcaacctgggcacttggacttgcttctggcactcaagaagtgttgttttttccccaaaagtatctatttgcctgtttttgatgaagacgaagaatatgcaaaagtcagatcgtcgatttgatacttggaagacacctagattgacaaattgtcaacctggacgctggggtgcccgagcactgggtgctctgggtgccaaaaatgaacttgctccgaatttaatttagatgcctcaaatatgtccgtggtatgtctagttgatgtcctaatgcaaagtttgacccgtttgctctaagacagtcccaaaaattgaaaccctgattgagaatgtcaacttgggtgctaggtgaaaccctaggtgcccaagttggcttccgggatgtagattcatgtaatttcagctcccgaggcttggatttgattgctccatgtcttcatggtatagattactgaaagatagtgagttaaattcaagctattgaagtccgaacttccatcccgaggctcccgaagtcaacctgggcgtaggcacaggactagggtttcctccccggtcaactgcaatgactcaagtctactcaactttgtgacatcatcctttttgctacgtgtcaaacattgatgtccacatcaccagagaaagtttctgaattaataatgggtattaaaatagttaacgagatgaggaccaggagtacaccctgcgcctattactctcatcatttctattcttaaacaccata

SEQ ID NO: 29177 - DNA, 3396 bp, Cannabis sativa
aatcataattagcctttgttttttttaagagaacaatattttgacattattttatttgaacatggatggcacgtacctcactcaccacctatttttcatatgttagcaattagtgatacggtttatggataataatcaatattataatgccgcagtagtttttttattgattaaagtctactctatttaataagttcaaaaggaaatgcatgcatcatttcttggtacctattacatgaatctagctcataaatgtaatatacaaaatatagtaatttatgatgtataaattaaactacatagccaatcaagaagttttggtattgcatggtagctatttatgaggaagaaacttaattatattttcttcttttctagataaggcaaaaaggtaggcttctttaatcttagatgagtctcaatgtaacgtttgttcttttatagcttcaactgtccaaatatgggcaaacccttcctaaaaatgtatacatatttttattaattacaatatatatatatttgtaattacagctaatatatatttactatcgaagtgttatatatctttgaactattatctttgatttaatagttatgctaacttacacctagaggtgagaagttcaaatattccaacaagaacatttttatttcttaattataaaagtttacttttcaaaaaatgtagctttagaatttaaacccctatatttaatacattaactattgaagaattttctttaaagaaaagttacacaaagtacttaagattgtacttgtttttttttttttttttaatgtttttaaggatttttttcctttttttttttttttacatttttacatactgtatttttcaaagagaaaacaaaatatgttgttgttatgctgtgcaacgttatattatattctcttaatgtgaaaataatatttttttttagaacaacctaaaaataacaatttataaaaaaaaaaagtttgtaaaaaataatattctcttataatgtaattttttttttattatttatggagtattatcaagtaatttcatatttttatggttacttttcattttactttgtattatatttaatactataaaaaaaaaatacaagtatatataaatatcacgtagaaaaaaaattatgttctctgtcttatacaaaaaaaaagatattttttttttttgaactttaaattctaaatccgcatttcaacatttattagagttggttatattttgaaatgaacatgacatttctcgtatatctgtatgtatgtatacaatgaagaaagtcacacttccaaagtatggctgtttgacaatggtagataaataataacatctaaactaattaatgcttctttaatgacctgaacaatcctaattatacttaaatctcaattagagaattactcaagattatttaaattacaaattagaacacacagctgatgaacatctcataataatcttacgtgtaattccttttaaagaataaaaaatacatctacatcatattcatatgcaagttgaagggagaaaattacaggtcaagctatacaaacaaataatacccttcgccacataatacataacttagtatgtatttatccccaaaaccaaactagaggttagatattatttattgaaatcatgaaaagagaaaataatagtacttgtttaaaggctgatgacaaaagagttagctaaatatttttttgtcattttccttctcgttggctgtcatgtttgtcataatatctcttcttagctggctctagtctttagtctgtagatgaagtcattagtagatttggtggaaacttaaaagtggtattattatatgtaatagctgtgcctaaagattttaatcttctatcaacgcgctttcttgctggcatttcactctctcctcttagctacttattcatttctttttctttctttatcaatacgttatattaattagctttccactactgatgaattagctaaacctaagctccttccgagtagttgctttagttagcccactaatcaccaaattaacatactcacattatgtatataaatacaccattttcccttgtcttctaaactcacacaaaacaaagcataatttaagagtctcttcttttctctaagctcagtataattaaaaatggcatctttcgcctcagaaactctcactttcatcttcttcatctctctactccatttgggttcatcggggaggattctttccgacgagtctgaccaaacccaacagcctcttccctttcaataccataatggccctcttctgtttggaaaaatctccattaacttaatatggtacggaaacttcaaaccaatccaacgagccattgtctccgacttcattacctccctcacttcatcttctaaaaccaacacagaccaaccatcagtcaacacgtggtggaagaccatcgaaagctaccaataccaccacaagatgagcaactccgtctcgttaggatcccagttcatcgacgagaactactccctggggaaatcgttgaccagtcaacaaatagtgggactctccagcaagggcggccaaaaggacgccatcaacgttgttctgactgcggctgatgtggcggtggaagggttctgctctagtaagtgtggaacacacggtgtgtcatctgggtcgggacccggtagtaagaggtccaagttcggttacatatgggtgggaaactcggagagtcagtgcccaggtcaatgcgcatggcctttccaccagccaatttacggaccacaaacacagccactgattgccccaaacaacgacgtgggtttggacggaatgatcatcaacgtggctagccttttggctggaaccgtaacgaacccgttcggaaatgggtacttccaagggccgaaggaggctccacttgaggcggcttcggcttgtagcggtacttttgggaagggggcgtatcctggataccctggtcaactcttggttgaccccaccactggtgcaagctacaatgctcacggtgacaatggcaggaaatacttgcttcctgctctgtttgacccttccacctccacttgttctaccttggtttgaacatacataattaaattacacactgtataaatatatatctagagagagagcattgattttttttttttaattctttttattattattcgactattcatcatgtatacttgttataccaccattataataaactattggtattattctttatatatacgattttttaatcaatagttccattttcgatcatgtatgcttttttatgaataaattaaatttatatatatattttggtaaggatgaataatttaaagtttagtattgatttacaaaaaaaaaaaaaaaa

SEQ ID NO: 29178 - DNA, 4018 bp, Cannabis sativa
  modified_base (430)..(431): a, c, t, g, unknown or other
aatccatataatttaaacataaaccctagttaaaatactataaaaaagaacatgatgctctcattctcatccaattttaaaacctaccaaatgtagttttctaactctgtgatacaactagtagataagagacacattctatagtgatttttgaaccctcctttattgttcttcacctattctgcccatagtgatagaatgccatgcccacacatagcaaatcaagtactcaatcatagtgcgaaagacggtggtaaccagcccaaatgagagaaagagatccaggctcaaatcgatcttgataatactttgcgacagaaaggaacaggggttagagatctgagcgaaatgagtcattattattccgctgcaatcaatgtaaggttttctaaacacttatgtgtttcgtattagaaaatttatatttagnntgttaatcaacatacttattagtaaatctagatcttggtaaaataaattccaacaaattaacacttttattttttaaattttttaatcataaaaataaagtaaaatttttattttttttttaattttgtttttaacaacttttattttctaattttatttaagtgaggaataagaaaataggttagataaagtgggtcgggtcccgaccctagggtttgggtcccgggtcgcagtccgtgcctaagtccaattctcgagtctcaagttcgagtccccggtctcgattcgagtctcaaatctcgttttctagtccaactctaagttcaaaattgattcaaaatattaatgatagaaattacaaatagagtataattaaaaaaaattgattttttttttttttttttaaattttcaaaatttagtttttaattttaaaattaaaaagtaaaaacaatcttacataacatcttttttttcttcaaatatttatcttttctaattaaaaaaaaaaaactcaaaaaatattattgaatgcactttttatataatatcttccattaaaaaaacaaacctatataaaatatcattatttgttaacgacacgcagtgaaaaaattactaattttggtagtatggcaacattcaatgtcttcaactaactgtatatgaacgaaataaaaaacttaataaatatatatagataaatagttgaagggataacataaagcttggtaattactctcaccaactataattttggtcttccacgcgcaatcttattattataggatatataattgacacgtagacttaattctcaattaaaaaaaggataacaagttaataataaccctagtatgattattctagcatgatcaaaacttatgagaatatacgaccgagacagcatttagcggcacactatgcatagcatagtaaagtaaaaagcaagatatagagagaagttaacatagttacgtatataatgatcatatgcgcgacaactcattttgaacttgtagtacacgaatgcccaatatgcgaccgatacaatctcaggtgttctatttatagaaccccgagagattcatgcatcggtaaaaactccaaagaagttttatggatttttgaattgtccaaagacctcatatgcgagtaacaccagagaacccgaaagtttatactcaggatgtgggtgggcgatgtgcaactttattagtcgtacttgtttgaatattaataagaatggtcaaaattgttctattatttattttataggcatttttttttttattttaattgaatgtaattaatattgtaacagtcttgtctactatttatgtaaattaaaagatcacttgctttctatataaatgagtgatccaatcagactaattaaaatattctttttaaaaatagattaagcaaatcgagctttagttgaactactatattaatcttttgtgttctatatttgtttgctgtttatattctattaattgcgttgttattttaagtattcaccaacgtgtgagcattcgcagttttgtacataggtattcttgattagttcgaatactcattttttttagtgttatctaaattgcttcgacaatatttatacgtattaatatttctagagaaggtgccaaagaaactcactaaacaatgatctcttttgtactctttttaatttaatctatcataagaacgtgcaaaatagagtttgctacgtattaaatcattgtttttgattttatgaaaatagaaagaaatgaaatctgtttgaggagagttgttgagagtgtgaacttcccacacgacaagaaacgagtggtgagttggtttgacgagacgcacataactgatatataatgctaaatttgacaaactttgactgttttgcatcgttcaaagtcaaataaaggcctttagtttagtcatataccaagaagaacatggaactagattaggattgttaatttaatttttggtatgtttaatattacaaatatattttgatttgtagaggtaagtgtgtccgactttatctctgttttcaagtcttgtaattgtattgagtattcaatcaagtttacaggagaagaacaaaaagtataaagcctttagaaggttcttcaagctttcgggagaagatggttcaagtcttgcattgagaggaaacaagcattttttctagcagaagcgcttcctaatgttcttggctctcgcgagtggtgaccctcgactgtagtgtggtgcttaggagttttgtgatgtttgacaatagtctggtgcttggttcattattggtgtgccccttgtgcttagtcttaattgtttaagttagtttagttttatgatattttacattagtttttttattgggtgcattaatgtttcattgattggatcaaattgttttagtgggagtgaaattttcctctttcttggccaaatctatcttttggtcttgtgtttcatggggttaagttcttttggacgccttgccatagttggttgaattattttccttatttcgtgcgtgaataatgaggttatcgtgtcacaaattttgttagaagatcaataatagtcattgatagattgattttgccatatgtttatgtggtttggaaatcttacttttacatcttttatatgcttgaggttcattgaatctttactgttgttaaagtgttttttttttttttttttaggataaaggcttggtatctatgaactatatttttatgtgatgaactttatccgattttactattaatagtaatttctattttatctaaaaaaatatataaattaatttccttccccttaactaatgacaaacttatataatttttcttaaaaaaaataaaataaaacatttaaatatttcacataatttgagagtttatctattgttggattcattagaatcattactcataggcctccttaaaaaattgaaaacgcaaagaattccgatatacaacctttcaagggagaagaaaacaaaattattttcagtaacaattaacaaataatatgtatagctaaaaaaacaaatattcgtagatcgcagtaacaaatttggtaaattatgagaatttgcaacaactgaggcaagaggttagacccactccacgcacataaaaaatgtcagaattacacttacacaaatatacccaataggatatatagaaggttaaaattaagagaacaaaacatcagaagctaacgtcagcctagctatatgcatgggcaacaacttataattaattaattttgacaaaggaacttaaacaagaaaatatatatattatgtaacaacaccaactaacccttactttatttttttttacttgtaattgctaaccacttattggactaaattaagggctataattttattgtatttgttttaataatattattcgaattagctctcaacagctttgtgaaatgtccattgatcatgtacattttcgtctatacaagttagatagatagcattatcttatgtaattggtacgtacctgaatcttgacttgtgagactctaattttgttattacttactcttca

SEQ ID NO: 29179 - DNA, 1512 bp, Cannabis sativa
attttgagattgacatccaataaccgatccaatccaattggaatccaacttttagcatccaatccaattcaattgtaattgcatattcaactttttgtaattggactggattggatcggttcggttcaattagattggattggatgatgtctacccctaattcctagcatcatataattcctttccccacaatatattcttccaaacaaaggagccacttttagaagacttgattgacttaaagggtctatttctattatacaaccctttcaaaattgggctgccagtgaagaggggtcctgataaagccacaaagcttatttagccaataagactttgctgactagttttaaatcctagaaccccattccaccctcttccttatgccaacataatttctcctatttttaccaatgcatttttatcttcacatcatcacccctaccaaaatcttgcacacatgtgatgaatattttttacgaaacttttggggagcttgaaaagggacatagtatgagccgagattgattgaatgactactttaataagaatttctctaccagccatagtgaaagatttagccttccaaccattaagcgttttccaaatagggtccctaatggaattaaacatggccgattgatagtcccaacaaaacaaggaaggaatcatagcacacatggcaagaagtgtcagtagctacccaccacccttcagatccaccaatgaagttgatctctaaaatcatagctatataaatggcagctcttttatcaaattagcttgtggagcaaaactaggcatgttcttacactttcgtgccatatgacatggcttgttacagttgtaacacatgaaaaaaccagaattatttctattagggggtacttcctacctattattttggttctttgatggttccaactctaattgttattattagtctgaggttgactgttgcggttcagattcactttgcgattcagattcttaaaatttttcctattgggtttcagaatagtagtgaatcttttattagtgatgttgttgtttccaactacaagcatctctttcttctggtcttgctttcgagctttctcttcaatgtgaaggcaagtgatcaaactttccaatgaaaattcttttattttatgcttgagagtgtttttaaaatcttttcacaaagagggtaatttatgaataataacagcaacttaaaattgttcatcagtagtcatacctttagagaatttcgtgagctattttttgaagctcgtgagactaggcttcaacagatttatcatcaatcatttaaaacttcaggtagcagctcgcgacatatttttttgtttttgcctcctcggtatcatattttttttttgtaactcttcccatatttccttggcatatttttcaaaattatagtaatcgtacaaatcatcagacaaactattcaaaataaaattcttacacaaaaaatcgttctctacctaggagttccttcattaacct

SEQ ID NO: 29180 - DNA, 1790 bp, Cannabis sativa
aaaaatgtcatcaaatctttggtgaactctcacggaattacagtcacttctaaggcagatacgacagatgcgactgtagctattatgtaagcttatttgcctctgatggtgttgaccctcacgctttgcaagatatcctctctgctgttccaacaactattacacaagatatgaaccagtctttaacaaccccttttacaagcaatgatgtgtatgatgcacttaaatctatgagccccgataagagtcccgattgtgatggaatgtctgcaatgttctacaaacactattggaatattgtagttccatctgttactaaccttgttcttggtgtccttaatgatggccatgacttgacagagctcaacaagtcaatcatcacattgatccccaaagtgtccaacccagcttcaatgagtgaatatcatcccataagtttgtgtaatgtcatttacaaacttatctccaagacaattgtcatcagattcaagaaagtacttccttttgtcatatctgaaatacaatcagcatttctctcaaatagactaatcacagataacatcttaattgcatttgagctcattcatcatctaaggcacagattgcaaggtagaattgggtatccggctctaaagttggacatgagtaaagcatttgacagggtcgaatggcagtatctagaggcaaacatgattaagatggggtttgattgttcttggacatcactgattatgaggtgtatatccacaagctctttcttgttctcacttaatggtgaggttgttggtcatgtcaaaccttactgaggcttgagtcaaggcgaccctctatctccgtacttgtttcttatatattctgaggttctttctagacttttgcaagcggaagaacaagctggaatgttgaaaggacttagattgactagtaactcgccctcggtgtctcacatgctctttgtggatgatagtttattgttttgtcaaactaatgaacaatctgcaatatcgatcaaaaggtctcttgatacatatcataaagcttcaaggcaagtactaaacaatgacaagtctgtcatgtctttctcaccaaacacttcttaagcagcccagagcttttttgctcaaacactccacatgccaataactgagtgccatgaacgatatctgggattaccctcttactctagacgggacaaacaggagctttttagcaacatcaaagaaaaattttggaaacttctacatgcctggaatgagaaaatattttctgttgggggaaaggaggtgctattgaaagctgtggtacaatccattccaacttatgcaatgagttgcttcaaacttacaaagaaattttgtgatcaattagagagtatgatggccaatttttggtggggtagcaatcaaaatggcacaaaaattcattggaagagatggaaatctctatgcaaatcaaagcatgaaggtggtatgggatttcgatcttttgttcactttaatcaagcacttttgacaaaacaagcatggaggatctttgatatgctcgataccttgctaagtcgactgctcaagcataggtacttttcaaattgttcttttcttgatgcaaacataggtcactcgccatctttgacttggcaaagcatttgttggggtaagtaattactacttaaaggacttaggtataaaattggaaatggttttcttgttggtagtggaaaggaccctggataccaagtcacaatgacttcagatatactaataaaacccatttcaatataatcatattta

SEQ ID NO: 29181 - DNA, 2429 bp, Cannabis sativa
atgttatttttttattactttcatttgaattttctattatttttttatattttttataaaataccgtaaaaatataaaaataaatttacacataaaaatataaattttttataaaaattaatatttcatgtaattattcaatatttatcccacttattacttttattatatatttttatttttatccatttgatgataaataaagaagttagtggtactggtatggtttcattcattcatatatttttttttgtttaaatctgtttttaatttcatttaattcttctttttcccattttggggaaatgaaaaagcttcttttttttttctttctcacaaaactatttatagaaaaggaattaaagctctctacacttagcttcatatctacgaaaaagaacacataattaaaatcaagaagaaaaagactatgctattattattagtattatgtacaatcatttcatcaagttatgttccaatgtacaaaatataaaataactaaaaaatatattaattattattaattgccatttaatattttattaaaaatatataaaattattttttattctttttattgttaaataatagtaatatagtaaataaaatatgtaaggttttttaaaagtcaaaaaatcataataattaatagtatgataataaataaataaaatattatttattgtaggctaaatttaatacaattttttaacatattgtaaatttgacacattttttagaatactattagaattatattattttaaatatactaaaatataataatacactatatttttagtgttacattagaaatgctctaataataaaaatgtgatgccaggagaagtaggagtaccatttgatgctttaggtgatggtaataatgatatgtgcatatagtgttgtatatataggttaggctttttgacacgacacaaaattggcatgaacccgagagacaagagtacaactagacacgaaaaaatatgaatttgagcacaagacaagacttgcatgaacccgagaggtatgagtacaaccagacacggaaaaatataaacttggacacaacacgacacaacaagcccaaaaaacacaacatgtaagtacaaatagaatagtcaagaagatacaacataacaagaacaaaaaggcattttaggatgcattaaaaaactttgtaatttaaaaataataataataacatatttatcaattataaataagttaaagtaataataaacttaaacataatattgaatattgtaattctataattacaattattaaaacaaatataaaactaaaactaaaactataactatattaatttatttgtaaaatgcaatttaaaaatttaagtatctagaagtaaatattcaatttctattaactttaataattttttgtaaaatattattaaaatttataaaaataattgaagttataaaaaacaaatataatttagtaattagcttattaattataaaaaaaaagtgaaaaactttagcacaaatttgagtccggatataaaaacagactaacatgtttaagaaaaacgagtcaatccaaataaaacactacaatagaaatatcaagtctatcctttaaaaatgttaacacgcacgatacgatccatattttaaaaaacacacacgaaaatatataagtcaaaccaacacgacacatacatgaatttacaacactatatgctcataatataaaatcacacacaataaacacacatctacatgataagtcagtctaaataaataaatccatattaaataaaaataattaattaaaattactaaaatgattgaaattactttatatttataaataaaactaattagaatttttacccatgaactatgacatgtacgaaattatacttttgaactttttttttaagtcgttcgttaaaaattctcttaatttgaactattgagattgttggatttaagaatttttatctaatttcatttaattttgctaatgtggcgattgtccatatactaagttgtgtctccaaattttaatattcacaaaattatgtccaattaacttaacatatatcaaattatacccccagttgaacccagctttcatctttaccgtttgtcttaatcttgtcactaaagtgaatggaacttggcatgatcactcgaccttatccagtataattgcgaagatcaggctctccctctccaattttcctgaggcttctttgctgcacttaccacgtcaatttaataaaaatgctcattcacttgctaaggcagcccttaggttgcgagatgaagacttggaggaatcgttttagtttcctcctttggctgctgttgttctcttgtcttgtttctttgttgcagcctcttgttccttaaaaaaaaaatatatcaaattataccccctgttag

SEQ ID NO: 29182 - DNA, 1854 bp, Cannabis sativa
  modified_base (1684)..(1687): a, c, t, g, unknown or other
gcacttagtgcggattggatgttgtttgaccaaaaaagtgcagattggatcggataaacatccctatttataagtaattaaataattaaaatatttgattctttgcaaaaataaaataataattacatttgaatttaaaatttatatatctaaagaaattttaattatattgatcaaatctaaatttaatatattataaagcattattagaaatacaatatgtatattaaattagtatacaatcataaagtacggttagaaatttgatttaatctaacatttttctcttaattcgatacaatctaattagtaattaaatttaaaaaattatcatacgatctaatttaaaaagagctcaaaatctaattcaatttaaaaactagttagattaaatcagttttttaattaaaaatatgactacgtaccttatttttaatataataactcaaaaatatgaataaaaatattaaaaaaattaaatattacaatttatttaaatttaagacttcataaagatatcattcttacaagtttagagatgtaacaattaatcgttctgaggcgatgtgtggtcttagcatgagagattcagacggtaaagatcatgcttttgctgttggaaatggaaagtgcatgggcagctccctcctgaatgggctgaggctcttgcacttcatcatgcctgtccttaatttggcatccacaacattcagttcaagtcaaattgtcaaggattgatccacaaactcaatttgtccataattttagatactattttcggattaattcttattagtgctttatgtgataagtttaatattgtgagttttattttttgctcaagatctgttaattaatctagtagttgattctcttgctaaatttatttttcaagttactttttgtacaatctagtagcttgagtatttttcttgtatttaattaggacattattttggcagcctttctttaatgaagttccttcctcatcctttctgagcgtcttcctgcttggtggtgtttttggggcaacttttttataaaaatattatttttacaagtttaatataattaaaaatttaaaataattaaaataataatactattaaataataaaatgaaacaaaacatgataataaaaataaatatagaaaagtgtaaagaaagtgagaatggtgattttataaataaagggtagtaataagaggcaactaaattaacagaacacggacactacttttgaaatccaaacttaaaaaaatcccacttaatcaaatgatgaaatctaagtctaatatcctataatcacgttgatcatgacgatgatgatgacattgttctttttactaggtaggggaaaggaacagtgttaaccaccaatagaattatgatacaacataaagtattaacattgatatatttgactaccaaataatgacaattcaaaatgaaaaattgttaaaaagtagtattagtgtgtagtattattctttattagtgtaattaagtattaaatttaatataatttttagaaaataccgttactattaataaagatattatggtatctaataacaatacatttaaacaaagagaaatgttaaagggcaacagtagtacttagcatctttctatatattaatatagttattggtctaataaatctcatataatttaatataannnnttttaaggggtatcgctagccaatcgcagtgtgacatatagagaaagtgttaaatactactggtgcctaaataacaatgctcttaaacaaattataaaaagggtttttaattaattatcctaggtggaatggcagccaatggagggagagagaggtgagtgggggta

SEQ ID NO: 29183 - DNA, 1626 bp, Cannabis sativa
gaatttaaagcgaatcagatactcctaaatctacaagtacaagtacaacaatgaatattaattaaaaatatatcataatttataactagttcttatttgtatttttccctttttatttgtttgagacttagagaattgtattttgttttgcttgttgaagtactaagattctatttagattttgttatgtggaaagttactctttttctaatatattagttaattttctatcatggttaaccacatcattttgcaccacacctatgcgtggtgtagttttcggtttatgcaaaacaaattgaccatgtagttaagattttcatttaatcactctttttgggttggttaaagaatttatattttctctagtcgtttataccactagaaatagaaatttgacccgcaatgatgaatacctgtgagtacccacctcgaatggggcggaaaatacctgttttggtgcgttatgagggacaattttatttacccgaagcgggttcagaatggtattaggggtaatattacccgttccatatccgaccccaataactagtttctatattattttttaatatttatttgtataattgaatttaaactattggctacaaaggtgatcattgattttattattactgtcatgataaatgttttttaatatagtgttctacacattaatttctattttcaatatcttgtttatttagcatcaatatatgtagttgattatgtttttagcttatttttcttttacaatttattgaatatgaagtataaatcagatctagtgttcaaaactttgttggttttattttttcatagcattactatatttagttccctaattttcagtttcttttcaatcctttatagataaaagcgaataaacactcaaaaagcgtcatcaaagaatgtaaagtcagttgaaaatatttcaaattggtaaaggaaacatccataaacagttgtcatagtacatcaatctttcaagttcaactctcaaaagggctctcgccaaaccatgattaacgacctctctcttgttttctcttcgtttacatttactttgctaagctctacaaactctactttacctgcctttaagctattagcagccttgttgattctgaacatcaggaggcactcttgagaaagctcttaagccataatttctttcatttcatgaaactagggctttacatgctccctaatgaactgctctacttgagatatttcaccctttaatccggatgcctcagcaactgtaactttgttatggcactgagagaacgaaaacacttctcctggtacgccaagagtgaactcatttgcaatatcagcttctgatactgcacttcttgatgctcgcaatttgtcactgatcaaaaacaaatataagaaagcaatatatgacatgttagaaagtacaataatacgaatagtatctttaacctagcgtgaaaatcactgctaaacacagtaagctaatgatttttgtctaaaagaacaattgtactcttctgtaattgcaatggacaatatagaagtagagatcaagtgggcataaccagaaatataaacctctcaataagttgcacaaaacacatgacaaatgttatgttattg

SEQ ID NO: 29184 - DNA, 2879 bp, Cannabis sativa
gccaccactagtggctggtcacctaggggtcataattggtggaccacatatggcaggtgaaataagcaaagccatggagcactatgctcggaccctccgtcatgagttaaaaagatacattctagttgtggaagaaaatgactccaagcagcttaagcttggagaacctgccatatcctttgccggaggagatgcttcccaggttaggttccctcatattgaccccctggtcataacttcacaaatagggaacatgacggttgctatgtgcatgattgctaatggggcctcttccaacattttttttcaaatcaacttatgaaaagatggggctccaattgacagatctagcatcttgtacacaactaatgtacgacttctttggccaaggccttgcaccattgggatacatctgactgcctctgacagttggagaaagtcccactacaagaacattgatggctcagtttgtagtaatcaatgtgccattagccttcaatgcaacgataggctagctagccctacatgacctgaaggcagtaacgtcaatttaccacctatgcctaaagttcctggcaagacatggggttggatgcctaaagggagatcaataatctgcccgacactgctacaacttagctttgtctaaagccaagaaagaaaagatgcttgccaagagctctaaccaagagtctggcaaaggataataaagttcaacccaaagtggggaggcagatttagatcctcactttggagatcctgcagaaagctttggaccggtagaggagttagaagaagtggagattgaccccactcttttgactagaaaattgaagattgaaaagggtttagcgccaaaaataaaattagctttgataaaatttctaagggcgaaccttgacgtcttcgcttggtcacatgaagacatgatgagaatagacccatctgtaatgactcatgccctgaacatagatccaaacttccgacctgtacaacaaaaaaggatattattgcataaggagcacgcacaagctctagaagacgaagttgataggctgagtgccaatcacttcatcatgaagatttctacccgctctgggtatccaatcctgtcttggtgcccaaaccaaacaaaaagtggagaatatgtatagattttactgacttgaataaggtgtgtcctagagattgtgtctcgctttcagtgatcgacaagctagtagatgctacaaatagtcatgagatcctaagcttcatggatacctattcagattacaattaaatcaaaatgcatccaccagaccaataacatacaagtttcatgacagactttggcctgtgctgctataaagtcatgccttttggactgaaaaatgcaggggccacttattagagacttgaaaacaagatgttcaaagatcttattagccgaaacatggaagtatatgtggatgacatgctggtcaagtcataaaaggttgggtggaagatctcaatgaatgcttcgtgatccttcgagactacaacatgaagcttaatccccttaagtgttcattctgagtaggctcagacaagttccttggctttatagtcaatgctgccatgggaattgaaacaaacacgaacaagatccaagcccttttggacatgaagtcacccacaaaaataaaagaagtacgaaacctgactggatgcattatagcactgagcagatttgtgtcaaaatccacgaacaagtgtgtccttttcttcaacatacttagaggaaacaagaaatttgaatggacaaatgagtgtgagacagtattccaatagctaaagaagcaactagttcaacctcttatcctatcaaaacctctagacaataaggaatcgggcatatacttggttgttaattgttataaaatatgttgtaagtgcagtccgaattagagaagaagatggtgttcaacagccagtgtattacgtcagcagaaggcttattgacattgtaattggatacccattcatggagaagctgacatattgcctgatcttagcttcaagaaagctaagaccattgttctaagctcaaccaataagggtatacactgaccagtcgttacgataggtgttgtaaaaacctgaagcataggatcgaatacttaagtgggccattgaacttagctaatatgagatcacttaccaaccaagagtggccataaaaggccaagctctcactaactttgtggctgaatgtacaggcatatctcctaaagtctctcaagattcatgagaaaatcaagagccagagaagaagcaagaacaagagaagaagcaagagaaagaaaattcaacctaaaagttgcatttgatggaagctgtactgaccacctgtctggtgtaggctttgccctcatcacacctagggaggcaacagcttcacgggacaataaagttcgggtttcaaagcctccaacaatgatggttgaatatgaagctctaattgttgacctcaagctagcacacaaagtgtgagcagattacctggacataaacaacgattcttttttggtcgttaatcaagcccaaggtgaatatacagcccgaggcgaaaggatgatagcctatttgagtaagattcatgacttattaagtcggcttaaaggctatactataaagcaagttcccaaagaagagaatacaatgaccaatgctgtaacaccttgacccatagggacgccacgtgtgtgcttttataaacttatttctaactaatctattagtttaagaaatgtgtggtttaattaaaaattccttaattgaatttaaaagaaaattttcatacaaaatactagggggtgggcatccgatccaatccaatatttttttcctcatcc

SEQ ID NO: 29185 - DNA, 2084 bp, Cannabis sativa
agagatcctgcaatacagttaatgtattacttaggtgaataccaaacaagtctatataagttattcaagagattaaaaattaacctgaattgaaggcatatattgcacaatctccatcccagctttcaccagcaatatcttcaagaaactcgacatcagcaggtttcacatgcccagaaatggatgtttttgtagaggttgagatgtgaatatcttctgccttttgtttcagtggccaactaccagctccttggcagttaaacactcccacaaccccagatagcttattcaagttccatattttcatcaggctgcagagaattgaagaagtatacgaaatgaaaaagagagaacattaacactagcactgaacaagaactaatgaaattaaagagtgtaattttattatcttaatacctttttccatccatcactggatcttcaaataaacagtcacgagtaggtcggcctgcatatctagctcttagcaccgatccatcgggtaacaccagctttttaaggatttcgaaatcttggtcacccggtttatcactgtgtttacatgaaaaatcagtaagataagtaattttctcattcaaagtctgaaatgactcattagcttcggtatctcaccttacatatactgcacatccacccaatgctcttgctgcaccatggaattcagcactttcatgtttactctggaaagattaaatgaaaatactcagattagagagactcatattgaagtgtctacaagttattaaatcaaatttaagtctaaaatactgaaaattacaatgatttgaggcatcttacatggaacatatcccaatcaggtaccacaatctctcctaacagaaggctattaaaagcaacagaggcaatgtgcagagtctgcaatgtaggctctcttggcatgaaatcctctgatgctcgagcaacggcactcttcttagaactaacataaaaacaaatcaagcaaacttagattccgacattcaatcaaactaaaacgaatgtccaggattgaggtttttcaaacctgaatatagaatctgagttgtgactcatgcagcaaatcaggttgttgtccccaaaatttcttgcaacagattcctccagagcttcttggtactgtctagtaattttgacccgaccgccattaccagaacctaaggtttctaacagattctgaacatcaactttaactccatccgcaccgcagcttgcaagatagctgtgtagatcattatagaagctgagaatcttttcagggtctactagtcctactccatatttctccaagctgtccatggcaatatctgtaagatttcctgtgttaccaggtgactgaattgggtaagcaatctttggattgtatttttccattgatttcgatgaagggagaactcctccccaataaccagctaaggcatgccacatgtaaacaaacctgtttagaacaaaaatcaaacttcatatggttagacattacaattacaaaagcttatactacagagaacaatgaaatctcatattggaagccttactttagtccatatttctctttgatgagattgatgaactcatgaagatcagtggaagtttcttttgatgatgaacttctgaacttactattttctttgatgtttaccaatctggttgcaaacctatatgtcaacaacaaaagaggattaatcttattgaactgaaaaaagatggaactatgaacattataatgtatcctactaatctatggacttactgtgtcccttcaacaaatggctcgccttctttatggaattcgtttacagtttcttgccatccatcgtcgatgattagaaatttcggtaaacaccctccttccttaaagctgcaaagattagaagattagagcttgaagacatgttaagagtttcctaattttcctaaagaaaataaaaatgtcaaatgtatttttcatagattcacatatattgtaccttttaagtccctcttcaattccttgtggatcgactttagtgtaaaaggcatcccaagtgcaccatccaaaccaatctaaatgtgaaggaacctacatg

SEQ ID NO: 29186 - DNA, 976 bp, Cannabis sativa
attctctatgcaatatatcattatcgaacatttgatcgagtcaatttttgaatagaaaaatataaattaataaaataaaaagttatggttctgatagaaccctaacatgtatttcgagttatgtgattgcacgaaattatgttggaggcttataacaaagacagtcttaaccaacctcgtccgatcacaaaactcgaaatgttgaattcaataaggtcatactcaaatgaaagatacatacataaatacataaatgcattgttttgaatcttaatttgatgaagagaaaaaaagggagacattgacatgcattaaggccaaataaataattaaggacacatacattgaaacattgcatttatatatatatatatatatatttatataaataacattgtgtatggaaatcggtggtcatttttggtccacattggaacaatttattaattagtcagaaaagttgacagccacaacacacattcttgccctatctttatgtcttgtgactattttttctgttaatttctcactttcttcctcactagtcttctttatcaaaatgtacatattttcaatatattatattgtgacaaatattgttagaatttatatattaagataagattcaatctcaaaataatatatactttattattttttcattatacattagtaatatgtgactttctaatatcgtcaagatggtacgtagttatttttttgttcactattttagacaactcgatcacaaacaactcttttttggttcattatctttgtatcacaagtgatttttttggctctgttttaattttggaacgatttttaaatttttagtggctctttttgatatagctcttttgacttttgagttttgatactaatttttagatttagtggtgtttttttttttcttttttgctttacttggatagacttatttatttatttagattagatagttgttagaagtttt

SEQ ID NO: 29187 - DNA, 1264 bp, Cannabis sativa
tttttaactcatctttccaatggttttcaggcagacatactggcgaagtacaagccaacagttaatgcaacattgctgatacccaacctgaaacaagtagaagagacaacaaccaaagctttggagtacttcaagagtaccaggcatatggttgtttactacgaggatgtagtcaaaaaccgcactgtaagcaatctttactcaatatacatgactgagcttgatctgttatgtcagaatactgagtatcactatagtttgatcatgatttttgttgttctttcttatattatttttgcatgtgtgcagaaacttacagatgttcaagattttttaaaggttccgcgaatggaactaaagagccgccaagtgaagattcacaaaggttctttgtctaatctggttgaaaattgggatgacatccaaaaggctctcacaggaacaccatttgagagcttccttcatgcagattatcgaagaagataaaatcaagcactggtcgtgattgtacagtacatacgaggttctcttcttttaacattgcttttcacaggctggagaacctaacagaattttttcctgttgaaattttggctgcagcattgaaagaaaagaggaaatacttaatttctttactgctatagtttagagtgctattttttttttcctttcaattttcacattgacatttaatattcaattaattctttctatttcattttagtctttgcatatcgtcacaacttatttgttaaacatcataaaattttgtgtaatgattttcttatttgtccttttgccctcctataagcacaatcgctatggagacaaattaaagaggcaaatatttcacgctaattaatttaagttaaagtccaaatgacaaagcgttgcttcataagtttcttgtagtgagcatgaaatggtagttattagatccaatttctgaaccttatgtctcaagttgacagaaatgatccatgagaaagtaaaactgccttttaagttgcttaagtgtagaatggtctcatcttttgattatcctccctcacagtgagcgaaaaatggcacagaagaaataaacgtgctaaagggttcagtaggggtgttcaataaggatccaatccgcacgatctaatctaattcaatccgcaaaatgaggatatccgaacttgcgctgattggattggattgaaaaatctaaaatctgcacttgtgcggattggatattgtttgacaacaaaaagtaaccgatccaattcaa

SEQ ID NO: 29188 - DNA, 2481 bp, Cannabis sativa
caggttgcagagctggtccggtcagcatgatcaatctccaacaatatatctcacacactatctgatcatcatctcttggattcttatttctctattcatcctcttcctcctcctccaatcatcttcatatcaccatatatattctttctcaatattcttatatatatatatgatatatatatatacaccaccaccatatccacatgcccattaataataaggaggaattacccctgtgtcgtacgtaaacccatttccagtaagtataattatataaatatatatttacatgtgtataaacatatatgattattattttcatgttattaatattgtacatataatatatattttatataaggtgaattattatgtggcctcggttagtagctaacaaagtcctgaagaagagactaggaagcaacaattttgtggctgattttcctatcaataataataataataatgagtcaacgacgtcgtatttgcctgaagaaaataacaacagaacaacaccttgtcctactttttatgatcatgatgatcatgatcatcatcaccacacatccttaactcttaacactacaatcttcaaccagcacaaactcaacgtccataaatacaagtacgtatacatatagatatacattataatatttattatgtacatgtgtatacatatataattttttttttttttttggttatattaaggttttttactagtacatggaacgtgggtggagtggaaccacatgaagatttgaatttggatgattggattgacccttcttgtgacatctatgttttcgggtatatataaattaattattactataaaaaattaatttacttataatttatagtaattaattattaattattaattaataatttatgattatatatataggtttcaagaaattgtgcctctaaaagcatcaaacgtgcttggatattcagagagtagtagaatagcaaggaaatggaacaatttgattagacaagctttgaacaagaaaatcaataataaatatcattacaataataataatccaatgagtagagagagtagttttgaggaaataaaaagtttccaatgtatcataagtaaagaaatggttgggattttggtatctgtttgggtacgaaccactcttcgtccctttattaaacaccaaagtgtctcctgcgttggctgtggcatcatgggctgcctaggcaataaggtacgtaattatatatatattaattaattaatttcataattataattaatttatattaattaattatactcatgatttatatgtgtagggagcagtgtcagtgagatttcagatacatgaaacaagtttatgcattgtgtgtagtcatttggcttctgggggtagacaaggagatgaaaaatatagaaattcaaatgtttcagaagttttatcaagaacaacttttcctagaggccctttacttgatttgccacagaagattctcgaccatgagtatgttattaattattattattattttgtcaattaatatttaatattccctcttgtttttcatcactatagatcaagaaaataacgacagcaccaaaaaaaaattaatagatatattattattggttaatttaaagataggtgtaattaaagtaatattattggctgtttaattccatatatatttgaatttgtcgtgagaagggccgccataaatataaaattattatttttagtgtatttttattcaattggacggtttaaaattttaaacagccaataaaaacaatggattgttgattaaaaccctgaaaagactcactactttactggtatttttatatgttgttttaaaattattaaagtgatttttttcaaatataaaaattaaaataattgccctttccaaaaaaaaagaaatggagaatatttgccaagttgatttcataaattataataaatatcgtaaacatgaagcctgcagataagttaattaattaaataaagataaatttatttatttatatatcttatattttacataataataatattaataatttgatgcgttgtttgaatatgcagtcgagtaatatggcttggagatttgaattacagaatttctttgccagaagcaaagacccgtttattagtggataaagggaattggtcggccttactagaaaatgatcaggtatatatattatattatatattaataaattaattaattaatgagacaaattaagaaaaattagaatatatataattatatattaacatttaataattatataaaattgaagctgagaagagaattgatggatgggcaagtatttgaagggtggcaagaaggagctataagatttgctcccacttacaaatattgtctcaattctgatctttactttggagttgttaatggcactaaaggtgaaaagaagagagccccagcatggtaattaactacctatatata

SEQ ID NO: 29189 - DNA, 1669 bp, Cannabis sativa
agaaacgacaaagcatgatcacatcgttatgggaaatccttttttctctgttgttttgtttggtgaatttggttagttcaaattctttgcaagttcatttgatgccgcacttggaaaggttgtcgttttatggtttttgtaatgtttggaaaataattgacaaatgctgaaagaagtggttatactacaatattcttcaaaatgtcattttcggagtgagttattgaacatttggaatggttttaaaagcattgtggtatagtttctccaaatgaaaaaatcttcaaaaggtgtcttgtagaaagttagatgtcgttcggaaaggagtttcgaaagttagatgccagaaacccaaatcatgatcaccaacccaaaccaccttctcgcaatcctcctcgacctcaaaacaataatcgtcccttgtgtcaagtctgcttaaaatttggccatactgctctcgtttgtcactatcgttttgatagaaattgggtgactccaaaaccaaattcctctcagtctcaagcccaccttactgaattacaattcgattatgaccccaggttcatgtcacttaatctatccctgattttggagatgatgcaggttggttcgtggacacaggtgctactaatcatatcacctgcaacatggacaatcttgattcagcaaccacctactctggccaagaacttgtggttgttggagatggtaagagacttgtcatatcccatgttggtaaagcaactctttctccaaattcctcttctcccttgcatttaaattctgtattacaagtccctgacataacaaaaaacttagtgtctctaagttaactcatgataattatatttttcttgaatttcacaagtcttgttgttttgttaaggacaaacaaacggggactgttctgctcaaagggaagcttaaagatggctaggagatgatgaatcaaacctgtcccaccatagtctggaatgtaatcttgttacttctacattttccaaatgtactgattttaataaaagtcaaaattgtaatgttgcttatgcaactcactcatgtaatcaattttctatgaaaaaagcactaattccaattatatagactctttctctccatctgtctattctactacattacaatctaagattaacacttggcattccaagctaggacaccctgcaccagccactttaaaaactatcctaactcaggctaacattccacattcacttaaaaatcttaagttttgtactgcttgccagttaggaaagagtcataggcttcccttcactttgttaaaaagtagagtctctcaacctctagaactcatccatactgatatttagggcacatctcttgctgtgtctatagagaatttcagatactatattatattcattgatgactacagtaagttctcttagatatttcctatgacactaagatctcaagcctttgaaatcttcattcagttcaagagtcttgttgaaaaacagttcaacttgcctattaaaaaggttcaagttgatggaggggtgaatacatgtcatttgaaagatttctaacagaccaaggaatcaaatttcaattaccatgtcctcatacacatgcgcaaaatggaagggttaagaggaagcacaggcatgttataaaaattgagttgaca

SEQ ID NO: 29190 - DNA, 1866 bp, Cannabis sativa
aaccccgccgccgccaaccctctctttttcgtgacctctactagaaataccaaacagagcccaacgattaaggcattatttttttggaaaatctaaagtttgtgtttgattgtggtgttttgatgcttgttcttaatatttttctcataattttgtagatttatttgctgtattattatttaatctgatttgttgtattttttttataatatataatttattaattggattttgaaatgtatattgttatttgtaaatttgataatgtaaattgtattgtttggatctcagatttagttttgagtaattcatggccagatctgaaagttttttttttttgtggtgtcagttctaaattgagacatatagtgcaaaaataatttgcacatccgtaagtgtcaatgtaaaactgacaccaatgcctaaatgtcttagttcaaaaattgagaccaaagaatatatttttttgttactgtagaataggtgtttgttctataatctgacattataggcataagtgttagttcagataccaaaagtgcattttgtagtaatgccccttcaaatctttctaagaaatttcttttatgattttaaaatttgacaaagaccaaatgatcatacattttaaatttcaatttttaccaaatacaaaattattttcctttaattattaatacttttttagcaaattattaatattattaatttcattatcattagttgttacaagttaaaaaagtttaaattattttgatttcattataaactttaatatttgcaactaccaaattttaacagtataatagaattttggtaattagataaatattatatatgatgtgatttaatctaaaaaaaattataattaagctttcatatttatttttgcatttttatattttgtactgatttattaaataattttaaattactaaatacaaattaatatttacaaaaatagcatgataaaaatatatattaaaaataaactcttttacaatcaatttaaaattagacattatatatgttattttttgtattatacatatagttatatatataaaagtatacaatgcttgttatatgagtgcacactatagacacctcaaaaatatagtgaaaatttgtgattcatctcttcttttaagttaactcgatttttttttcttcacaggtgaacacaacacaattaaacattgtgtcataaaaagtaaactaatacgatatggtcatgttaatcttacatgatacaattaacatgatatttaaacatattatactcacgtcatgttaatcttacataatataattaacacaatatatatttaaatatgttatatttaaatcatgttaattttacataactcatttatatttttgatgaacttataatctatttgaccacataaattaataaataaaaaataggttcaaattagttattttgaaacctatcataaatttgatgatagattaattaatacattgactaattgcatgctaacatattattgatttgtttattacatcacatattaaaattttccatttgttttaatgtgggacgaatttttttttgaaaatattgtgtttttttttaaaaaaatattgtgtattttttatactgggtactattttaagtttcctccattgttccaatattgtttaattattttattttgtgtttcactattgttttataaaaaataatatatttgaaaaaatttctatgtgatataatttttgtaaaaattaattaaaattttaatatttttatataagtttccctaatatatagtagaaattacgtaaattatgaaatttttttagtgtttatttttttatgacataattaaataatgc

SEQ ID NO: 29191 - DNA, 1684 bp, Cannabis sativa
cgctcttccgatcaataataataataataggaaaattgtgtgtattatatgttggccatatactttaatgtatagttttatttttaagtaagacccattataaaaaaaaaagttaaaactacttttttaggattttttttttttattttacactttaaaatagttttttattttttacagaattctatataaaaatccctatgacaactaacggggcaacgtcttaaatcgcaaccacaatccatatagcaacacctacataaaaatctccaaaaaagctacaagagcaacccaaaccgtaatttttttaaaaaaaagttaagaaataatatatgaaataattttttttttatatatatcgaaacttatgagaataactggttagatttttccatatgtatggtttattggggatgataaattactacacactacaaaaaatttgatttttaatcacaatagaaattgtgattaaaattaaaatatattgtaactaaaaattttagtcacaaattttttacttgactctaggttgtaattaaaaaattcgtggctaaaagttttagtaacaataaaaataatattgtgactaaaaatcacttttagtcacaactaatcttcgtgaataataagtgtaaagatgtctctacaattagtcacaacttatttatctttagtgacaacaaaagttctcactaaaacgtttttagccacaatccacttactattaatcacaatttttattatcaaactaaaatttcttaagtcgcaacataaaattgtgactaatatttctttagtcacaacaaaaattgtgaccaatacttcttttgtgataacaaaatattgtgactaatacttcttttgtcacaacaaaatattgtcactaatatttctttagtcatagcaaaattaattgatcactaatacttgttgatcaacacttttttattgttactaatatccttttagtcacaactcattatcaatacaaaataaaatatttagatattcttagggtaaatattagataacaatgtcattagtcattttgtttattaaatgtacactatatcattttttttttcaaaattaagtcacataaaacaacaaacaaactcaattaaaatagttcagtcatcaatttgaccattttatgaactcttgaaattcatttaataattgtaatgtttttcaccaagcaccatcctaaagtattcatatcattttttaagaatctcctctgcacattctgtaccatcaccattgcttgtctcttcttcactgtccatctcaatataatatgacctaaatcccactaactttgcaggagcaaagaagaattttgaaccgctattaaccatgcactgaaaaattcaaaatttcaatcaacttaacaatataacttctgatagctttggtaataaaatgaactaaaatttaagtaaaagcaagtaaaataaatacaagtcatgtaattcaagatatataaaagactaattaagataatctttgttaagggaaataagacagactttaggaacaacgattgctgataaatgggagccctaagaaaggaccctgtggttaaccataagttaatctttgtaaaggaaacataaggaaaattttgaaccataaggataagtaacaagaacctcatgcaaagaaacaatacaacaag

SEQ ID NO: 29192 - DNA, 2495 bp, Cannabis sativa
tatttatttatatattcgaaacaaatacaaaaaatcaaaactactttttgtaaggaaatggaatatatcgacatatccttggacgcctactatattacgcatgtaccaacgtaattattctaattaaatatttataattaatttaatgttgtatataattaattacattaatatatagtttaatcataagtacgtgcaccatgcttttactttaattattgattcttaattaattcttaattattaatatattatagcatattgaaaccgttttatttcctttactttttgacgaccaaattaattattaatgtcatttttacctcttaatttttcgttttttcaatataatataaaatattaatttacacgataatattttaactaatgaatgatatttttatacctctaaataaatgattgtgttttgcattcttatatatggggtgacaaaaaaaaagttgaatttttattaaattctagatatataaagttggatacattatttgaatatttattttaacaatacattaattttgtatttgaatatctccatttaataaataatgatatatatcaataaatgttatttattaatttagttatcataccaccacaaaaaaaaaatgtatatcatataattcaatataagattttacaatatttattaattcaataccttataacaattattaattctaacatatatatatatcttttttacaacaaaataattaaaccatgcattaatttcgtacattttttggcttaaaaagtttggaatatatataacttctcttcacaattttttcttggcacaatttataattaaatatgaagtactgattaattattttgcaaaaagaacaataagacactttttacatgcaaattactttttttaataaaaaaaatatgactcaaaatgttctttcaatgttgtcttctctctgttttatttagtttttttttttttttttttttgaagaatagagagttttataagatgcatttattatgaaaccctgattttaaaatttttcatttttattttagcaatttataattaatgaagaaaattatatgcatataattaaagttatataaaaatattgagtatatatgtataactaaattactttacaataaattaattattaataagtttttttaaatatatataccatctaattacctcttaaattatgatataatttatgaatacatatttatttatctttattctagttttaatatatttcactttcgaaacaaaccaaaaaaaaaaaaagaaagaagaagaaattaaatgggttttgtataatcttactttacttatcatgcaagctattgaaaactagctatagcacaattcctttgacatttacttatctcatttaattaagataatatttaaatttcaatgaagtttaaggatcgtaaataaattgtacacaagcattttagaatcttgaaatttctcttagctttttttatatatatataccttattataattattaggagtattaattgtttttggtatgttaatttttttaaaattttatatcatatatcgtacacgattataatttaaattaaactaaaaaaaatttaaatatcgaaacaaataaataatgcatggatatactctgaatgaacagaattttccaaatatttattattataactataaaatatatcctcatataaataaattgagttatacttatattatttgaaagagaaagcaaaaaagatgaagacatttccaaaaatgttcaccacacaataattatttagatatataaatttaaattgtggatattaaaaagtagtatatatatatataccagctggaaattccaagtcaaacaaacaagccccagttggattcaatagtatatacaaaaataaaaataaaaataaaaataaaaacaaaagaacagtcttagtttattagtcttgaaaattaataagaaaaaaccaaccagacagcaagtaaacgagactgataataattaaggaacatcactgtcgtcttatgatatattaaattaatattccttaataatacaaaattaattaaacaaaataaaaatatagacttaattaattggcacgtttttgttttgacttacaaggatcaaccaatcagaaacttacacgtcatctgactaggaatgtgaaaaccggtttcgaggaaacaagagaaaagatacttatattatattcaatagcgtcaaccgttgaatattattattacttttttgtaactatatatatatatataaacttgaattgagatataaatcataattcattatattgaagaagaaaataagagagaaaagatgggaagagctccttgttgtgagaagatggggttgaagaaaggtccatggacaccagaagaagatcaaattcttatctcttatattcacaaatatggccatggaaattggagggcactccctaaactagctggtatgtat

SEQ ID NO: 29193 - DNA, 1472 bp, Cannabis sativa
accaaaattaaaaaaatatataaagtaattctccttaattatatgcatttttttctctctctcatcttatcttatggtgagattttgctgggaaaagaaaaaagtgaaaaaaagataatgaaaaaaatatatgaaaaagaaaaaaaaaaaaccttattttctaatgtttaataagaaaagaaaacttcatttccttttttctttttctttcttttgttgggtttgttgataattttatatgggaaaagaattgttgataaaataaaataatttatattatgtgaaaagtgctcctaatttttccccacaattttctaaacttcctaacacacacacaaaaaaagaagagaacaataaagagtgattgttgtcggtgggaggattacacagaagccgcaactctgatggtccgcactcgtctttgcacaattttctttttcttcttcctcttttgttttgtaagtattcagcgaaattcttgaatgtaagtgctgtaatattatatgattattatcacttaaaagaaatatataagtgttataaatgaatgggtaatgtaccttatataccaatacactttttatttgatttaggatctaaaacgaattttttttctctatttttctttttatacgtgtacgttatagttattttaatatatattacaaaattttgagaaatttaaaataatttacaatatgaaaattactgttcaaacagtttatttcacataatcatgtatgcaacacaatatttgaactatatttttagcgtgttaaaatttttcgaattttttaaaattttgcagaataactatcatgactatgagaaaaaaattaacgaaaaaattatatcaaataccaaaacaggtagagatgcatccgtgcatcccatcccttctaagggtgcattacattataaaattttcctaaatgatatactattgatgtaattaaatatcgagtctcgatcaattaaattaaaaattaaagtttttcgttcctaaatttatacttacaaaagattttcttttttctctggccaggcccgccgaccttccctaggcataggtgtggcttggtcaggattatgctttgctattgaaattcgatttttgttattgcgaatagtcttgtttctgttacatagttttgagtgttttagtcttgtctatgtgacataattttgttttgttttgttgtcgattcttctttgtacttcgatgacttgccatgaaatcgttgttagcggttgagaataataaattctctacaactgaaggggttattaattgtggagttatgtgtaccttgcacaatagttgagtgctcaatctacaaggttgaatgaatctaatataatagtttctactgctgtatcttccgagtggtagatgaaattgaatataggggttcttaaggttaattgggatgctgcaacttttttcacctgttttttttttttttttgtca

SEQ ID NO: 29194 - DNA, 1400 bp, Cannabis sativa
actaactattttgttggttttcttgatgtagatgtggattgcaaaggcagaatatgatgaatctggaccgtcaattgttcacaggaaatgcttctaatcacaaagattaaaaggtggacaaaaaactagcactacacatattttgtattacagaaataaaggcttctaattaagtggctacaaaatcttcttgtctatttatttttatttttttattcttggtttctacttttgctatgaaaatctttcattgatcatatttatttctctgtcgtcatcttttactatattggaaaattaagcacggcgtttgtaaatttttactaagatttatctttttttttacatagataaagttgtatattgtacagtactcatctgcttagcaaattttttttatcacatacttgtttgagttctagtattttattgcatgttgaaaatttaagcatcatttttactcatttggtttaagttggataattttttttaccttattcactagagcattgtcataaggtactctataatacccaacgcgttagaagatatgccatatttattacgatttctacatattttatattaactcttaaaaggactatgatcaagtttccaagagttttagtcgatgtggaaaattgacaatcctccaaaattgatagcctatgtcaatgaacgaaaacagctagtggatcaatctgttaagtacgaatggttgccaacaaagtgtgcaacatgtgcctttttgggacatactgtagccaattgtaacaaatgcaaaccagtagcttggaaaaagaagcaataaagagaaaagaaagacgactcaatagacaacaaggagaacttgagttctggttctgagctacagcagcaagcagaatctgatggaaaaatccaacaataatacaaaagagaaaacgcagcaccactatactggtgcaagttctaaagtatcctcacaagaatgcaaggaaaaactagtagaagatgataacttatcacaaaaaaaactagtagaagatgataactctaaggttcgggtgctgaacaagagtaaagatacaagaaattagataacccctagaagaaaaggtccaaaaacagtcatgaaatcgagcactaatgctacaatcataaatggttatgaggttttggaaaaagatgatgaagaggcaatcgtttctggtcaaaaatctctttatgatggatagatccaatatcaaggggtggaaagttagagggctgaataaaaaagagaaccaactggatttgtttgatacgtgtaatgtgaataaagtcttttggtgctctttttgagaccaaaattcggacatgaaaaagctcagagtatgatgaataactaccctaattggaattggtactccagtcaggtt

SEQ ID NO: 29195 - DNA, 2127 bp, Cannabis sativa
  modified_base (2046)..(2053): a, c, t, g, unknown or other
tccttccgactcgcgctgagtgtctggacgtcgagccgcacctgagccagctcggcggccacgtcttcgaccttacgcgcctcagcctccatgctcaacgacctctcgtagacatctcgcacctgagcgtctttctcggccttggtgcttgctgcagccgccgataaaacccgaaggtcctgctgcgtggcggagagctcttgtttgagcgccacgtgggtagctgcgagccgttggttgtcgacaagtagggattggatctcgcggtgctggattgcaattcggtcttctagagcggccgatgatggttgagcgacacggtggaggaggcgtgcgtcggcaattgtaggttttgccctcgaatgagaggcttcccggagtgtaatggcgtcgggcgctgaaaggtattgtcgtccggccatgcctcctcccgatgcttcctacgtttttttctcccctttccttgcagactttatttattcgagggaattctttgcaggtttacaaactgaatttaaattttttattttattttttaattaaaaaagtaaaaaaaaaaatcaaaaaaaataaataaaataataataataataaattttcgtaaatttttgagtaatttgctgtcaaacttcctatatttttatgttcgttacagattaacctccttactcgaaaaattagggctatactccctgaactcaacaatcgttttggtgagcagtctttctattggtgtggctctgttacgtgccagatggctcctacacggtgtcatatcaactttgtcatattacatgaaattccccacgtaggtagatgattaacaaactaaaaacaattaatgaaaaccaattgatatgaaattcaaaaaataaatgaaaataaataaacaaaaaaacaaaaaaagaagagggtcaaagagaaagaaagaaaccaagcaccattgttgtgcaaagaagaagaacatggtgatggttcgaaggaggagttgcgattgcgaggagcctaaaatcctgaaaatttacacctcgtggacgagtttgaatccaggaagaagatttgcaaagtgcccttttggtcccatgaattctcttcttctttttaattgttttctttttttcttttctgggtttttcttcactgtactgtgggaatgtttgtggctggcagcgtcgtggtgggtgtgagttttgggaatggatcgatcctcgtatgtgtgatcgtgccactattgtgattcttggcctgtacaggaagaatcgtcaactggaataagaaatatcaataatttctaggttaagtgggtgaagtaaatgagcaacattaccttacgaacctgtacaaaagtgagagcttccatgatagcagtaccagtgttcgagttcctcattgttcgagctgccaagaaaatagtaaaagtgccctttgtagaaatattgtcattggtgttgttgttacttttgtattactttggttcaagatcctaatttaactttgttaattagtaggatcttgaacaagtattcctgttgagttttcatgtaatgcttgatgttttgaaatgaaaaaaaataaataaataaaataaaagatactttcacaaggctagatctttcatactgacataaaagttaaagcatttcaataagaaaaatacaataaactacttgatttaagacaccaatacatagaaaatgttaaagcatccatattccaacaaaatctgtcccataagttaaaaattcaattcactaattgttctaaaaggatctgttctaaaaaaaacttcacaaaagttaaagatccaatttcctagttgttccaaaaggatctattccaaaaggatatattccaaaaaaaacctatcataaaagttatttgttccaaaataaaagctaccccattaatggaggcaatagtagtaatgttataacatttaatacctaaaagttacataacatttaactatgacaaactaatgctacaatagttgatttcactgttgagtagagcgcgaagttgatcctgttggaattattttaccannnnnnnnatttactaacaagtatatttttaatatcctaaacatgaacttctaaaattacatgaaataaacacatataaagt

SEQ ID NO: 29196 - DNA, 1486 bp, Cannabis sativa
gttgcttaacttagctgaagaccttgcacggagattgttacctgcgttcgacactcctacaggtatgtgtaccagattttccttttactctatgtacataaatacacattttgttggctcacagtcaatctatcttatttatatgcaggcatcaagtaattttttttaacttctaattactttctgttgcagggattccgtttggatctgtcaatctcttgcatggagttgatgaacatgaaagcaaggcaatactcttttactacactttctcgctgtgtgcaaccttcattttcatgattacttattaacagacaagcattataacatgcattgattgttaaagtagtgtacatcaattaagtaaattttggctggttatcttccctaaaatgtcaattgtttcttagataacatcaacagctggtggtgggactttgacattggaatttggagtgcttagtcgtttgacaaatgatcccagtacgtgtcactatatttctgttgagattttagtatgtccaagctatttctaattctgttctgcaaggaaatgctttgttttagttttagttttatttttgtttcagtgagtaaattaaatgaaataatatcagatatcattcagctataatgaaatgcataattaagcatcttcaggggatgcaatctatttactatgttggagttgattgttctaataaatggctgatatgggtttttattgcattttgtccagtatcttcctttaactttttcatagtgtagaggagattgtgataacagggccatctatcattataaccgcagcagctcccctttctttactattttatttcattatttctctctttttgtgtgtatgtgtgcgtgctttttgcttcattctttccatttatttcgtttggaatggggaacattttgagtgtttgtttttgtcctttcttttaaaattacagtttttgagcaagctaccaggaatgcagtgcgtggactctgggctcgccgctcaaagcttaatttagtgggtgctcatattaatgtgtttacaggtgactggacgcagaaggtaaccattttgcgaagtgatccaatatgctatcactcttccctccctcttttgttttgtgtataaactgtggtaatttgctttgtttctttgcaggatgctggaattggaaccagtattgactctttctatgagtatcttctaaaggtttgtgatttgacttgcatgttaaaatcttctgattgttattttggtgaactcagcatgtatgaaatgtactttgttcttaagacaccaaaagagctatatattgtatgccactgattttttctttccttcctgctctgtcatccggaatcattgagataggctgataatttgagtagtaagaagtcttccaataaatgtcttttgtgttagattagtctatcaatttctgaattctctcacagtcctgaaacttaatcctgccttact

SEQ ID NO: 29197 - DNA, 3689 bp, Cannabis sativa
  modified_base (3635)..(3639): a, c, t, g, unknown or other
tcagaccatagacctttgatgctcgatacgacaggaggtgttaaatgtaagggtaggcaattcaagtatgagaacatgtgggaaagagacccccggtctttctgggtggtaaaggaagcttggaaggatagacgtcatgcaaattcgatgattaatttccataggaaagtgaagactacgggtcgaaagcttcggagttggaacaagactcaattcactcatctgactcgacaaatccagattgcgaagtccaacctgcagcataccgaacaacagaatcctgacaattggtttgagattgagaaagcccgtcaaatgctgtccgaagctctactaagagaagaaatccactggaaataaaagtccagagttcaatggcttcaagaaggcgatatgtgttctaagtttttcatggcgtctactattgtgagaagacggaggaactacattcagcacataaaagtcacaccggatggagattggattagagaccatgatggaatagttaattgctttgtcaacaatttcaaggagatttttaagagagatgactccaacctcactcagcttagggacgggttgtttgatccagtaattacagagaatgacaacattattttaaacactatcccgcatggtgaagaggtcaaggcgaccctttgtgacatgggaaaagataaggccccgggcccggatggattccctcctagcttctacttgcaccattgggacacagtccatgaagatctaattgagatggtgaaatacttcttttcgcacttagacttgcctaagttcataaatgacacctcctttgtgcttatcccgaagaaagattctccaagtctagttaatgactatcgcccgattgcgctttgcaatgtggcgtataagatcatctcaaatatcattgcttcaaggctaagagatatccttccaagagtaatatcaccaaaccaagcttcatttgtaaaaggtaggcatattgccgaaaacacaatgatagctagagagattgtgcattccatgaacaagaagaggggcaaacgtgggttcatgctaatcaaactcgacttacaaaaggtgtatgataggcttgactggggctttgtcatcaaggttctgcagcaaattggctttcaaagtccctttacggattgggtacaggcttgcatttcggtcaccgaaatcaagatgcttttaaatggctcaatagttgggaagttcaagcctgagaggggcctaagacaaggcgacccgttgtccccagcgctttatatcatggctgccgaaactctctctagactactgatggaaaaggagaggcaaggccttcttaaaggattcaaactcacaaggagaggggagtcggtcacacatttgatgttcgccgataatatcattcttttcggggaagcttcagttcgcgaagcgagatcgttcttaaattgtctaaactattattgtgattgctcgggacaagccatcaacttctccaagtcttcggtatatttctctcgaggtgtggccggtaggaaagcccaaataatcgctcagacacttggaatgaggaaaatgaataggaacgcaacatacctaggaatccctctgtttagatcaatcaaaagaacagaggatactaaatatgttgttgacagggtattaaaaagaattcaggggtggaaggttaaactcctttcaagtgctggaaaaacttgcctcattaaggcagtcggctctagccttgcgaactatgtttcatcctcagatataatcccctccacgacggcttctaagatagacaaactcctgcgtgatttctggtggggtgacactgagacaaagagaaagatacacttggtatcctgggatcgcctctgcaaacccaaaattgatggaggtctgggatttcgtgcaaccgagacaatgaacaaagccttcctcgtgaagtgggcttggaaggcccttacaagtcaagattgcttatggtaccgaataatgaatgagaagtacatcaagaaccaaaatttccttgagttggaagccaaaccgtctgattcaattttatggaaagcaatcctccgagtgcgaagcgatcttggaaaaggcctatgtcgtagaattggcgatggcaattcaacctccatatggtttgacccgtgggttccaggagacaaccgccaaccaattctgcgtgtagatgaagcagtgggaatcagcttggtaagtaatttcattattaatcatcagtggaatgcggatttgatccggaggtggttccagcacgatgatgctaagcgtattctgaacatcactcttcctgagacgacggttacggactcctggttgtggctgccaaatccttctggtgtgtactcagtcaaatcggcataccgattgctaaagaatgccaatcacagtaatgatggagatcgaaaatggaaatccatctggggagcaaagatacatagtcgcctaaaaatgctttggtggagaattcttgctaattgcatccccactaaagaaaggctgagctattctattcctatccaggacaccttatgcctattttgctttaactctgttgaaagtagctttcatttattctgggattgcacttatgcaaaggcagtctggtttggctgttgctggaccttaagagctgatcttgcttcggtgtccgattgggacgattggattcattggttttcgaatgcaaacaatagacctccctctcttgattttaatcttttattgggaggagctgctattattttcgaaaccatctggagagagcgcaatgggaggcttcatgacaacaaaacaaacccaattgcgatcttaatttgctccatcaacagcaggattcaggaaattacttctcccaaagactcccttgactccattcaatcagagtgggtgcctccccctgacggttgggtggcttgtaattcagatgttgccataggacataatctttccatgggcgcggcagttttccgagacagttctggtgccattttgcgagctgcttcccttcgtctgaaccattgtgatcctctgccgggcgaagtagcagcggtttgtgagagtgcagcaatcgcagtggatctcggatacagaaacattgtttttcaatgtgatagccttattgctgtggcagctctgaaaagcaacctcaaggatatccgcaacctgcacttcaatgtccaagacatggttcacaaatttctagcttctgcaggaaaattcaatctgtgggagataaattggatcccaagaacatgtaatggtgtggcccattctgtggctcaaagggcaaatcgtttcaacaagatcgggtttatcgatttggccaattttgatgactccctgtgtagtgataatgcagatggtcatactttagtttagcttagtttagtttaatctagtttatcttagtttctttgactttctgcttgcttctttgtttgtttgttaggccgactttggcctggttctgtttgtagtttgctttgtctgtgggtgtggttcccagatcaaccactaaccaaaaaaaaaaaaatatatactaacacatattttatttcaaataattatactattttaattaaaataaaaaaaaaaactaaaannnnnaataaaacaaacactacgtggcttatcacgtaacaatcacctaatatata

SEQ ID NO: 29198 - DNA, 1564 bp, Cannabis sativa
  modified_base (1539)..(1539): a, c, t, g, unknown or other
tggcttatttggcataacaggaacaaagctctcagaggaacatcacatgaccagtctcatgctatagtgaacttagcgcaatattttctgacggattacaaatcatcaatatcagctcaaaaacctcatgtgaactggaccccctcggtctcatcctggatacctccggatcccggtcgcctaaagctgaatgttgatgctgcaattccaaagggtacgtcaaaagttggctttggtggagtcatccgaaatagtgacggtttggtggtagttgcagtagcttctccttatatagggggaggagacgtctccacacttgaagcccagtctctcatcgcctccttgcattggtgtattgaagaaagcttccccattcattgtgtggaaacagattgtaaagctatctcggatgcttcagagcgtcccaaagaagatctttcgtgctttggtgacctaattaatcaaattacggcagctttatctctcctccccgacacctatgtctcacatgtcaaccggacaacaaatacttccgcacataagttggcaacttgggctacggggttagacaaagtagcgatttggattggtgatgacccctgtaagctcaatgtttttctttttgtttagtgggcaccttcccctaaaaaaaaatatagcatgtaaagttaatgctattaaatatggcattttataactaaactaattaatatgggtatttaaatagaaaatgccttaaaaaaacattaaaaagataatcaatttttcaaaataggatcacgctctctcctgccacataagatttttctctctcctgcgattcaaattgcttagtttctcatgcgatcaaaatcaatcaccaaggatccttcatcaagaaactaatttttttcatcaagaaattggtttcttcatcaagaaactagtttcttcattcagaaactggttttgattatataaaagtaaaatttataataaaaaaaacctataaatccagtttgaacctaataaaaagataatatgacaaacttataataaaaaaaatacaataaaaaaatatgaagcaacctcattacagtaaaacagaggtgctcgagaaaaacatagaaattaaactattctctccagccacacaagatttttttctctctcctgcaattcaaattgcttagtttctcatgcgatcaaaatcaatcacaaagatccttcattaagaaacttatttttttaatcaagaaattggtttcttgatagttttttcattaagaaactaattttttcatcaagaaactggttttgattatataaaagtaaaatttataataaaaacttataattaaaaaaaaaaaacaaaacacaataaaaaaaatgaagcaacctcattatagtaaaacagaggtgcttaaaaaattggttaactaggatttttaccccctaaacttaacatgtaccaaattatgccccctgaactttttttgccgttaaaaattcctcttatactattgagattgtttgatttaaggacttttatctaatttnattcaattttactatttcagtgatt

SEQ ID NO: 29199 - DNA, 1514 bp, Cannabis sativa
gccctttagcatttctctatatttcatatgtggagaaatgctatagcaccctcctacgtgttaatatcgctattagtctaactaagtatcgggtcttatattatttaatataataacttttagggagtatcgttatctaatcacaatgcaacatgtcgagaaagtgctaggtaccactggtgcctaataacagtgctctttatatgtgtacatgtttgtgagatattaataaactataaatctttctactatgctactctacactaaaaaaatattattgtatgcattaactttttctattttcatagttaaataaacaaactaattaaatggaataacgcttgtgtcaatatcaaaagccagacgagcaggaagcgctcatttcatcatctagtttgaagctttgttattttaaagcaataatcttatatgcttaaaacaaattaatcaaaccaaaattacaactcaaattaataactcgcaaaatttcatcatcatcggtaattgattatttgcaagcaaagaattcaagctacaaatctgaggttggattttgcagcaattaacttgaaggccaactttgatggcaactataatttactagaaagtagtgatcataggcatatatatatacacttagtagttttacatcttttttcacagaaagaaaatcttaagttaaatctctctttgactacaagatggctaagtgggcttttactcatcatttaaatagttctatttcggttttcttcttaccggagaacttattttataagaaccgagaggtctaactatttcgttttatgataatgtacttcttcatttcatttcaaaaaaaaaaaaaatctcaaacaattaaaaaaaacaaaaatatacctagctttgactattttggataacaataccaacactacaacatgcacttggtgttatgaccaataaatatgcatccacattgattttgagagtgtttggagctagagagtccaatatattcaaacatttcatcttgaaaatcttttagcaattccttgcatattatttaacaagctctcgatctttcaaatttacaatcattttgttacctatagaattcattagctcgataacatcgtattggaaatagtgaaaagggactatcactgttaaagcatatactgtctaggcatagaaagctatgcctaataaccaaccatgaaactatgtttggtacgtatagtatatatactagcctggtatgaagtttatctattctcgagatgaagtatataaggatcacccagttgactttttagagcatgtatacccttccctagtgacaaattcaggatttaaattgagtggtgttatgaaagagagaaacgggaaagatagaaagatgaaagagagaatgtaaaatgaagctctgttgagaagctgtgttaagaaacaaagtgagaagctgatatttatatatgtagtcagttacaaacaaatataacagaaaaagtacaaccaacccaatcctaact

SEQ ID NO: 29200 - DNA, 2387 bp, Cannabis sativa
taattttccacctaaaaaatttaccaaaaccactagaagaagagctatcgctataagagggggtagacggaccgtagtgtatcccctaaaatccctacagcctgtaatcttgaacatattaaagggctcgattggttctaaatcccaacttgtgtctatatgactggccctatctgtcatggtgccatattgttcagctataccataatacgactcattacagttaatctgaacgtggaatctagggtaccagttgtcaaacctatgggcaattcggtctacgagaagggaattctaaatataaaaattaaggcggctaaaatctatgtgcaattcagtctacgagaagggaattccaaatataaaaattaaggcagctatctcgaaaagtaactaatgtgttacgttcagccctaagtattgtgggtgaccaaccacattgattacctcaggatgctccttcaccggcttcccgaggggctgtgttttgaaggtattgtacatgagccacacgatcctagaccttatcctccactggaacgggaacctgctgccaagaagaatacttgggaaacttataatcacaagtatactccttgtcagtaaggaggtccacagatctcagattggcctcatttagaaggaactcgcacaacctaaggtcgtggggaagagtcagcaggagcctatgtcgattgaccatcttgggggtagggacaggtctttttgagagagctgtaaaaaacaaaaccttagtcagaaaacttaaactgaaaagacaaggattaatcctactgagcctgatgaaaataatcacttacgaattttgcagaaggtggttgtgccgtttggggagaggccagttgtccaaaagaagttatctttgaaagatatcttgtttggcaagtctacaataattttaggctcgctagagtgagtaccaagataaaagaagccccctgcaacattcttcctcgctggaacgaccttaatagagtagagatactcgatttccactagcgtagggcactcccacttcagaattttatacaaaaccttcaaactggcaagaatcctgtaggagacggggtttagttggaatggggaaagcccgaggtggtttatttaatcattgaagtagtcacagaggggaattgtggcccctgcacttatgtgttcaagactccaggcacctatgccagtcgagccactggtactggtctcaccactagctccctcaagggtctcgcttgtaaggcgcacagggggtaatagctaaactcaccagctcacactgacctaacttggcatgcttgcccaagtttgattccacaggtcctcaacatatcacctgtgtagcctaagatagttcgcacttttgattctattaactcagcctcaaaggtgacgttaggatcctagggagtctttgatgtacgtctttttctcttgtgagggcagcactcatagcatgttctgtgactgctaggtgcacgcctagctcttctttttcatgggatttgggcaacacaggtggctgagccaatttgtttcttcagctcctagaatgcagtttcacattcctttatccactcaaatttgttgttgcttttacttcatgtcgaagaagggtacacatttatctgtatacttggacacaagtctgcttagtgcagtagtgcgtcctatttggctttgtacttccttgattgttgtgggagacttcatgttcaaaagggcttggatcttgtttgggtttgagcttcttcatttgtagctgcgaaggattttgaaattttctgtctaggtcctccatatgcccccagcccttttggacttgacaagcatatcgtcaacgcacacctccatgttgcagttaataagatcattgaacatcatgaagcttgtgtgctcttgatttgatggatgcatcttttatttcttagctttggacaagggcaagttgtaatagtgacggacatattattggtcttctttcaacatcctacccctgccttgttgggaatttcaagtagggtggtagatggatgttactccttcaagttgtataaggctggtcagcctatcatggcattgaaagttgagggaacgtcgattacgacaaactgcgccatcagaaatctagtggttggatttccccaacagtgaggggtaatttgatatacgtaatgtatgtgatgccttggccaaagacgccatacatcacttgattgtatggtgccaagttagcgagttgcagcctcattttttcatgtgttgattttgaaatgaatgttgagggaggcttcattgtccaccatgtatcttgctgcagttatattcttgatttgtgcgttaacgactagggggtcgttgtgcgggaaact

SEQ ID NO: 29201 - DNA, 2114 bp, Cannabis sativa
tttttttttcaaaggaaactaattgatttattaattccttgcaaaaattaattcattgattaaattagttattatttatttatgtccaatatatataagtttggcacataggtaaatttaattaaggaccaagtactccaccccattacaaagaaaagaaagaaaaaaagtgatgccttcaataattatttacacataattataactaattataataattataacatttatgtacttttttttgtagctttgaaattattaaaaagctagatatatataatttattattaaacccagtttgcacacctagcaaaaattacgatagctatagctaattaagaataattaattcaacccctgatcattgaaaaagtaattaaattaactataaatatatactagtaataattaacagagatattaatattgtttcatccacaatgatcatgtaaagattaatatacagcaaattaatggtttttctttgttgttagttcgtgaaaatgattatatattatgtcacctattaatttgtctagcataaatacttaattttaacatccgattataaataaatatttaaattgaatttttaacggtaataatatttaagttaaaattctgaaatttccgtaagtacctggtcagccaagtatttacgaaaatttcagatataatttaaatattattaacgtaaaaaattaaatttaaatattaaatttataattgaaagttaaatttatgtatttataccgtaaattattctatatataataactcatttttaaactactagtgccagtaatttaatatattgatccaattcctagctactcgtaaaagtgtcagttataataataacacacaacaatatttcttaactacttttctcagaaaatataacacgcataatattaataatattatagaaagaatatacgttataataataattgtctgattttatatttatgtatattgccctagataaatatatctataaataacctattatatttattaatgatcataaatatttgtagtactatatatatagagagagagctatatatagccagcaatatatatcgatttagtatataaaaaataaagttccaagtgagtagagagtaagaaattagatgcaattagaactgcatgaatttatatatatatatgtatatatatcatgatatataacagagaaagagaactatacaacgaaaaatatatatattaatccaaatgaaatgaattatattaacattaattacatggatatattatagtagatcaataatatttatttgtaatagcagattttcaatagcagatttccttttcacttcacttaattcacaaataatcgatcttgaaaatttgtttaatccataaatttttttaacaaaaattgaatttgaaactttatatatatatataattaattccatatagctagcatttccatttattacaataaaattaagaatatcagttatattttttttttataatatcagttatattattaataatgcatacaaatataccattcgatgcataagtatatataaatatttgttaataaatcactttgtctaattaaacaaaaatttaacgtaaattacgtatatatatataaatatttatggtgttctttattattttttatataacaaaacaaatcatcatatatcataatacatcataaaaatcaataattataaaaattctctcctacacaataagcctatatatatagttgattattgatatatataatatatatattgtaacaaaatcaataaataagtaaaataaatttataaatgtatataacacacagcacgtatatatatatgtctacacatctagattaaataagcaactgtattatatatatgtatatttatatatatatttaaaccaaaaaaaacataaaaagagacaatttccaccatgcaagagatctaaattggagaatatgcaatatttatatataaatatataagagacattaggttttacacacctgtaaatttgaaaaagggctagggttttagttttatggctagttagttctatattaattgtgtagatttatgtatatatat

SEQ ID NO: 29202 - DNA, 2199 bp, Cannabis sativa
ttaaaactaacaattggtcacctttttacatttaacaatataatcataaatataagtctttaaaattaataattaattatgtcacatacatacattgatggaattatataagaaattatgtatcactatactaaacttcatgcttaggtttatgaagaggaaacattacttttcttttttaagaaaaatgtttctttattaactgaaatcatctccaactaacgatcaataacaagatatattttgtgtttggtgattgtttttgagtatttccaaagcttcttcattattatataagatgaataaactgtgatataagatcattataatcatatcttataatatttttttcttcattttattttttaaagtgattttgtcaaattttagtggttaatttttctatttcttttttaaataattttaaatgatattttaaaatataaaataaataatttccaatatctgaccaagtacctgatttaattttcattttttttaagaaaaagggactaaaatactgaatattttcaaaaaaaattatagttttatataattttttttctgttttggttttctgcggtcaaatatattaaaattataaaatgtctacttttatacctaatactttttttttattattacttttttggtagtaaatatatacaatgttattaaaatatgctcttttatacctaatttttaacatgttagacgttaagtattgacacagaataatacataattttgaaacaatttactaacaaagaaaaagtaaaaatagatgtataaatattaaatacttatactagagaaatgtgttaatttcatgggtaatattaaagctttactcaagtatttttgtttcaaaagctcagccaagcaagggatatttatttatttatttatttacctagcttcgacaactgacaaagttaagtcgtttaagctacaattgtcagtaattttttgtgaaccaacttctaaatcttccataagtaaataattaatgaaaaagagtggctgttttggggaaggtaatagagtagtatcactatatatcatggaaacaacatcaggcatagttggtctgtcttctgggcgctcttgtacacacaacaacccaatatgaatgccaatcaatacttcactcagcttatattttgctagtgatgaatctactaactcaacacctctaccttcactccacaactgccacgcctgaaaaaataacaactccacccaaagtatcatatatagtgttaagtgttacatgttaattattactacaataaattttaatataatataaattaggactgacaattttgagcgagtttgacccgaacccgaacaacccgtccgaacccaaaccggtaaacccgaaatttttaaaaaaatatatatatgttcggacgggtcgggtttaacccggtacccttcgggtgggttcgcaagttgagtttttaagagtactgaatttcgggttgaacccgaacccacccgccaacccacatatttaatacattatatttatatttttattacattttataaatatatattaattaaaaaataaaaagaattaaaaataaaaactctaaaattattatattatatatgtttaatttaataaataaaaaaataaaagaaataattattaaaataaaaaattattttttttaaagaattgaccgggtcaacccaccaacccaccaacccgtaccctatctgggtccgggttcggtttcattttttttaacccgaaacccgtgaacttgaaaccggcgaacccgaaatctaataaacccgcccgatgttcagccttaatataaattatatttttaatacataataaaggacatgtgttagcttgtattataatatttacaaaaagtttggagttaacccttgtctccaccctaatctcagaccttggattcagactcggtccccaaagttgacacgaactcaaatcaagactcaaactcggatcccagattgggacctgaaccccaaactcaccagattatggaccaaaacctagatccggactaagaccgaggttcgagtccagggtccgagtttaagtctaggtctggagtcgagtttattatatctaatatatcattgtattaaataatacctaatacaatacaataaaatacttaagagtaaacaagaacttaaagtaatagc

SEQ ID NO: 29203 - DNA, 6645 bp, Cannabis sativa
tggaggcttagctccaaagccgtccaacaaatcaattacagaagcatctcttggaggagtggcttgtgtagaatgagatggagataagagtaagtctagtggcgccaatggtgttttgttatcttgaacggaggaaaagatatcaggtgttgatgagatgttttgagcaggaggtgtgccaatagataaaagatccagaaggacgtcagtgccattttgcacagcatgatttgtacctagacacaaaaaaataaagttttaaaattgcatacagagataatgtaccgaaaaagcaccaccatataaatagacagtatatagctatataggaattaggatgtatcatgtgaagcaaggatattccacaataggtaagagaaaaagaaatttgtaagcatgacattcgacccaaatcaccaatcacttgaaaacagaacaagtcaattcttgagatctgagaatatgatatagcatgtccaaaactaaccaggttgatttgaagatggtgatacatcaacaccaagaagatcttgaagaaaatcaccacccccagggctaggtgcaggaacatcatccgaactcagatcaagcaaatccaccagtggagccgcagaggttttgttaactccgtttggtagattgatagaagacacagtggaagttgacacagaagatggcatagaacctgccctcctgcccataaaagttgcttcatccaaaactggcatccgttctactagtgcagacctgcacaaactccatccatcagctttcaaatatactagtttggttatactatcctctccaaccaagagaaggaacataaaatatctagagaagaaaaaaaaaacaagaaataacagctgcatagttcgtgatatcaattttaaaagtgcatacctaatattcggatgcttcgcaataatagaattaaattcaatggatctttgctgcaattcaagaacaaggtttcctctgtattgaacagttatctctttgatcctcctacagaaggtattcaaatagcaatttttataagagatcacaaagattatcaaattacaagttcatacaacagaaacatagttcgcttaaagttttaaatttgcttaaccaaaatagcacaaggataataaacaaatcatccaaaaaatcgtataaaattaggcggagaaagaagtatctatatactctgagcaagatggaaaacgtgaagacagctttaacagagaaatcaaagccattgctttagtggtaagatctgacttatgacgcttaattgcagtctctgcaacatccacagcatcagattctgttacctgcccaagaaaactagattatattggaaactgtcaaagaaataaataaacgctttatagcattattcgaggatttcctacaaaataatatttcatttcaatgaaacctcttgcttcacatacataagaaaaagtggcatgtaaatataaacaaaatactgcaggtgcagctagttgtgtaacacaacactaaacttatcaatatcttaaaattcagaaaactactttacaaagaagtttctgagaaaactatatagtgaacttgcaacatgtttagccaagttttaagacagttttacactcaacctaacttaaaaagaatattttctgagaccaaagttaaaatgaaaaattacagcaaagcactttcattaatctgaagaagctcaaacttactgttattggatcttctatgtccagcatgccaacattattcaccaacatgtcaccatattcaccaatgcaccaaactgccacccgaacaagactttcctgaaaaagatcaagtagaaacaattatcttagagcataataatgtcactcatacacgatacaatgatacaatctttctgttgctcacctgttcagatgatgtttggaatgctctgtacaaagccctgaccgtatacccgtggagatcagaagcattgcttatcacaacaataagggcatgccatacatcatcttttacataatttccagcctactaagcatagcataaagatcagtagcttcttagtaaaaacaagaagtacaattaattaggatgacaattaaatattaacatatatgttgacattgacatttaacattataaggagcatactttaacatgttatgcaaaaattgtaagggacattatatttatatttacaacccaagaatatatttaggcatcccaaattcccaatattaaaaaaaatacttaagttaaagtatttactctcaaatactttttcaaaattcccatatcaacttaagttagttttcaaaatttactctcaaatactttttcttttacattcttgtgctaacttcaataaaaataatttatcttgttttcatatataaataatgtatatttattttatttttagtttaaaaggatttcatatacttttagttttaatttttttaaaaaatcttgatatttaaaatgtatgttaattatttataaatgtatattttttttggaatgtgagatggaagaaaataataggtaaaagcgagtataaatataaaatatatattttatgtaaaagaaaaataataaatgggctgccttgataaacggttttgtcagtattgaaggtgtcacttggtatttaataacacatacaacagcatgaagcacgacacaatttcacaaacaacacctatgcagctgtgcaaaattataaatccaatgacctttggatcacaccatcaccatgcaatcagtcataaaaaaaatccaagcaatctttagaagagcaacataaagtattaattgttattaatacctctgagagaaccttaagcatctgatcaatgtaccatatcttctctggggaaaacctgaagcagcagtgtatggatgattattaatcaagatattggtataaatcaatttttaagaacttaaaatatttatgagcagtgaacttcattcaaattaaacaacccaaaatcgtacaaacacgaggaaaatggcatttgtcaaacaacaaatattattgatattagactaaaaattaatcaagacccatctaaccttacacataataatgagaacaggaaacagcatattagaattaattgatgcagtagcccaaataggggagcataagtatgattagagtggttactgaaaattagtcaacacgcatctaagaccctatcaaatgcatcacaagatcttaatcctcgagagagcattccaaagtatatcatgtgtaacaataacccagtccaaaatttccaaaggtaagaggattccaattataaaatcatgaaccatgtcacttactttgctacaatggagcatatttttgctgtaagatcttccttgaattcttcatcacttgcttccaaataatcaattaattcttttgttaagggtttgacgttggtctcatttataagaaggtaaacaagttccaaagctctttttcggatagaagcatctgaatcctgtaaagaaggggaaaaaagttcacatgcttctcaagttgtgcccaagttttcttggtgcagcagagttcaacaattaagacagcacatcaaatcacaagagaatgtcaatatcaacacttgaccttaaattcatcatattcattgaagattaatttatactacgacttacatcacaagttcaaaataacatagaaataagacaaaacggcctaactttatacatgtaaagccattcattcaaaccaaccaattagcagcagctgaatataacaataagaaaatgacaagacctgtacttctagaaagaaatatggaaaaagatatggaaaatgtataggagaaaaataactagtgtggtatttaaggaagagtaaaaaatgtgtttactttgtcaacattcgtacatataagagaacgattctatgaaaaatatataaacaaagaaccagaggaagggggtctcatttttcaattaaaaaaatgtgtcagttttattagatcctgcgcaaattaagatgacggcatatacctttacacattccaaaattgttgcccgatgcctttgtacagcttgagtatctactgtcatagccttcatcagcatgtttaatgcaacatatctgtaaaaatgatgtttataatgtgataaaatctatttgccaatataaagatacaaaatgattttaatcaatatgataaatataaacctgatattgttgtcacggttcgataagaatcttcccaagatgttgattgcaagtacacgtaagccaccattatcttctatactcatgatggtttctacacattcatataaaattgcattccctgcatttttgtttgattctgttttggtggccacctgggagataatacaacagtaagtaggaagagaacagggggcagctaacttgacagatcttaaatcatagctaacattcaataattgtaagcacaaatattcatctggaacattaaatgagaaacccacatgtatagagaccaaaattagagaaaattccttgtatgaataatcaaatggtagtaagcttggcaagttacaatgcccgagagtgaaaaacaatgaattttcataagcaaacagctatttgtatgtaatgttgacaggtatcccagctacgctctttccctttctgatctttactgtaatgaaacctccctagtatcatggaatcataggtttacaattacacttgcttgatcctacttccactcacaaacaacaaacagctacccatatgtgcagttgtgcacatgcaggtaatatggaaatgattaaaaggctgacaataagattgtcatagcttttttaaataagactgtcatacttagttagacccagtgaccaatattattgacaacatagttgttaatagtcttgaaaatgttgccatatgcctatttacaagcattaataaatgcatgtcataaattatctccaatattatcacgtctaggtagcaaatgagatacactgcaacattatactgtaaaagtaataacagttcaaaaggtgtgtttatttatgtcaacactattaacctgaaaaatctaatatgttacattaaaactgctgagcagctaagtgaaaaataagagatagaacatggataaagcttacctgagcaagtatgtcattcatgcaatcactagcatctgcatctccttgacccaacacacgcaaaagccgtagtaatctaatatgcaggaagggatctgtgatgccagcaacatcatactcaggggcataaggactgttcacaacatcctttagtgttttaaccaacccgtctgtgcatttctacattaatagttataacagccacaattaaaaactaccttagtatttccaagggtgttgtccaaaaaataaacaaacaaaaactataggagccatctttatatacaaaagttgaaaggaaacatcctaccaagttattaaatcaaacttagaacagctatatgactataggcgccaatttaaaatatctagtgcagaaaactattaaagtgtgtttggttgggggtaatgtaaatagagtaatatgaacgggaaagagaaagggaacacgaatataatggaataaaatttaatatgagaaaattaataattaaaaaaaattacttgtgcaatggaatgacctttcattccacttttcactgaaattccaatggtttattccattcctttgtttggttgcattttgaagtattgaaatgtcattccaatagaatgagttttctattattttggtggaatgactattccattttgaaatggaaagaaagaccattcaaatgcaagataagaaaaaaattaataatttttttatcaatttttttaatgcattttaattttaattccattcgattcctaatcctattcctatttctattcccattttcattcttattcttattttctcatttactccaaccaaatgccacctttctgactttgaataaaatacaatccatacttaaaacataagaaatagattttattattctaatcttgatcgtgaaagaaatatgtaaaacttcagactccagcacatacacaatataaatcctagagggtccacttcacaacgcaatcaggtagatcacatgagaaatatccaaagccttaacaaaataaaggcattaataagaaagtactatgaaaattcatatacagcagaaaggtctattcaaacttcgaaggaattgataagatcacaatcatgtttacctttctcaaatactcaagggcttcctcactgactttacacagatctatacaaagttgaattcctgttattaaaactccatgatgtttttctttaagtaaggaagcagcaggatttatgaaattttctgccaagtctgggactttctttacgatccgtatagagcataatgctgcctgaaaatcagtagtgagtcgaggtcagcttgcaaatatcaacggttatggaaatacatatttgggagggaagctaaatttaaattgcaatgaaaaaactgaagaagtccatggtcaacataggaaaagcagccatgaagcgccataacataaaacaagtatggaattgacaaattggatgcaattatcctaccactaaagaagttcgaatcaacaagtata

SEQ ID NO: 29204 - DNA, 1999 bp, Cannabis sativa
atacaagatcaaaaagctgtaagtattaattataacaaataataatatatatatatataaactaatataaataattttacttttttttttacagtttggagataagcagaaatataatcaaaaaattgaattattactaatacaacgacagtggatagaatagttgatggcggtgatttatgaaggcttggacgattgatgttgaaaggcctaagaattattctgtcctagcttattttttaggttaacttgtagtaagatttattaaattgttaatacttggactaattttataatatttgtgtaatatttaatttcttctatggaataaaattaggtatatgggctaatcataaaattaatttacataataaaataatatttaatttatttaatttaccttttttacctttttaaaaaataaatatttaatttaaatttaaattaaataacataatatatagattaataaaaatataattcaaataaattaaattaaattaaattaactgaaaaaaataattattacagatttaacgtcggttgttaagggtatatggcgtcggttatgggggcatatggcgtcggttattcactacaaaccgacgtcatatgtacccatggcatcagttatactacaaaataattgaggccatagggtatcatttagcgttggtagcgaatttcaccaaaaccgacgctgaaaggccttaaaaattgtctctaaaaggtgtttttgtagtagtgtatgtgaatatatatgtgaggataatttgagtacaatactaaagagatatacttgaattgatttttattttaaggtaaattgcttaatgtataaaaaaaatgtattcttcaacttctcattttttaactagggtgtacaagttgtaagagatttggaaaataaaaatcatgtttgacttaattgattgatgatttcttgattatttagcttaattgaaaatatatatttgagttttcctttctttgtatttatcttgggtaacttctcactttctttctttttaaatcgttaaccgactattactactatcattctctcactctcgcgttatggtttgttatctttgttttcttctttcttttatgtgttaatgtgcttatttttttggaaagttctaaggaactctaacaattgtatttttttaggaatatatatatttcttaatttcaaaaatatattcattcatcaaagtgtgagggggagactattaaattcttatttggcaagtttatttttgaatttagttgttatatttattaggttaactttattaattaatatatcaattattttatcgctttaatattatgatatttctcctttattatttattgtatatttggtaagtttatacaaagaaagtcttctatttccatacatttttgaagattttattttcttgccatatttaactaattggctttctaattgcttatgtgtgaagaagcaaaattttaaagggaagaacatgaagaatagcctttgggaaatagttaatccaattcttgcattggaaagaacaaagcatttatcaagaaatttaaaagcaattcaaaactttgtgtacgaagaagattcattcagtaaataggagtacatcaagtttgcggcaaaatcattagaagaagtgtaagttttatttaagtcaattactttgtactttgttgaaatttgacagatgaatcttacctttgggcataaattattaacatctgaaaagattgttaaaacatcatattaaaatcttgcttgtatttttattattctgtcatttttgttaattttatcacttcgttattattcagtattgcagctacttgtttattagctacatgatattgattttcagttctaacatgtttgttatgtatataatatttttaattaaataaataaaaaattggtaattataaaataccaaatatcattatttataaaattaaattgtgtggaacttaataaaatgtacca

SEQ ID NO: 29205 - DNA, 1766 bp, Cannabis sativa
  modified_base (140)..(143): a, c, t, g, unknown or other
caaactataatacatgtataaacattatattttctctaaaataattctattatgatataatattaataattgtttattgttattattattacattgttattttttagtatttttattttctagtgtaactctatttagtnnnnacctctcaattagaatataatttatttggtttcaaatgtattcttagatagaggttctactgtatatcattataccaatcttacctcgttttcgaattcaagtgtgtcgatcaacttgagtggacagctgttcgacgacttataggtcccttgatcttggaaagatgacaaaagctactaaatattcagctggagtcctcaaagaaagctagaagttgaaggaaattgctagtggttttggtttgggtttggccaaaccctaagggagaaagaaacaatgaatttcttccaacaatttctaatttcttctaagtctacaaaggagtcgccttcctatttgagcataacaaaattctaaataaaataaaatggaaatccacctagcattaaagacaaaaactcagggtaaattaccaatttaccccttgcttcaccatgaagtaactttaccactaaagagtattttggtcaaacctgacaaccccgaatatacttgatatttccaatgtctatctaaattgcctgctattactaaaatactaaaccacaagaaaaaatgatcctaccggccacacgttgcgttccactgttactgggcataaaatatgaaaaatatgaaatttcatatataatataaataacatacctggaattcaaatatatcaccataaattcataaatcataattaaaaatctaatttcaaaattaaactctaattatctgttaattcttatactaaagttaagtggtctttataggtgcggtgcgaccagtttgtgcgatgtgagaggtttgatgaacacccctaacttgatgtgcagcttggatctgggacaacaatccaagttgcaacttagacttcgacaacccacaaaaataggagataaatataatatatttacatattcttggaagataattaacttattatttatttattattttattatataacaaatacattatattttctatttgtttagggatattaggtaatttttctcttgtaatctctcttatataaagagtattaccttaaccctaattcatctaagtctcaagcaccctaaagctctgaaatcctaattctctctcccttctcttctacatgcctcaggctttgtagaagagattatgtctctttcatgtcacttacctgagatttgtatactgattctcatattataatcttaagagggccacttcagaatccacaacccttgtgatctgagtggtattatctttagtattaatacaaccgtaaggagagtaggtcattatccgctaactaaggaggtcgaacctctataaaaatattgtcttattattttcttgttcttattgtatacacgtggtaatatcagtcataaatacgattctactgtcggttggccaaatttaagttcaacaaggtcaataattgttattttaattaatttataattaataaataaatatttattattattatttattattttaagaaaaattgttatgtatacaatattttttttatttatttttcactgttaagtttttttttttatattttttatttttatacaagctatttcaatttttttttaaaataaaatcatcatctttattaattgcaatccata

SEQ ID NO: 29206 - DNA, 1445 bp, Cannabis sativa
ctctttagttgtagggtagaaagaagcttgacttttaggggtttcctcacttttgctggaactatcaaaggtttcttttccatgataagtagctccctattgctggaattgggatggaccctttttcatctagaaactccatctccaatgccacatctaagccatccatgtaaacttccacaaggcctagttgcccctcccattcatcgatctttacattcactttcttggccactctaattgtcgcaatgtcctttgaattgtctaacttcatgcgacccatatctttctccaatttaaaccctatccttggcttcaagttcaaaaataaaagtgtgtgtggtttcaatgtcaatcaacacactctttatctacttccatttaaggtgaccttcaaaaatatcaatcccttcccaagggctttctttcctctggtgccatgcttcttaagagcattcaaaaattgaacggggatgtgcgcagtcttcatctttgtcttcatccttataaccttactcctcttgaaaaatggatgctttgatggcactcaacttggactggtgggggcaagcatctaccatgtgtggtccttgacaaagcaaacagttaagggtcttcttcccattagcagaacaacacttaaaggatgagctagattcatgagtcttattttcccttcccccactcttaccatgacactgcttcccaatattgttagagattatttagggattcatctgctttgcctatgaatgatttagggtctaattagttagtcgtttgattgcagcttgagtcgtggctaggtctatcacatgctgcctctgtactcttgtttggctcattgattgagtccttcaaggaaatagaagagcctatcgacttgtttcatgtcctggatatcgagcatcaacccaaagaattttcttacatattctcaggctgtcctaactcgctttagcgctctcaacttatgttgggcccagtaggcgacaattttatatagaaactatgcattcgattctttcttcaggtcacctcatgtttcaatgctgcacttaaaagtttgaatgtcttcgtacttcatttccaccataacttggtatccctagacaaatacaaagtagttgttgctaccttcgcttcttcaaagatcttttaaattgtatgtgagtttctttttctagaatatttcatatttaatgtgagattgtttccttacttataatgcataacatgtggtgtattatttgagtatatattcttactcagatcgtgattttatataggaagaataaaattatttattaggtatattttaatgaaataaatattatatctatgtatgatatttctttgtaattgatatttatctatgtatatcttattctattcttttatgttgaccttgtttaaattttaatatccagctaattatcttagtg

SEQ ID NO: 29207 - DNA, 1843 bp, Cannabis sativa
tactagtaccataaaaagtagtaaacttaaaagtctcatatttttataataaaatcttaaaaaattataatgaggcaattttctaatttaattttaataaaaatagaaagctaatatgatattattagtattactccaagaaaataaaatctctattcgtgcgattttttttttcattataattttcttaagaaaacgataaatccatcaacaaataaatgagtattggttttttaataaacaactttatcgttatatagttagtataaagtgtgattatttatgacttatgttttttttttttttaagtttttgaaagtgtttaaattagatattttatgagtggtttggtagattgtattgtataatattatattaaattatgttatatataatattatgttaagtttttattttatgtcaatatattatatatttatataggggcttataaaatactcaattcaatccgcacgatcaaatttaaaactatttacaaagtgcggatatccgtacttgtgcagattggattggattgaaaaattcaaattttgcgagtgctaattgcactcttcctattgtgtactcttttgatgttactggtgcttatctgcctttgaactctgctatccctgcttctaaggttcaagctactaaactcctatctaagtctaaggataagactattttaggggctaagagatctgctttcaatacccattctgttttggttggtgaatctgtgaggaagttgtcgaaaagagctagatatagctttattgctaccgtgaccacacctgctattgttgtttctcttaaacaggcaactgttgctgagaaacccctccctaaaaaatgagtctgttaagttggaatgctcgagggttggggaatccctgagcattttgaaacctctcccttgctgtaaataagaataagcctatatttccttttgttatggaatctaagctcatgtctggtagttgtgaagagcttagggtgaagttgtcttttgatcatgcttttgaggttcttagttaagagttagggggtagtcttttgttgttttggaatcaaggaattaatgttaatattttaaatttatctcttaatctatcgattgtattattaagtttaataataatgttaattatcatgtttcttacttttatggcttcctttatttgcatgaaaaagatcatatttggaccttaataaataggcttattgataacactccctttcttccttggcttattattagtgactttaatgattatctttctattcatgataaaaaagtataattcagatcccctcatatgctattactaatttccagaactttgttaacaattttgactttcaccctattcactttatcgggaattgttttacttggaagcatggttcttctcttaagcggttagattgggttattgctaatcaaaactaggttgatatttttctgaatgctactctctatcacatgaatttttatgactatgatcacagggtgttgaagttagtccttaatgataattgtatgactagtccttccaaaaaaggtttatttttcgaaaatcactgacttactgagtcttcttttcttgatattgtcaataattcttggactaataatgttgattgtggcaatgcaaattgttgacctcaaaaagtgatcaactggcaacgggatcgtatagatatgatatttgccacgtgttatagaaatagaatgaaaatttataaaaacacacagatttattatagaggttcggtccccttgtgataccaggtaatgacctactcccctttcggttgtattgatacctagagataa

SEQ ID NO: 29208 - DNA, 3072 bp, Cannabis sativa
acgtggcttggcacgtaacaatcacctagtaaataaataagtgggaatattggtgatactcaactatggggtatggtgtggtagccaagctagccagatccatttactcagaaaattcagcattcaaattttgtactagctcaaccaataaatgcctcctttttttaatttgctttatttattgttacaaaaattctcaatttatatagctttggtatagttttgggtgagcttgtggcgatttaaggtctttctcttgctgtgggtggagtttggatgccttcttgtggtgattaaatatgttaatttttggaaaatatgaggtgtgttagcaatgaaaatcatctttttattaccaaatttaaagaaagaaaaaaaaaataaaaaaaaaaatcccatttttattagtctcactaaatatcttgtctactctagatcagattaggccaaagttggctgcttagggtcaactataccataccacacataacataacaaatgtaaaaatttaaataagacagctcaagttgatatctgcaaactaacactcaattccaaggaacgaggaaataaagtattgcaattactattaagacgtatttttttttttcttaaagggtatgaagtaaagtagagaaagccatgaaaatccattctcatagtcataaatatataatggttaaacaaaagcatatgggtgtatgtgtggatgtgggtccctttgccagatagcaaaccgtgtgataagtggaccacaacacaacacaacactaatataatttcaactctttcttttgcagttaagagtgaagttcctgcaaaagccaagctataaagtttactcaacaagtggaaaagactgtgataatacatgttagtcaattaatgctttggtatatgtatatattgacccaccttccatttatcttcatctttattttgatgcccctttacttttagtgtagaaaaaaataatattaaaataacaaaagggttaaggggttttgaaaatatacacacatagattctctcacaaccaaaattttttatatggtacattatatattgcttctcgaatccatgcagagctagctgtgaaaaagagtacctatatatgtatgtgtattataattatgagctatgtgaccccacctttgcaagtgtttgacaatagtccaccatctgccccaaaaatgattctggcagacatgttgtaacaattgaggggttaaatccaatgataaagccaattaacatcactgttatttttcttcttcatcatctatttgattgctttttttcatttaaaacccaatagtagtagacccctcccttcatattgccataatatacaacatttcattttcaaaccatcgtaattacttttgtcttttaacaaaatgtgtgcatttggggaccttaaaagttccttgtcatgagtcacaaagtatgattatacactctagtttacatgtattgattatgatactattataatatgaaacaaacaacttatgctagctacatagttagctagttgcttcaaacttccaattttatatcacaaccccatatcaaaattctttgtgtggactatgaatcttgaagcatataatactattttttcttattatatacacatatattccctataaatatattaatataagtagtatctagaaatatggatgagaggtagagaactttagtaccaatctcaacttagctatataaaaggattgagtctatcttggatgagatatctgggtgtgggttgttgcctgctgttcctcatcttttttttggtactggataatatcatgacacactatatgatattcttgtagggttgtgggacttgaagacagattggccaactgccagttaagaccccaccaccccacatgctctcaaatctcttcccccatctagttaaactcacctccaaccccatgccactccctttaccttccctatttatactcctacttattacaaaccactaaaagaaaaagaagacatttttatttttagaaaaacaaaacaagctaaacccttctcatttttattaagtatggaaattgcagcaggagaattagaagatgatttgttctttaaagacttaagcaagcaaatatcacttcttatcatggatgaagaagaagaagaagaagaagaagaggacccacttgccaattacccttcagtttctttccaggttcatatttttactttctttctttctcatctcaaacttttctaagcataaatagtgttttcttaactctttttgtgttgtttgtttcaggctttttctcatgtaatccataataatattccaccagctgttcaatctcatcaatttgtgtatgaacaaagttgtaaaagagaaagtagcaaagggactggtgtgttcattcctcagtcttctcagccaagaagaaagcagagacatgggagatcatcatttgggtcttcatactatgcaaaatctcacagacaatctgaaaataataacaataattaccaaaacaacacaaagattgttgtgtctcatcatcatcatcaacaagtggcctcaagtggctcttttaaaccaaaatatagcagagtatagaaggattaatagaaactctaataatctctactaattaataaataaaaccccatttgcccacttcatgtgctatatacaatatgtatatgcctggggtctaatatataattttcatcattattatatatatagagagagaaagactacttttgtacatgggataagatctatagtgtgttaagtgcatggaaagattcaccaaaagggtgtgaagatcttctatggcctattgttgtgcatgtatgatatataggataatagctgaataattaattattcatttgatgctatagattaaataattcttattgttgtagatctgtattggcctatgatttgttttaagaaaatatcttggattatttatttctatttgagaggaacccttttctataatttagattgtgttggatctccttgggagaaaaggttctggctctattattattattact

SEQ ID NO: 29209 - DNA, 6843 bp, Cannabis sativa
tatttattaactagtaaatctgattatattgaaataaggtttatttagggcacaaaacccaacactaagttggactcccaaatagttaagggggaagtttccctcttctgtttgcatcatcttcaagatttcgtctttgtgaaactcatttacaccaccaaaataagccagagacttatttctcgttagttgtaaggcccgtagtttcactaaaagttttaaaagcttcctcaacatgcttggccgaattttcatttcctttacaaaaaataatcaagtcatccacaaatcaaagattcacaagatttaaggacttacaaagagggtgaaactcaaatcctttcaagctagatctctgaattagtaatcttgtcaagtattccatggttagcacaaagagaagcggagacattggattcccttgacgaagacctttctcccctttaaaagacctataggtgcgaccattcatcattagggaataggaaacaccatggaggcaacctaaaacccaatcaatgaacttggccgggaaacaaaggccctttaaaagatcagagataaatctccaatcaacagtgtcatacgccttgctgagattaattttgaagatgcttcgagctgagacattcgtcctggtgtaccattttaaaagatcttgaaagatcaggatattatgagcccgctgcctattcttgataaaggctccctggttatcatgaatcaggctaggaagcacttctgagaaccgagcacaaatcattttagagatacacttgtaaagagtgttgcagcaagcgatcaacctataatcacttgcattcttagggtcatcaattgttaatttgttgttgatttttgttatctgtatattattttttgttgttgttttgatgttatttaaatgttatttttatattacttttatgtaatttttttattgtttttataaaaaaccgtaacaatgtaaaaaaaattatgtaatttttttacaaggtaactcaatatgacattcattacggatgttaaaggtttgtagggcctaaatatgacatccaccaatgagcccaacaggcaagcccagcccaattcgctaaaattgcacgtcttagtatacggtgttttatgcacttacgtagccaaaaaataattaaaagaaaaaaaaaataatctaaaattcatatgtatttgagaatgaaagcccagtagtatagtttctgtttcgataacacaaacacacagtgaagaagaaaccctagattagatacccattttgttattaccttcaccaaaatcaaaccatacaaattttagtcccaattcaaaagacccaacctttgttttttttttttgtcatctcgaccattcttgttgtcttttgtctttttaatttttcttttacatattttagtattttctttctgtttttcgttatttcaggattgagaagaagaaaaaacaggaaaatttggggtttctgttgtctctgaagaatcatgatataaatgagcgtttcctgttgtgttctgggttttttgttctgttgatggtaattgtatttatctgctttctcttctaatggtggcttttctcttatgaaattagggtttcatttctcttatctctattctggttctttatctgttgctggcctgcctcgcgaacattattgtgagtaattcctcattttgacattttatttctcattgttgattacgggtttcattttaggggtgtaggacgaatcccattgttggttttttggttttgccacactaggtcagcagcattgtgtctttgtttaattccttaggtcaaaaatacaagggtttcatttctttaagcttcttgttctaatctggggttttgtggaattgtttggtttagtttcctcctaacgaaaagaaaatggattgaattttttcgttggttatgattttcttaattgggaaaagtaatattgttccgatatgttttgacctgaataataataatagagtaatgtatccatttatcagtaaaatggcggaatcataacttatcttcacatactatgcagaatgaatctttgtgtatttgttttcttataatgatattttctctaaagttggtttttaacaagtcttgtaatttaaatcaggattgaactttgtgttttcaatcttaaaatgtcatcacctcgatcatcgccgtatcagattcttgacaatcgaccgatcgatcagtggaaggttacagagttaaaagaagagcttaagaagagaaaattgataactagaggtttgaaggaggatttggtaaaacgcttggacgaagcagtgcgtactgagaggataagtgctcagaatgacaatgatgataatgatattcaatccagtccagaaccagcagttgtagtgaaaagtgggaaggaaaaggctgttttttctgaaaacgtaggcactgtggatggtagtgggaagaagaccagtaaggtggataagcttcctgttgaggatgacattaataacagtgtaccagacttgggccaaggtaatattgaggaaggatatgttgtagttggtgaggattcctctgcggtggaggagactgtggttagttatgaaactactgtagaaactacagttacggttactgagagtgtggtatctgatgtaacattaagtgagcaagattctgagattcagaaagagaaggggagttttaagtttcagctggagaatgagggttcaaagttccagctggagaatgtggattcaaactctcagctggagaatgtggattcaaagtcccagctggagaatgaggatgcaaaggccgagctggatagtgagcatttaaagccccaggtagagaatgatgactcaaagccccagttagatagtgctggctccaaggccaaggtagagagtaaagactcaaggacccagctggaaatcaacaatacaatgtcacagctggagaatgagtgttccaagcctacatccgaggaattcaagctcgacgttactgctccagaaaaccaggtatctgaggtcagacctaattttgggtctcaagtaaaatatgattctatttctactgattctgtgtctattaatgaaaagattgaacttaaggataacataattgctgataatgtcaaattagaattagatgttattaagccggagatggtggcaccatcatccagcactaatgttcagggcggtggtgactcacatcttatggatgttgaagagccacatgagagcaacacttctgtcgaagagaaggatgacaataatggtactaatgcagatttggggaagaaaaatgataatctagatgtggggtactctgaaaagttaaatttagacagaagttctggagatgattctatggaagaagatgtgctggagagtaaacaaattgattccaagtatagttcggatgatgtgggagataagagtgaaaaaactgaagtttctgatatgaaggaggaaggtcatgtggatattgtgggtgatgatttttctgcagacggaaaggacgttcatgttgagagtgaagagcgtccatctgcacatgctgagaaaagaaagattaatggtgagctttgcttttatttatacacgcacacacaatctaaaacgtggttatctgagtttttcaccttgcttgtatttgaatttgaggtttatatctatcaattcaatatgcaatattcctaagatttttctgtaagctctgttttcttgcagcatgttttcttgttgatgcaactgtcatttatttaagatattagacacttgtataaaattagatacaacaagataagtgtattaaatataaaattattacttacaaattactcatttttttcttttagattctttacattaaaactattttcaaggctaatcctttctcaatgtggtataaagaactcttgtaccatatttatttgtttttacttagctttcttagacctgcaagtatgtgttggaattactgaggttaattcttgcttattactgatgctctcttggttgattcctatttgtggattcatgaagttgtaatttcaacactcgaaacatttccccaagaatttaacagatggtatgattcattaattaggagaagaaattagagtaaacaagtttttatagtcatagaactgcaaatgcattaaaagccttcatagtatgtgtgttatagtgaaagacctttgagacttcagggttgaattatcagtttctgctatcggtagtaaatgaaaattctgcttgttcaatgttttattgggccctgatgttattgcaaatggatctgtatgtggaatccgtgttgccttgtctgattttgtttttaaactcgacctaaacccttttaccttctgtaagaatttgccttgcaatttgtaaggcgatatggtttcttaaaggcaaccttccatcattttcctttttgatatttgtttgtaattttcctatcaagtatttgtggctttcttttttaacgactttgtgccaattttatttttatttcattagtatgaaatgagtataaatataattttcaatagatgttgaataactgttaaagcaaaattttcctttggttctatttctattttatttatttttctaaaaaagtgtttttttttactcaagatgaatcagtcgttggaaacaatgagcctgtgaaaaggcagcggcggtggaatactgatagcttaacaattccggagcctcaaagctctaatattactaccactacacccaaggatgcgtttcaatcctctgctttgaagcgccttgctagagcagattcaatcactagtgaggattcacctaaggaacgtgttggtgagttatatttaatattttgcattgaatttggataatgtaattaaaaaaaattttgggttcattatttgtttgcgttattatgcagtcccaccatcaccaaaatctccaaccacttctctaaggattgatcggtttctgcggcccttcaccttgaaagcagtgcaagagcttttgggcaaaactggcaatgtaaccagtttctggatggatcacattaagacccattgctatgttactgtaagactctttatgcatatatgtgtacttttatgtttagtgtgtgccatggatttattttgttgctcactgaaaaaaagaaaagaaaaaaactcaattcaataaccttggtggtgcagtattcatcagtggaagaagccattgaaacacgcaatgctgtatataacctgcagtggcctccaaatggtgggcggcttctccttgctgaatttgtcgaccctcaggaagtaataactcggttggagactccaccaactcctgtagcttctgctaatgcagctcatgttgcatctcccaaggcaactcctgttccttctatcccattggccgcacagccccagcagtcccctcggcaaactaggcagcagccgcagcttgcacccccgccttccctccctccaccaccacccttgtctaatcctccccaagcaagagaaaggcttcctcttccaccgccaccaccactgccagaaaagcttgaccctccaattgtcacattagatgacctctttcgaaaaaccaaggccactcctcgaatctactacttacctttgtcggaagaacaagtagccacaaaacttgcagctcaagggaaacgtgtgatgcagtagctactgtagactatgttaccgatctctcagatctgcactggggatgctcttgcaggttggctggttggtgtttggtagattgtagtaaggaagtatcatgaagttgcatttttgcaggtctacagatgttgttatagctgttgtaaaggacttaaaggagtgtccttccatggtggatttgtggtattgtggaactgctttgattggagcttaagttgaatttagtgttagaacctgtcgagagctgttttttgtgacacatttggtatacctggttttccttttcgaaccagagtttgttttttcttttttactttggttaaaaattgttagtttaatttgtatttgaagattaatatacattagctctcttaaacgtaggatctgcaactttaaggcacatgccttctgctatctgatgatatgtgctataacatattatactcgtgttttacttttaaccaaatatatttatttttacctgtatttcaaaaaataaataaaaaacaatactggactgaacaaaacaataatatctggacacttatttagttactagcaaaaagttacgtttattaaattttatactagtttttttttatgttatttgaaagtgatataattaaaaattttattaggtgagattattattatatgtatctaaatattatagtgcattatgttggcaattaaaagtgaataccgaatgcaatatattagcatttaagaaaagataatttaaatatgatcttaagttaattcaaaaataaactaaaaattgatgttccaatacttaaagaaatattactaaatggttataagataaaaaaaaaataaaaatcaatctctaaattattgataattgaagatagcatttattaagaaaactaatgatagtcattggtggatttcaatcttcatttatttcgatagagacaatagtgtaatttctgtattttgcacttttcattatagccgggtctgcatataattgaattgtctatatactttttcgttgataaattgaataattccaatctatgccaccaccacattggataataccaatgacaaaatgctaatagattacttgaaagatcagctcctatagtccacttaaatatacttactgcagaatt

SEQ ID NO: 29210 - DNA, 1994 bp, Cannabis sativa
  modified_base (1946)..(1950): a, c, t, g, unknown or other
agtcatcaatcagtaaattaaataggtttgaacaaaattaaaaaaaaaaaataatatacacagtaaaaatataataattgtcgtgtaacagtgaaaaagaaataaaatagaaaaaaatagtatggggtgtaaatttttctatgtttatctatggaattgaattttattattgcatattttatgagtgattaaagaaaattaacaagtgatatcaaaagccacttttggtagattctttgaggatttaaaattaatatttaaaaaatttaagaattttaaaaattagggttttgtttttctatttaagctttttaattgtagtttttgatatttatcttccatatttgttaaaagtaaattttagattatcatgtttatagctttagtaatgtttttattgttgtaattttttatatgcttgtgtcaacgtgtatatatgttcaagttcaaccatgaaataatatgataaaaataaaataaaagttatatgcaactatttcatctgatggctttttttttttttttttttgagatggaatgacccaaaagagagattacaaagggatgggatatgggtcatgaccattccaacaccaagtgttatctaattctaaagccatctgagccaagttgtgtgcacctgtattcccttgtcgaccaatatgatgaagggaaacagcgggaaacgaagataacacctgttgaattgaatttacaatcgctagctcgatagaatgttgtcttgtgcttgaagatcagtgactagatttttacagtcaacttcaacttgatgaatgttaatatgattgtccttacaccatcggagtgcctatagttggaaatgaccattacacttcattctgatgggaggatgtctgagcctgattcctattatgttgttgggattgctggtaaaaggccaaatattcttgagcatcctgctaaatcctgctgggattctcacagtaattcctgataacacacgcattcctactattccaaaacttccacaatatgaaaatgaaaaggttaaaagatttaggtgaaaagttcttctgaatatataaaagtatatctagtatgtgtaagtttcttaaatcattcagagcatgtttaatgggcgtacctgaccacacctttttcatatccttgcaatcaaacaaagcatgttggacagactcagtgaaatggtgacaacgaggacatatgggagagttaagatatttcatgttatagagatttttctgcagtaggtatggagttatgagacagacgatagatgaaatgttttattttaggggggatttaaaggccccaaagggaattccaccagagtctaagagtatcagtactggaagaggagggttgggcagtgtttgtggaggtttttgcaacatgataaccagttttaacagagtaatggcccgagggggtatgctgccaatagtaagagtcaacttgggtattgtcagaggatttcactgataatgtcctgcgggaagtatctgtgaagaaggggaatgttccagtcaccgttagagaggagtaaatcagagacatgggcaaggtgacttgggagggaaatgggaagaaaacgacaattaggaatccaatgatcctcaagaattctagtggtggttcccttaccaattcttttgcagagaccatcttttaggagggattttccccagtgtatactctgccaaacataagaaggggagtggcccaaggaagaatccaaaaaggtagtccgagggaaatatttggccttgaaaagagtagtaaggaggggtgattggtttgtttggattcgccaagcttgcttagccagcatggctttgttaaataacttcagggatctgaaacctaatccccctatgcttttggaattatatagagatttctaacttttccaatgaagtttttattggaaattattttaccannnnnttagatctactcacaagtatgatgtttaaacaccctaaatatga

SEQ ID NO: 29211 - DNA, 1031 bp, Cannabis sativa
ctcaatttactccacttcttgaccgcaatgtgcattaaggagcggtcgctaattaatgaaaacatattagttgtacgtgcaaatttaagtactctatgaataaaattattacaaatatgcaagaagctataaaaacatataatgagtttatgataatacgtgtttgagagatgaaccctaaaataatgataataagttcataaaacatcgggaaaacatttctaagtatcggcttgtctcttgcctctcaagctttgaaacatattttcaaaatctataaaccccacctaatgttaaaagcctctgtaaatatatctttcaagcgtacttaaattataagatattattaattaatatgcttcaactaatgtcacatctacatatagatatattatgtatttcaatatgtgtatagtaatttaaatttttcatagattcgttttaggccaccaaaagagattgtatcctagtgttcaggttccttttagcaacactgaaagaaggcaattaaaagctcaactatttaatcagcattgataaggatcaatatggaactttgaaacaccatgcgcctaaaacaccacgtgtcttccactcattgcaaataaaagctaatcattcaaatcattagctcctaaagtaagcattaataacacatgccattgaagaattaaaacaaacattgcatgggcacataaatttttatccgcatttcacaatttttaagctcacttaatcatattacacagagcccaataaaataaattatgcaaatatatttttactaaaatagtacaacaaaaaataatgagaaaaaattcaaaaaaaaaaaaaaacaataaaaaaaccaattgataactcattataacacttccatttttgctgtcactaaacgaaaaaatcagcaagtttccggtatagcgttgatggtggcgacagaggaggaggacggtggcggtgaagtcacgagaacgttgcaacaatggtggagaatgatggctgctgaattgtgtgctttcaagaggttaatc

SEQ ID NO: 29212 - DNA, 2132 bp, Cannabis sativa
  modified_base (54)..(61): a, c, t, g, unknown or other
tcttatttataactagcccaaattaggacttgatttttttataacaaattagannnnnnnnttgaatagagtattcttagatagaggttctactgtattattattctttatgggaactaagtttgcacaatcactatatgtgttgttctttatcagagtttgtgtgtaatccacacgttactctcggagaccacaccacatattgcattgcactcgggaagagaaactaaaattaccctcactcaaggaattgagtagagggcctattattatttacttggaacagaagcttaatcacttgtaaaaagttgcatgcgggtactagagattggaaggaggagtgtgagattcttaattttctcaactaagctatggaaaggaaagctctttattggaaataacgagcccctatcttgtggcttaaaatggggataaatgtttcaaattcttcattttgactgctgccattagaggaagacgtaatgtcattgaaagtattttggacaggaatgatgtttaggtgactaggcttgacttaattggaaaagaattcactgaattctggagtagaattttttcgagaaatagttcggttcaggtgcccaactttgatggcctcattcaagattaagaccgtctttctatggaggagtaagaagaccttgtcaagcttctgaatgatgatgaaataagaaagactctttttaccatgggaagcaataaagcccctggaccggatgggatgtcagttcgtttttcaagcattactggatctatgcacaagagggttagtcaatttaggcctatttctctctacaatgtcatctctaagatcattgcaaatagaatcaagccaatcttacctagaatgatttgcctcactcaagcagcttttgttcctggccaaaacatacaagataacaatgtgattgtccaagaagttattcactccttcaagaggaaaaaaaggtaaagaagatttcttttccattaagatcgatcttgtgaaggcgtatgataagatgagttggagattcattgattttgttttaaatagttttggggccccaaagatctttcacaaatggatcacacagtgtatctctactaccactcttaatgtttgtctcaatggaggccatgtagagagaactaacccctcttgtggcatctgcaagggtgatcccctatcaccttatctttttatatgggctgtagaaattttttctagacttttagagaaagccctcgatattggagccataaaaggtattagatttagcaagggaggttcgatctattctcatatctttttttgcagatgaccttatccttgtaggaggagccaatttagcagaagctaaagattagtggccttatttggagaattttttgctcctagttaggacaacaagtaaacaagctcaaaccttcatttttttcagcaagaatactttggaagagatgaaaagagggataagagagttccttggtattaatgagtcagatggaaatattaaatatttggggcttctattagggtttatgccctgaaaagcctgtaaagatatttttgattattaataaagagttgaatattttgatatatgcatgaatgttaaattattaatatttattattgaacaatttatattaaatatcaaaaatttctttattaatatatgaggttgtggcttgtagttgtacagagaactaaaaccacttagctatgaataaaaaagtcaacaatatattaaagtatggaatctttaattaatggttgctagtacggttcactaatgtctattcttcggtacaagtaatcttgattcgaattacggatgtagtatgacatcaaagtgaaggtattatatataatagagattatatatgacaaggaccgatataaataaaactatttttattaacatgctgtttactataaagacctaattcatgtcataacggtgatcaatagtagatcgacctaaatcgtgagtaattatgaacgcatgtccatgttattagtttctttgattttctcgttaaattttctcagagaagatgattcttacaacttttattttggaaatctaataatgcggatggatgggaacatgatctacaattat

SEQ ID NO: 29213 - DNA, 2723 bp, Cannabis sativa
cccagatttgatacgaaagcacatacaaagctccatgtttcatttgtttcaaacacagcgttgggtattttttcccatttttcattgtgcctcttctccaattttctcaccaaccaaacaaaaaaaaaaaacacaatatttaaagttttacaagaatcaaatatgactaaatcaaaaacttcagtaattactgtatttattaactgaagcaaaatctcacctcatactcaagattagaccttttctcatcggcggcaatggctttcaaaatcgaaactgaactcgcctgttctctcctggattttactctgaactcaatatccgacgcctcattgacacccttgtcattcaaaccctcaacggaatcaaccgggttctctttaatggacccgatcgacccatcattgggaataaacgtctccagctcctcccctgaatcgatcaccgatgcatacacaccaccaagcccgtcaccctcttcttctttatcatcgaaaccgacgacgaggcttcccagtcgatccgggaaggctttccgggccttctccggaagcttgagtttcttccctttgagcatgacagaaaaaaagttggaatcggaagagttgggttgagcaaacaaagagagagaaagagaagggtttggggtgaatcataactcggttgattcaactcggtatggccttggcgggaaagagaatggtagcggttgaacggcagttggactccacgtgagctaagccaaattcaaaatttcaaaccaactagtcgtcggaagcaagaagcaaagccgttagtggctaaattttgtatcatttcacttgcacttaatgttctaagtttaagttcaaattttaatggtagaactctatgaactactaaatcatgttgatagtataagtgacaatgattagttagaattggttaatagtagtttgttatgtgtttaaactaactgttataaagttagctattctgttatttcagttggtgctctactgagcttgtactataaatatcaccattgtattcatttcaattcattcaatacaataagagaattcttctcattcattcatactttgtttctctcaacctcaacatggtatcaaagctcacggtgcatcaatggcgtcctcctcctccgatgctacagctcattagtctgttgttcccaccaccatgtttgtcccaccccttcaactaaatcgcaacaactattttttctggagatctcaagttcttcctgccatccgtgcccatgatctcgaaggcatactcctcaatgagaatcgtcctcaaccacgaatttgtcaatctctagagtcgacaacaatagtaaacaatcatgaattcaatatatggatgcgcttagatcaatttctcctttcatggttaatgtcaactttttctgaatccatgattggacatgtaattaattgtgctactgcctccgaaatctggaccacacttgagcaaatctttgggactgcatcacgagttagacagattcacctgaagaatcaactctaatccaccaagaaaggctcattggccattaatgaataaattctcaagatgaagaatcttgtagatggtcttcgtgctgctagaaatcagattacagaaaaacaacttaatctttatgttcttgttggccttgggacagaatatgaatctattgttgtgataaacttaaaacgcaagagaaagactcaccttgtagaagttcaattcatgttgccaaaatcatgaaatgcgaattgaagcaaatcatgctcaagccaccattgatttacatggagccacagcaaactatgctcaattcaagaaacctcaatctggccctccaaattcaaatggcagaattggacccgccaactctcgagatcgtggaagaagctcttatggtggacgacaaaacagtggtagtggcagaggttattctaataacaacaaacctgtctcccagctttgtggtcgaactggccacaagtccaaaaatgctacagatgctttgacatatcctacaatagaccagatgagaacaatggcacctcaggtcaaaacccaccccaagctcttactgcttctagtggacaccatgatgatgatgcttggtatctcgatagtggtacttctcaccatgtgatccaagacagtggcaatctccaataacagaccacttacaaaggcaaagaaaatattattgtatgtaatggctcttccctatctatagataacattggtcatagttctttagctgcaagaaaatctctttatcttaaaaatattctccatgttccagccataacaaagaacttaataagcatttctaagtttacccgtgacaataatttcactgttaattcacccctgatttgtgttttgtcaagggcaatcactcgaagacccttccacttcaagatgctcttaaaggtggactgtaccaactcacccctcaactacttcagaaggctcctgcctcctctacctcaagcctactaattgctgtcacaaagaatcattctttgtaccaagctaatactttatttactgaaacttgtaataatggcagtcataaggttgtttcttgctctcaatcaagaaattttcaaattgtaaatttatggcacaatagacttggccaccccaatcaacaagttcttaataaagttcacaattttttaaaaatctctaccattgatatgcctatctatcat

SEQ ID NO: 29214 - DNA, 1979 bp, Cannabis sativa
agtcctacactcctaccataataatccataaatatccttatagtttatatgggtgtattgcgtattttatagtgctcaatactataacaatgtgacatatattacgagtggtgaacaatttttatactgtatcaatattaatttgtattaatagcgatatctaactcttgtgatacttagcatttctgtttatataatataagcctttttcttatacttccactaaatggtaatatggaccaaaaattgagggacaattacacatatttgcctctctttctactctccattaaaaattactttaaatgagatggagtacattatgtcggctacctttattataataataattagttgttattattattcttgtattgtatagttaataaaaacacctttatgtatatgcatttcaaactatactgcatatctactattaacatcgtggtgcatgctctgtttttgcatggtgaatttatagctacatatccaacgatttcctcctacttagttaaattaatagtaaaaattatagtctattaaagaaaaaattatcatcaatttttttttttgaacaaaaaaattatcatcaatttttgtccaaacagctttcccacaaatttactgattctgttcaataaaactatgttggtatcatctaataaactgtttattctgttcaataaactcatcgtacgtatggcgatttactagtgatacatgtaacatgtggtaatcagcatatttctaattctgagtcatatgaaataattagttgtgtaatacacttgaactttagggagggaaaaaaaaaacctgaaatctccatatacttttatttatagagtgtgataaaattttgagtatttataagtatttaaattcttattatttatcgatatttttaaaaccgatttaaagaagagcttaataaattaattaaataaatataaaaatagagatagagagttttatgtagttcgagtgttaattaatcctatttcacgagtcaatctattaagccgaatggcttgaatgtattacaataggatcttacaagcttaagaaccctaccttctttgtcctcacttaggttattctagcttagagaagaagaagcctaagaagatgtgaagtgaattaatcattccccttgcatgaaggtataaataggtatttataggctaggatctagattcagcatacttgtgacccggtagggtttctatgtaaaactaggcttactattggggtaaatacatgaaatacataactttgggcccactagcaagattctggctcatgggacaaaggcttccgtatgtctagggaccacacggtctgggatagatgtcctacatgcgccgcatatatgtactatattgtcaaaggtgtgtcgtgggccataagggaggttttctttttggtggtgcatgcattatcatgctctgattaggggacaagatctgatacggtgggaccaggtgtcagagggtagccacgtcatcctattaggcttctcaggtgcctcttggaataccctctccaaatgcgtcccaatgttcatccggagggcttcgtatattctttctcaagaatactggagaccctttaagattcggatgagcctccttctagaagcgagattttgggctttagaggggctcgggcccatctttcgtctgggctagacttatctttgggaagggctttactccaagtcattccgagttaatcttactttgtaaacgccacgtgtcatctttacgaaaacatgaataatatttacccccgaagcttctggaatttgaagatggcaaaagttcgcagtcttctttctagtttaccatgaacatgtggataatcttgaaaaggaagagaccttttcgccttttatgttttcgaatggagaaggttggggacctttggattacagctagcatcgtacacacaaccttagcttcttagttcgtgaatcc

SEQ ID NO: 29215 - DNA, 1529 bp, Cannabis sativa
attttatatacccatttgcagccaatgaaatggtggccagcaagaagagagacaacagtccaagttttattgcctataagtgcaacagtttcagtatccattacttttacccacacgacagatttagaagcttgggaataactagtttgttcagaaaccaaataagcacttaaaatggtagtacaaaaactaggagaaaacttgacataagagatgaaatttgacatgggatgtgaagtagaaaactcacaaagatagtcttggagatgaggtggacggataattgtccttccaaatttttttgtgatgttggggccacttggagggcctgaaacagccgctggtggtcgcagtatggctgtatgtgaagtggctggaatgcccacttgttcgggcattggtgtaagatgtataggcgctggtgcaacatctttggaaggaacctgtgatgaaccactaggtgaaacgttagtgttagagaaaaaagcatcgataatgtcataagaacatgtatttttaagtggaaaaatatgttcataaaaaatgacatctctagagtgaaatatttgatgagtttcaagatcaagtagagtataagccttcatactagccgagtagccaatgaacgcacaagcccaagatctcaggaaaaatttatgccttgagctgtccaagatggaagcataggcaaggcaaccaaagatacggagattgtcgtaagaaggtaaactgttatacaacaactcaaaagaaaatttaaagtgaagtaaaacagatggtgtgtagttcattaaatatacaacaattgaataaaacaactccaatatcctagagataaacgagattgaaaagcaagagaacgagggacattcaatatatgttgatgctttctttcaaaaatagaattttgttgaggtctttcaacacatgagtgataaggaagaatgcctttggttgtaaagaaagaggacaagttcagttcttttgcattatcacatcgtatccctttaatagagatatgatagtgttgacatcagatttatttttaagcatgtaaactcaagtaaatctagtgtgatcatcaacaatagttaaaaaatatcgataaccttctatgcattgtgccccaaatatgcaaatgaattaagtcaaaagtagtaggagccatgttatcagccgaattgaagggtaaccttttttatttagctaaatgacatacatgataaggaaacaaatatgagtcggaatcattaaaatgaaaaattttattcaaggatttagtaatccgtaaagagggatgtccaaagcataaatgccatttgtgtacttcattacaagacctactagtttgaacaaaattacatgatgaatttttttcttgttagagctaaaagagttgtccaacgcgattagtaatcttaatttgtagattctgattcatgtcctgaatagaacaattagaatgtgagaataatacagaatatttttcattttgaacaatagaggtaaccgacaagaggttaaactaa

SEQ ID NO: 29216 - DNA, 1915 bp, Cannabis sativa
cattcaggtactgctatcaagcattcgattgacatttactgttgggcatctggccaaaaagtgaatgccgaaaagtaagttctttccttttctccgaacatcctgccctcaactcaagctaatctacaacaaatcttacaaatgcctagtcaaccttgtcacgagagatttttaggaccgccttcttattctggaagagacaaaaaggttttatttggggaaatcaaagataaattatgaaatcttatgtcctcttggcatgaacaaatgttttcaatagggggaaaggaagttctgcttaaagcagttgcccaatcgattcccacttatgctatgagttgctttcgcctattaaagtctcttataaatcaaattgaaaagatgatgaacaaattctggtggggctcaaactcaagagtatctggaattaattcgacaacttggaaggcactttgtcaatccaaggtggaaggaggcatgggttttagaagtatcgtccattttatccaggcaatgctcaataagcaagcatggcatatcttctccaatccttcctctcttctcagtcaaattcttaaatagagatacttcaaacatacctccttcctagaggctgatcttggttgctatccatctttatcatggagaggtattgtttgggataaggaacttctatcaaacggtttgcgtcaaaaggttagcaatggtgattctatttgttgtgcttcagacccgtgattacctggtattgcttatttgcaaccacttgtattcagaaatactaatgttaatatgaaagtttctgaattaattaatgaaaattggaaatgagatcttcctcttctaaaatctctgtttttagattttgacgtggagaaaattctatgtataccattaaccatctttgaacaacaagattaacttatttggcatcaggaatctactggaaattactcagtcaaatcaagctataaactggcttctatccttgaagagcatcagccttcagttagtacattatctactacacagtggtggaaaaaattttggggcctttctattccttcaaaggtttgaatttttctttggcgagctatccacgactgtctaccagtagccgacgtccttcacaccaggcacattagtgactctgctatctgtacactatgcggttgtgaaagggagaccactgtacatgccttactttactgcagacgagtcaaatgagtttgggaagcatccaccttttctcttgatgatatcttatacaaacaaatgggtctcaagatgcttttattgtaggtgtttgaggaatggacttctctccaacttgagcaatttgcttgtattctttggggaatttggactgaacgtaataaagaaagacatggatctatgccaataccttttgatgtgttgcttttctttgctatgtcctccttagatgaattctatgctgcaaaattttcatctaaaaaagaatgcactactgcctcttcctcatcaagagcaacacaatcaactcctcattggatgaatccactattgggtaggctgaaactcaatactgatgttgtcattaactcaatgacacacacctctggctttggtgcagtattacgaaactatagcggtaagatcattgctgctatggcgaagccttttcctggttcttttcgtttaaaggtcatggaggcaatgactttgatgtatagtttgcaatggattaaagatctctagttacctattcactatattgagacagattctcttatggtgatgaaaggattgcagtctaatcaagttaatatttttgattttcatagtctgttagcggatatttctcttttagtgtccaatttctctggagttcagatctctcatgcctacttatctactaataatgatgctcatt

SEQ ID NO: 29217 - DNA, 3148 bp, Cannabis sativa
tcaagggagatggccaatgccaaatttttccaactactctagcaaataccacacaacaatggtatttcaagttacctctaggaaagttaaattcatggattcctttctcatctgaattccatgcacaattttcctcctctcatcagcttccctcgtacctagaagacttggtagaagtgaaacaaatcccaggagaacctttaagggcttacattagcaggttcatgactgaaacgaaagttaaggggctgactgaggaaggaaggtttgccgcaatacatggaggtattgagcctctgggagaactgtggaaagatattaagagattaaccgtgggatcaatggcataatttttggacccagaaaatagattcattaaactagaagaggcagtacggcgtgtagatatggtggtacaaaagaaaattagcaacacaccactacagtcgctgcatccacccagaattcacaacatctcagtagttcaaatcaaagtagaaagagattgaacaatggaaatagacagggcaatgggaagaaaagcaagttcagcggctttgagcaacatcctagggagaatgcctcaaatttcactgcctttttggtcctaatagaagacatagaaataatctatgcaactacccagtctatggtgacatacaagaagccctctaccatgaaaaaggacatgagcaagtgagacataaccaagttctgtcattttcatgtagactatgaccatgacacaaatgaatgcaataatttgaagcgaaaaattgaattcctaattagaaaaaataacccgcacctataaaatatgtgaagaccgaccaagaacaaagggctgcccaaacagacactaacccaaaccagttaatgcttccactagtggacgagcatcttcaagttatcattggggccctcaccttgctggagacttgggaaaaattggagaaaagtatgcctgagccttgcaatatgaacaaaacgatgcagtcctggtcgtggaggagagaaaacctaaattaccacatgttgggaaaccaatcataacattcaccaaagctgactctagccacattatttttccacacaatgaccctttggttgttgaggtgcagattgcaaacaaaagggtggcactaaatatggtggacaacagagcttccgcaaatattctattcaagaatacatatgaaaaaatgggagcccaacttaaagatttggttccttgcactcaactcgtctacggattctctagccaaagcgtagcaccacttggaccgattttcctacaactcacagtaggaaaagctctcacaagtataacagtaatggcacagttcttagtaattgatgtccctttggctttcaaagtcacgttgggccgaccaaccctataagactcaaaagttgttacatcagtattccacttgcgcgttaagttcccaactaaaagtggagtgagctatctaaagggaaatcaaaggattgcacgagaatgctacaaccttgctaggtcaaaaaggaaaatacttctaaccagagtttaaagaagggaaaaagcattgcccaataggaattttcccaaggcagagatgaagacatggatccctgacttgaggaaacaaatgcaaatttagggccagtagaaaagttagaagaagtggagatggatccagcaatcccaactaggaagctcaaaattggaaaaggtttgttgcttgaaataaaattagccttaataaaatttctaagagcaaacctagacatttttgcctggtcacatgaggatatagtcggaattgatcccactgccatgtctcatgccctaaatattgatctagacttccatcccatccagtaaaaaaggaggttactggagaatgattatgcataggcactcaaagaagagatagaaaggctccacacaaacaagtttatcattgaagctttccacccagcttgggtgtttaaccccgcactagtacccaagccaaataataaatggcgagtatgtatcgacttcaccaacctcaataaggcgtgtcctaaggattgctttccacataagaatcaatcaacttgtggatgaaatagatgatcacgagatcttaagttttatggacgcctgtaggggtacaactaaataagaatgcatccacctaaccaagaacagacaagcttttgaatagacatgagtctatactgctataaagtaatgccatttggtcttaaaaatgtaggagctacctaccaaaggttagctaacaaaagaccagatcggacgaagcatggaagtatatgtggatgacgtgctcatcaaatcaaagaaggctgagggcatatagaggatcttgatgaattcttcaaaattctcaaaaaatacaatatgaaactcaatctcttaaagtgttccttcaaagtcagctcaggtaaatttcttggattcattgttaatgctcgaggaatagaagccaacctaggtcgaatagccgcactcaacaaatttgttccaaattcaacagacaagtgtgttcccttcttcaacatcctctgaggtaacaagaagtttgaatggacagagaaatgcaaaaattctttccaagaattaaaaaaacaacttgcaaagcctcttgtactctcaaaacctttagacagagaagaattaggaatacatctagcagtcactaaatacactgtaagcatcgtgcttataagaaaagaaaacaatgtacaacatttagattattacatcaacaaaagactagttgaggcagagggtcaataccccctaattaaaaaaataacttactgtctgatcttagccataagaaagttaaggccctatttccaggcccatcctgttcgggtgtataccaaccaacctttacgctaaatttcgtaaaagcccgattcttctggacagctacacaaatgggctatagagttgggtcaatatgaaataatttttcaaccccgcatagtagtaaaagggcaagcttcgacaaactttgtggctaaatgcacgggcaaagaactagagagttcaaaagataaccctgagccagataaaagaccaaaacatgagtccccactagaagaaaataaagacaaacttatttggaaattacatgtagacgaatca

SEQ ID NO: 29218 - DNA, 1329 bp, Cannabis sativa
ttggtatttatgtcattacccgtagtagagctggagttttttttttttttttttttttaaggggcttttctaaacaaaattcctttttttttcatacagtattattattgggtattaatactgcttaatatctctaaatatgctttacgattggttagcgatattctttaaatgttattacaatatttaattgaatcagtagcaataataacacataagaaaatgttaggcacagtaatttttagtatttttctttcatataattaaatgaaatactcgcatgtcatacttatccaatcttttttttttcattcttatatttttcaatttcactagtatgatgtagcggatagagtttatgagatgttgatctctgaatgtgtccaagtataaaatagtacttaaaattcatattaatatattatattattaaatttttaagttcttattaatataatcattgaagtttttcgaatttatacgcatacaatcactaggtgacataagtcagtagagttaatccttttaaacaaagttagcatcttcttttgtccttatttacgtaatatatgatttggtttcgattatttctaatataaaaagtggggtaattgtattataaatatttaagtttaatttgtaattataaataaatatttaattttaatttttgatagtaataataattaagttataattttaaaattatgtgagtaatttggaccaattaaaaattatcacgtggcaatttacttaatatgccaatattattaccgttatttataccgtaaattaccctttatatattttacatattgcaatatagtattttagtgtgtgtttcttttaattgaactgtgaaaaaattatgttttgtactaaaaaaaataataataattatgttaataatttaatgcataaaagttttgatagaaatggtgtatacctctccaaaaccaaattttgataccttatagtcttttcaataatagtcacttgataatttgtattttgaaaaattatactatcctaaatttaaatttaataaataattaaaagtttattaaattgacaaataattaaatttaaatttagaattcataaatgttaaaatataaaatactatataatattattgagaatataatgtacggtagttagataataaaagattttggataaaaaaaaactactataaaatattaatttacttgtaatagattagtaggttctttaaaaatagaattattataggttctttaatacctcagtcttttcaataatttactattagaattatgtaataggtgttttttttgaacaaatata

SEQ ID NO: 29219 - DNA, 1813 bp, Cannabis sativa
accctatttaataagtgttaagtaaattaatgttatagttcttaattggtacaaattattacatttttattttttaattaaatatcattttgatagtaaaagcttacaaaaattttaaaaatataaattaattattattatccttaaaaattaaatttaaatattaattaatcaattatatatataacaaaaatatttaaatttaattaattaattaattaatatccaataaatacagtaatgaattaacaaaataaaaaatgagatgagatgagatcaatgtttggaaattccacatgcaacccacttgatctgatgatgatgatcatctaatcatacatcaaataatccaatccaagggtccatattaaatttagctttacaagtatatatgtgtatgtatatgtgtatatatagatgggccaagattcttggagtgggaggtgggaaaaacaatgtaccaaccaaaattctaagctgttaacatctgtcagaaatcaacaaataataaacaaacaatgattgatattcaccatcattacctttggatcctatcacaaaattttgcttagcctccaaacctatttcgagtaataatatttggataaccattcttttttgtttttccacattaaaaattaaataattagttattgttattatcattacaatgtataattttctttttttttaaaaaaaaaaaaaatgaaaaattgattgtgtgggtgtggtgggggccatatgggtatgaacatcgtaggttgggattatggtcaagagagttgaccagtcaaaaatatgggtcaaagattgaagaagagggcttaaaaagaaaaagagtaataaagtaagttagggcattggaaactacgccaacacacattaaatcggtttgtaaacatatatatggttggtttgtatcttcattgaagaaaggaatctacaaaattttcactctttttctatgtagaagaatctatataataataccatacaaaatatatataatatatgcattatgtttgtatagtttttttttattattaataaataatggaattttgttaatgataactaattaaaataatagcttgtaatctaattaggacatcaagattaaaatcagaaaaatgaatcaaataattaactgtttagctttcatatcgtttgccaaaaaaaattaaaataaaattagatgaaagaaaattacaacatcacaattaaccttaagaacacttatattctgttttatttatcgtttggaagacacaacagtagaaattgttgtagtaaattcattcaacctcgtagtttcttaatcaatataatgtgcaaacggttttcattattaggtccaattcgtatgtcatttttttgtgtattatatatataatgttagacttttatttgaacttacattaacttttattggttttaattattaaaatttgggttgatttgatagtgtaggaattttaaattgtgcttttacaattctgccctacaccaacaaataaactaatcaattttaccaaaggtcaatttcgacctttcactgtccctgacttttcaaagtcagcagagtcaaaacgactccgttttgtctttgaacaaaaccaaagaaggattcaagaaccttctcattcaatccctcactctttgtcttgctcgaaatcctagcagagagtttctcaacgaagctagaccttaaacaacccagaaaaccccagaaatcccagattaaacacaaaccaaagatcagatctagaatgatctgatctatacacaaccacacacacaaaaacagaaagat

SEQ ID NO: 29220 - DNA, 2284 bp, Cannabis sativa
cttttgttgaatttaaagcttttgctgaaaatcaatttgaaaataaaattaaaagtattaaatgtgattggggtggagaatatcaagcatttgaaagtctagtcaaaaccaatggtattcactttcaacactcatgtcctcacacttcagcacaaaatgggagagctgaaaggaagcacagacacattgttgaaatgggtctgacattgcttgctcaagctaacatgccattaaaatattgggttgatgcatttcaaacctctgtatatctgataaatagactcccaactcccattttgcataacaaaactccatttgaaactctgttctgtaagcagccagattataagcaaataaaaacttttggggctgcttgctacccttgtattcgaccctatcaacaacacaaatttcagtttcactcactgaaatgtgtgaatctagggtacaatgaatcctacagaggctacaagtgcttaagcactacaggccgagtctatgtgtctcgaaatgtagtgttcaatgaaagtgagtttcctttccaaacagggttcttgaacacttatgcaccagaaaaacaagtggtcattcaaaatgaatcatggtctcaacttccaaatgttcactttgaacaacatagccaaatatcacagcccacaaccaattctggaccatctcgaggtagttcaactcctacaccagcagcatcttcatcacagcaggttagtgaatcaaattcatcaaatattaatcttgatacacttgatcatggctttattgtacctgaaatcattactgagatatcaggaagtgcagattgcaatttgccacaggaaccaggaattaccctgcagaatgttgcagcagacagaaacagtgctgatgcacaaactgttgcagatcagacatcaaatgttccaccttctcacctggttccttcacatcctatgattacaagagcaaaagcaggaatctataaaccaaagacctacatcagtcaagccaagtggaatcccatctgcactgaacccagtactgttgctgaagctcttcaacacaaaggctggaatatggccatgaatgatgaagttattgccttgaaaagaaacaaaacttggactctggttccctggtccaaggattacaatttagttgggtgcaagtgggtctacagagaaaagatgaatgctgatggaacacatcaaaggttcaaggctcgtttggttgccaaaggttttcatcaaagggcaggtctggactatggtgaaacatttagtccagttgttaaagcttcaacagtcagagttattctaaccattgctgtaacaaaaagctggaaaattaagcaactggatatcaacaatgccttcttgaatggcaagctagaagaagatgtgtatatgtgtcaacccgaaggctatgtggatccagaaaaacctaaccatgtgtgcaaattgcacaaatccttgtatggtctcaaacaagctccaagagcctggtttgacaggctcaagaacactcttcttgaatggagatttcaaaattccaaggcagacacatctttgttcttttacattgacaacaagactatcatttttgttctaatctatgtagatgatatcattgtcacagggaacaatgaaacacatctcagcaactttgttcaaaaacttgataagtgcttcactctcaaagatctaggtgagctgcatttctttcttggcattgaggcatttagagatgagactggcatatatctcactcaaacaaaatacattgaagacttgttaagaaagcataacatgactcacctgaagcctagtccaactcccattacaactgggaagtctctgtcagttacagatgggaaagcaatagacaaccccactgtttacagaagtttaattggggctctgcaatatctgtgtcatactcgaccagatatcagctatgcagtaaattcactcagtcagtttcttaaaagtccaacaaacactcactggaatgcagcaaaaaggattttaagatatctgaaaggaacttgcactcaaggtcttcatatctgctgcagcaacaatctgaacattactggtttctctgatgcagattgggccagtaatgttgatgatagaagatcagttggaggatattgtgtgtatctaggtgaatctttggtgtcatggtcatccaagaagcaagctgtggtttccaggtccagcacagaatccgaatacagggcccttgctcatgtgagtgctgaaataacctggatagagtctctgct

SEQ ID NO: 29221 - DNA, 5018 bp, Cannabis sativa
aaaactataacaatttctatttaggtaaccctaaatggactcgaacctcataacttgcaggagcaaaccacatgcttgatcatttgagctaccctcttaggtcaaatgtgtatttccatgggtcaaaactatcaaaatagttgtaccaaagtaacacataattaagaataaaactactcaaaatgtgtgttgtcattactttaagatcatatccatcaataatacatgaaatctggaattacttatacatggtttttttccccttcctagaagcacgtaaaatgttgggttttcatgagcctatgtttcttaattttgcattttaagataggatacttgaatatttgtgtgatttttttaaggagttttagatttgcaggtgtaggggatctaaggtttagtttgactgaggataagaatagtcaaagaaggcttattttagtccaaaacaaactttcaaccatattattcaaattattcacatgtaggggttagttttataatgaagtccaagcaaagatcttcaaatttccctaatatctaaaaagcataataattgaaggaacttaaataagcccctaacctttccagagattgagctattttgaaaatataaagctatttacatccactaaagtcgtcaagtgatatttaactcaaccaatatcaaaggaaagcacagattcatctaccaaatgcttacctgtgcttatgatactgtgacgagctccacatgataccattttagcattcttcccttccaagcatgaagaatccaaaagcttgggtacagtcttgagaaagtgaaagtgaatgttaaaaaaactctatggtcagtttctacaattccccttctcagaactatatttgacaataaaagtttagacaagaaagagacgccaggccaaattttaagcaccgaacatttaataattaaacaaaattgaaaccagcagagtctctttcagaggaaatactatttttttgggtttgttaattgtcattgacaaactgtttttgacagaaatcaattacgatacatatctcgttctctataataaaaaacaaaggtcttttcttttcttttttttttttttaattttttattttctctttgggtgattttcacaatattctttagcttttgtcgaatatatatggtgcacaactaaacaggcaatcatctagcagcttcataattgaattaccctagaaagttatcaaagaggaaaatgtcatggaacaagttactgtaaatacctcaatttggtcggtgccagttcccaactgtccaaactgattacccccaaaagcatataccagaccctcatcagatacacagagagtatgccatagtcccgcagctaccttttccactcgaacagttgataacgaattcacatatgttggccttaactgatcatatgtaccaccttgaccacactgaatcgaagatgccaatcataaaataagaaataactaacaaaaagtactcatgcatatgaaataaaattcaattataggtatttaactggcccaaatacccatgtctccatgcattaagtgtgatgctatgctggaaataactgtccagtgagttgagtttctaagatgcgtacactatctagaatttggataagtcatgttcccggccatggattttattagggtaccaaaaaaagggaaaagcttttcatccaatgcaggcaataaaatcacattctatgactaaatccaaggagatttacctgtccgtacaggccccagccaaaagtgagcaatgccccagcatctgcaaattagagtttttgttaatggaaaaaaaatatatacacacctaaaatacaaaaagccacccaataaaacagatagcagtctccatctagttcttccagctatttccactcaaagcaagccatgaagaacctaccagttattacagcactgtgccgacctccacaagcaattgccttgataaaacttccgggaactttagaagattgggctgaaaaaatcttgctatcttgtgaaaatgctgaagatctatctttcccaggaagagttgggtcaatgcaaggtatgagatgaggggtagacaccatctttacccgagaacccaagcctagctgtccttcgcctccatagccccaaccccacacctgtcccatatctgaaacttttattaatattatgattcatcatgtctcgccctacatcaaaaatcttccaaagcttcgtacttcatgcaacctacaaaactatatggggagaccacaaagaagacgcaactatcctgaaatacggcctctgctgacccatgagccgtgacattgtggattacctgacaacgctaaagtgtgcctgccaccagcagcaactgtgattatccttattccagcacccagagctacaatactgggtgaaacagcgaagaactcttcactagacatcaagttttcagattcttgtttcgcttgcgtaatttttcttttcttcacaacttcttctccggcctttttattctcatgagaacctgctccagctgtcaaactagagccttgagaccttaagttacctgtaagacattaaagtctcaaacatattagtctcctacaactagctggtattcatgaatgactctctaaaacaattaatgtttcagaaaaacaaaaaaaaaaaaacaaattgaaggagaaatccaccttgttctggtattattgagctttgtttacctactgtatccttctgcaaacatcctacagtagccaaatcacagataattttcccagacggaatgcattctttccagccccatgtgaatacttcacctgtctctgaaaattgagatgaaaccttagaagccaataaatagatctagccattacaaaaataacactgtgccaaataaacattgtccaaaatttcaaatgaaatgcttctcgtatgcaaagcatgcaattgaaaaaatactactaacttaaaaaccaaagattgcctgtaactgaaacgcaatgggcccagccagcagcagctgccttaactaccgaagcctcagttggcaggggaaagggttctggagtttccttaacaaaagcgaaggacataaaatatccaaaatcaattcccacaatttatagttatcaaaaacttgacaaattaaagggtctctaagttaccgaatgcttccctgaagtcagatagatttgagtttcgtcctccacagaaccccacgttataagtttcccattcactaaatccacatacaatcacagttaataaaaacctatgtcaatcaccatcataccggcattattttgaaagagcaacagaacataaaagcgcagtggatcctcataagtcagaaaactacatgaccagcataatgaaagaagtagctgatgaaattttatttgtaagatacaaaaagcatagaacttttactctacccaaacagaggtcatattatatgttagaaacaattcagaacttaaatctagatttcattatgaactttttatataccctttattctaaatttcattggtcttatgaacatatacttttacctttatattttgcttggattagatccaaataactttttatcactgctcattaaagtttgtcgagattcaaggaaaaaataaataaaaagttactcatacctaattaaccatttttataaaaataaaaataaaaaattgcagaaattagaatagagataaagactcaaccagagatagccatggcaaatccacaacctccaccacaaacgtctttccaagaatctccatttccaggtaaccggaccggtaccggagatagtatcggagatttctccggcgaagctccgggtagataaccccacatatacaccataatatcttccttacattcctccatttttacgacttcttctcctccatctacttcattaccattcatctctcgttctgacctcgaattcgcagcagcaccaaaagcttattgttcttctcactctctctaaactccaaagactgaaaatcaaagctttgaaacgaagaagaagctcggatctctatcttctttttctctctagaaaataataattaaaaaaattaaaaaaaaaatgtttttgttggtattttactaaagagaatactttggacgaacaaaaatggggccgagccgaatcaattgcaggcatataacggatgccacatcagatgccacgttggatagtgacacgtggcgacatgttgaccgcacagaaggattatttttgtgaagtcacgagtgagctagaactttcgggaaaaaagaagtgcattacttccccgtaatcaaggctgtcctattgcttgccacctttcatttaattaggacacacttttaaaaaaataaaaatgtgtttcctaattatatgtttttaaattttaaaaatgtagaaaataaaaatgtgtaatatgttttgtaattatttttgttttttaatttaagaatttcttcatatatagctttattagagttaaattttatatttttattactattagagaaaataaattaaattaaaaaaaattagttttttttcttcaaaaatacgggagtcttcttttccaaaaaatttctctttcttgacagaataaaataaagtgagttgctctctattgtaggcaacacttcaccaaacaatcaagtgatggagatctgaaattaatagccaccagagttgtaaaagctttttgtgatctccatgaatgccgactaagaacgattgagggagatctcttagaattttcataccaggacgctttgggttttctttaaaaaaaacaaatctaattttttttgaataaaaaaattgatgttgtttagtgtgtttttcttaattatttgttgttgtttggttgatttacatatatttttactattttttttttatgattttcgaaaatctggaagaaaactacaacattgaatttatgagaaatataaaaagaacaatgagtgtgtgtgttaaaatttcaatacaa

SEQ ID NO: 29222 - DNA, 1361 bp, Cannabis sativa
atttttagtgataatttttagtcacaatataattttttttgtaattaaatgtgatttttaatcacaacaaaaaattatttttgactaaaatatagcattcagatataattgttactaatttaattctactcacaataaatattatgattaaaaacatatttagtcataataaattgtgatttttgtgactaatacatttagccacagaatttttaaccacaacataaaaattataatttataattaattataaatattgttgtgactaaatgtaaaatttgttatagtaagattttatttatttgctggcaaaaatcttatttaaaaagaaggaaagagtgacacaaataaactatgtgagaactttaattcacactatcattgtgtcttattgcaagacaaaaatatttgaagacccttactaaattgtttactaaaacggtatgttgaatatcttttgttgcggggtaaattaaagaacattgttattggtcattagtagtgcctaaaatactttctataagtggtgactcataattagttaacgatattttctaaaagctgttcttttaatttatatgcgatctaatacttaattaatagcggtatgacacctagtaaattctctaaaataataataagtaaatttatttcttataagggcttggcagatttcaaaaatggtgctgctgatattgaattctacatcacatgcatgattcagatactcagccatgtgttttcacatgaaatgagggggctgcaaaagggtctttaaagcctgaccatttgaccgtcaaactcaaatatactataaaatatattttgtgtacgttttacacacattgagccaaacatgtatccaaattataatatatcgtacccttttcttttttgctaagaaaacccttttcattgaagttactcacaacttttttcttgaataaaccattaatacaattatttggatagaaaagtttattatatatgtgtcatgtggcataaaagagagtctttcagtctattaattgagtgtaccatagtcagtttaagtttagaatataatgaaaacagaaatgaaatggccctgaactcgaggtagcttatttatatatatatatattcatatatagtgtatatatagagagagagagagctggttgtgagcagcaaaagcaatggcttatatgtggactgtagtgaggtttattcaactttatgagtgaggtgaccaaccagaagagcttgggatttggactgaaaatgattggtgactgtctctgagattctcagtatgtatgtacaattattattcgatgatgaaggaatcgggcaatttgagagcttctgttagaaatcac

SEQ ID NO: 29223 - DNA, 1265 bp, Cannabis sativa
ataaaataaaataaatgatatgatgataattaactgtcacccgaataccatgtaacgacatgttgtcttgttcgcttacgatgcagtccaaacaacattttgttttggcatttttggaatccatcactgaaatatgtcagttaagcaactttcataagggtattctagtaatatcacgaaaccgttccttgtctgaaaaaatatcttcgccacgtgtcacatatatttggtaaggatctcagttatgagtcccccgagagagtgagagctctctctgagcttctgtggccatgccatggcttcccaatcgctatgtggatggtcaagttcctctccaacctcttctactgtgaacccttcttcttcttcttcgttgtgcagaccgtttatcttctttgcctttcacccaactccgtctaaacgacatcgtttcagtttcagagcttcctttttacgggattcttcttcatcgacccgggctgctactttcaaacagggtggaaggaagtctatacgattcgattgcccgtgctcgagctcgaaatcggacgcgaattcggtaaatcgatccgcaaaacaaacgaaaccaagcctgagtttcaagaccttgtctgcgaagcgatatctctggaggaggatattttttgcgtccaaaaaagttaggagcatcattttgctcaatgtcgtcactcttgtttatggtaatccgtgaattttataattgaattaataatttatgatatagtgagagaattgtgggttttcaactgtaagctgctattttcttctgcatatgacgaattctggcgttcttcttttttgttggatggagaatttggtaatatttttttaatctttggctttgattgcttcgtcacatttgtgctatatctaataggggccatggtttgagaatttaaatgaagtctttcatgctttgatcaaagggtttgcagttgtttgtcttacaatatttcttgggctaccaaaattatgccacatacagtttacaaatgatttgtgtggtcagtggtatggtgttttggcagtgtcacgagttataggaaatgttgaagttttttatgaaataatgtgaaatatgaaatagtttcttacgtaaagggaaattgggaatgaaaatcccttcatttataatactaacgattatgaacttgaattagggtgaatacactatttggatagttgcttcttttgtcattgcctgaccttgctattcatgagcttgtggttgaacattttcattt

SEQ ID NO: 29224 - DNA, 2336 bp, Cannabis sativa
  modified_base (53)..(67): a, c, t, g, unknown or other
tagttttagtcacaacaagtattgtgactaaaaacacatttagtcacagcaannnnnnnnnnnnnnnactaatacttttagccacagactttttagccataacatatgaatgatgatttgtaattagtcacaactatttcacttttagctagaaattttgttgtgactaaaagtaaaaaaaaaaaaaaattgtagcggcgggaacggggacgggaacaagacaaagaaggggcggagaatccctcaataaataaataaagttaaagataaaaatttaaatatataaaaatattaaattacataaaaattaaaatattaattattattcaaaaaaaatacaagaggaagagaagtgattcctcccaaagaacaaaaaaactctatataaattaagatatatataggtaagtattcaatggttacaataaaaatataactatgatagttctatttttttataacctgctacaacatcactaacaggtaaaatttctatttttaaacttaaattaattatatacttaaataaattaatttttaattaaaatctttaataaaaccttttttaaaatttatatttatatattttttatttcaaagaaataaatcaagctagtatgatgttataggtaatttattaattattgctagtaaatttttaaattaattacaactgtctaataatgatccaacgattaaaagtaaatgtaaccatcatggttacatatttaatatgtaaatattgaaacttcttcattaatatatatgtatattgaaaggtgtttaattaatatatatgaataataatttaataatcaattttggtggtataaaagtaagacttgtggcttctcttatcctccacattactacatactttctttctctcttacacaaacacatatagttataataatctctttcttttctatatatctttcatatatattatatataatataatgaagtcaataattgtagtgatgatgatgaccactatggttgttgggtgccttggtagaatggatgtagccatttttatgaatccaactccaaataggtgttacacacctggtgaatattgtgctcacattgaaatcaaagactgttgtgaaggactccattgcgaaggaagtctgttcagtggtacctgtgttccttatgctcattgtctcccaatcggggaggtttgccttgccggaatcagccagtgttgttaccctaaccattgcaagtctaagtttatgagtatcaacggacattgtactgcccccgatactttgcccgattctgaataattaattacgaggacttcctaaaaggtcacctattctagtactaatttatctaataatatattagtactagtgtataatatatatgtttgtcttgtgtgtcaaaataaaataagaggaaattaattaagctaggtttgaattaattaatttcttgttattacatttacacactactaccacaaccttgttagttttgtgtgtgtatgtgtttatgtatgtacttctttattattaataagtttgtatttcctttgcttatataattcctacaccttgttcagttttgtgtctttgtattatatatataaatctatatatatttatatgtttttatttggtataacggcataagtacttaaagttttgagtttgtaaaaagtataaattcaataattttttagcagcatatatttaatatttataaaactataatttttctctaattttgatcaatacaaattctgttttaaatttattaaaaaaaattagaaataactaatactgcgcgttttcttccagacctaatgatctagaatatgtgctctatttttgacaataacaaagtttatactagcaaaactggaggaaaattacacttttacatcattggatatttatgtcactaaaaaaaatcattaaatttatatcgctggaactcaaaattttaagtaattatattactatttacccatatatattattatccattgatacttaacatatcactacacaaatacaagttgtagatatgcttttttaaataataaattttatattaatttatatattttttttttaaatttgaatgcaatattaatattgtttatctaaattttgacgacgatggtgtgtcaagagtagtaacacgtggcatgaaactattgagactaaattaatgaagaacatgtaaagtcatgatcgttaacaatgaaaggtggtcataacgttagaataaaagtcagatggtcacccttacccctagcttgagtaataaggtgggggttattagaatattttatttatggaaattattttcta

SEQ ID NO: 29225 - DNA, 2934 bp, Cannabis sativa
tccacatcgaaaaagccctcagaaaaagatgcaggaccgaatttgacagtacgagggtatgagctcattgatgaggccaagagaaggctcgaaatcatatgcccttcacaagtctcgtgtgcagacatcataaccctagccactcgggactcagttgtccttgctggtggaccaaactatgctgttccaactggcagaagggatggacttatctcaaaccccgatgaagtcaacttgcccggaccagatgaatctatcacttctgcctttgccactttcaaagataatgggatgaccctaaacgaaatggtagctcttctcggtgcacacacagttggatttgctcattgtaatttcttttcagaccgactctcaaattttcaaggcacaggtaaacctgatcccactatggaccctaagctggttaccaagcttaaagcattatgtgctgttgggagtgctccaaaagtatttttggatcaaaatactagtaatgttttcgataatgagttctaccgccaaatacgtttgaaaagaggagttctaaagattgatcaagagcttgcaacagatcctgcctcttctcgttatgtttccactttagcttcgaatccagccttgttctctaaagatttcggcaatgccatgactaagatgggaagaatcgctactgtgggaaaagagggtgagattaggaagaattgtgcagtttttaaccctcgtccaaagagtttaatcagtagtgttgtagacattgttgaggaaattattgagtaggtttccaaaaattatacctcatcaattcgaaagagaagatgaatctcttcatgcctcaagtgaactccctaaagagagattcctctaaaaattgaagtatggtttagtagttgatttacttcatatgaattagttattgttgtcttaatggctttaatattttatgaactaaaataatctccaatataaagctatgcgtagaagtgtttttcaacatacatgaaactatctctctattcatttcttgcaataattgctatcaaatcacaggaataatgttgttaaattgtaatcaaacaacctaaacaatccgctaattagttatactacaaaaattaaaaaggtgcgtggtgtgaaatttttacacaatgggatttgattcaagtacagctccttcagtaattttccaacctgaactggaacaagacatttcgtatctcgtcgtgtaagttctgctgttcgagtcattgtgctcggggtggagaacatcagttaactgtgcggattcttcgatggttgcttccaccacagcccgctgtccatcgagtgacactgttacgctatcaacactcaggtttgtcaaagagtaatcatagaaccaaccgagttgggcaatctcagccgcacgatctgtccatatcttcaacatcccaccatccaaaatctaacataacgttttttaaatgtcagaaacaaatattgcttttccccgcctaagaaagagaaaaaggaatttatatacctctgccaatttctctatacaatgatcaggcccaaaagcttgagatttaatactctgccattttcggactaaaccttcagcagttctcgcatccattttgggtaattcatcaacagtttctttatctcccgatattcctgtacagttaatttgcaattagataatattatgtcataagcagagcattttcaaatggttaagcaataaactacagtaaatcatacctaaactgatagcatcagatgctgtgaccgaaccaagttctttccgaatagtgctgctcctagaaggtatgtacctcaaaccaatcagagtcatcactccaatcaccacaccagcacacatgatcttaatgcttatatccttgatgttgtcagtaattactatcacttcaccggtttcatcagacctttcctgtccatatggttcagggacatgggcagagtcatcttcgagagggtcttcattttctgcagggagaagagagtgattcatctcaccatcaccctcttgatccgttaagctcttgtctttgtgaccgatgggaaacaccttctgcaatgtgtgaagtgcacttgacttcacatgatcgagaactgcagtagcctctgccccgatcctaactatcgctgctgctgcagctaaaggtgacccgttagttccatctagcctttctaaatatctaaggactgtaggatcatcatagtaatctccaagcttgaactgtatatctttagtgtctctaaatctggggaacactacctccattaaccatgtctctaacagcttgcaaagcccggggagatcactgccatcatcatctttagaattctccaagacaaattctacaatagatggatttctgtacggtgaattattactgtctaaacccaaccaagagcgacattcatcaagctctcccaccagcagagagcacagacctctctctagagcgaaatctatctcgcggctttcttttggtgcataaacattcaaagagtttcctaaagttgttaccttagtctgttgtagttgttggaataggttattagcatcttggatgagatgaggttttttagcaacaaatgccctggcaacaagtgcaagtgccactccatacacttcaaaactttcagctgggatattacttggtgtggctgcgaatagatcaacctgtcaaccagaaaacgaaacccaacagttaggaggaattaatgataaaaaatctagagagctaagctacaaaaataaaaataaaacctgctcatctgctgtcatatgtaagaaagcttcattcatgaaattttctcgggagaatccccctgcaattgcagctgctccccctcctccaactgcccacaaaatgttgcgtacaccacggaggccctcttctcttcttgatcggttttcatcat

SEQ ID NO: 29226 - DNA, 1785 bp, Cannabis sativa
tctgagacgggcattatggccacgatatactctccaaataggagaacctagggagcctcttcctcttctccttcaccatcaagagaagtagttgcatagacctcgctctagtcctctacttcttggacttctttttcatcagcgggcatctcagcatcctccctaggatgtttagcatgttccacactagccatttcaaagagtcgggaaaggtttggatcctcaatcgaggtcctcttataagtttacttagttttttccatcaccctacgattgaatgggggattccatttgatgctaatgcctccatccatacccctctccaccgatttggctgaggtaatggtggtgttgcgcgactagcttcgaggactccgatgagtcacttgtaacctcccactcatcaaagcttgaggtcgattaactcttgctctccaaggatgaagatgcatggagtatagggtggcttttgtaaagcaaataaagcatatagttatctatctaatgcttacctctccaaaaattgcttgagttcatctataaaagaaggaaagagaggtaagagtcagacaaagaagtatgaatcctgcaaggaaaaaacatgtctaatgcttcgaccaaacaaattcaaaagcaaaaaaggtaggaaatttcattccaagaaaaaatttctaaaatcgaagatttaagggcaaaggaaggacctagaaagtgctcagagactccgaataatcattttaaagcaattttagcacaaacaattgggaatcgattggaaattgagaatcataaattgtccacattcatttagactagaaattgaaagccctaatttccataatctctaccatcgaagaacagtttcatacaccccaaattatcacggaagcaaattaaaaaataaagtgaataatttaaagaaatggaaaggagaaagaaaacttactcactttttggagattcttgaagaattcatttagatggtttcggtagattgggattcttgcaacaactcttcgaagctttgagagaaaaaaaaaagaaatttggctctgatattctgagagttaaaatgactaaagagtgtcaaagaggcttaaacccctttttataggtgcttagatgggttatagtaattcaaaatttaaattttagctttccccctaataaggatagttaatactcattgaagagtacaaacattaggcacgcaatacctgtaactttcattgcgtgtctcgaggtctaattttcaaggcaagaaattaaatgcccaagatattgaagatacagttgtatcttcacatccttcaatcatatcacatcgaatcaagacagagtatgaagactgaacatgtgccacctatccaaccaactcatcgattgagtacttctgcatgcgagcacatggttcccacacaaacttgggagaaaatattatcccgaattctacatagggtgatgtggcatccagtaaggtgacacgtggagaatattaaaggtctggacgggaaattttccatcaatgatttgactagagaattctatactcaaaaatgataagtttatgccttcggtaggaatcatccgaacagaacctatatgtgattttccgcacaaattctcattattcagtgatattgaatcctgcgaacaagataatgcaactgaacaagatcttcaatgatattttccataaatatattctcatttaataattcaatcaaatccctatttttgtgggattgacacgcaccaacagagattatagaaaactagcttaat

SEQ ID NO: 29227 - DNA, 1818 bp, Cannabis sativa
ttatcattaatatttacaaaacaaacaacacgattacaagaaaaatataaaatattaacaacaacatcatcattccaaaaaataaaaagtcaccccttaaatcacttctagagacttcaaaaatattgtcaaaggacaacttaagctagagccagcagtcaacttagtttgcatatcaaaatagatttgaggagaatgttgcttgaccaaaatagataggttacagaatgctcgaagcctccctgaatctcgagtattccaactgaaaagactcatttttcctagcggggttgttgagcaacacccgcctaaacatcatgagaaacagttgaaggaacaatagcaacatcctcagcttcaactcttgctcttatcagcttatccttgacagagttacgaaagctaacactctgcctggtgaaaggtctcttaacactagaaacattcagaggagactccttgggatgaggaggagcagcggccctaggaaattttgaaggaataacaaacttgcccttgtcaacagtagaggtaacagttgttaccattataggggcagtagatagagtacaattaacagattgggtatcatgcctgacaagattagtagaagtagaagttatcaaagagtcacgagaaaaaatagtttctgacaaaggttgtggtcacaatatcagagctttgggagagatccttaatcaatacagtattggcaatatttggtacaagaaactggttaatggcatcttaaagactctagttgaaagtaacttccctaacatgcattttatcaaaaggagtaaagtttgaaagatcaaagatacaatttttgtagacagatttcgtagggctctaagtatatccttgtatcttagaattggtggaataggagattcatcacactgcttaaggaatttaccacacttattgaatgtatggtcaagcatgccaaataaatagcaatagctttgtataccctcatacaagaatttaagccatttggtgcaagaaagagacttaaaatgcacattcatgccccttcttaatggcttggtgatgtcaaaaaggatcctaactccataaaaggaacaatcgattcataaagggaagagatatggacttcaacaagatcactccctaaaattttagagataaactgagcaagtttagtagacctctttccaaaaggaatgagatgtactttgaacctagagatggacgtatttgacatggaaaggggtaatggtgtgtcaagaccatctagaaatatatcaaaatgtataagattacgatcaatatgccaggactggccctccatgactctcctcatgatgtcaccttcgcacctaaaatgaactagaaacataccagaaataatcaaagaaggtgaataatccaggtatccttcatagcattgaaaagcaagtcaagtttaataatttttggagataaaactttgacaacaaggcagtaggattcagtagaagggtcagatctcatagacatatgatcaaaatcatgaatcaaagcttcttccttagtgaggttgagactaagctcagagttttaggatgaaatagccataacaaaaagcatgccaaaagagaggaataaagagatatagaagaaaaggttgtgaagtgtgaacaaatctaagttactaaacaaccttacatagagaataaacaaaaagtacctagagaggaaatgtctcgtagggatctgcagggatgccaaaacaatccaacctactcctagcccagatattttgattttagactttttgctacttgatgacctcttgggcataaaaataac

SEQ ID NO: 29228 - DNA, 1165 bp, Cannabis sativa
agcatttctatttagttttatatggcatttgttttatcaaaaataactcatattttgtatatcttagaacaaataattaatttgatagttgtaattttttggcttggtccttcttcatatgtgatatttgtgatgcatattatttgtacaaaaataaaattaaaaaaaaacattaataattttaaaattttcacaatttttcaaaatagtacaattaatttttgatatataaatctaaaatggtgttctgcttacattaatttaaatatattatatgagcaaaacagtagagaaggaaaagtcattattaatttattatagtaattacgaagaagatattaaatgaagaaagtccttactacacaaattattttccacattgacatatacgtagtggccgattcaaaattattattattgttgttgtttttctttttgtaacaaataagggtgtacattgttttttttttttttgtttttttttttcataatataatatgctaaaatatattaaaaatttatataaatttgtagttttatagtattaaatatactttatagaaaaaagtaataataaaatgtctcggttcaatagttaagattctaaatacaagtattatttgtgaaagtcatgtcattatctaaaactttccacattgtcatataaacgtgagaatattggctactataataccatgtgagttgcctccttagtattatggaattacattttaattccatattttaattatttttatataataaaaaaatcagaaaattgagtttatatgctcatagagaaagaagatagcgttgaatctggcttaaaagtcaaattggtttgaatttatggttcaataattaagagatttggaatttattattgatcacattagtcaatgaagctatatatataataactatttacgtatgctcctctaattaattatatgtagctcagagatgagctacctattaatagttattgtgattgggagataagttacctcttaattacatatgattagaaaatgaattttccttatgtaaatatagagctctctcaagagcatatgtatcaattcaaggaaatatgagagagagtatttgtttagccaaacttttgatagaaaaaaaatacttagtgagtgtgagtatttttttg

SEQ ID NO: 29229 - DNA, 7779 bp, Cannabis sativa
  modified_base (244)..(247): a, c, t, g, unknown or other
tttcattattgttaacgaatttttgttctaataatttggtgctttcattgagagcttttatttaaaattaaaaactcaaaacacattttcccgacaaatccagactttcacatcatcgaaaaatacttaacccggtgagtcagtcatgaaagaagagatggtgcatcgaccaaaaaaaagagttccagggatcacaaactcaaaatagaccaaaccaaggaaggggtcctactaaaaggaactnnnnaagagatgaccctgaggaagaaattccagaaagaagagattcaaatgcatatgaccccacgaggtatgtcccaatcgtggagttagaaaaccaaaaactctgatgaatacttacagaatctaatagaaggaatgaggagttagaacgagcaatggatgcagccagaacaactccaaatgatgcaccgccaatatctgtccgacgaccacgaggaagaccccacaggttgcaaactagaggggcacaaggacccagtgtcgtagaataggagtcaaataatcccactcattcccaggaataagagaaattcttgttgatgaacatggtccacggaataagggtgccaatacttcgaggcaagcacaaccaaggggtcaatagtcgtctcatagaaatgacgaagatataaatgatcagccacccaatccatctcctcaccatccacgtccaccgtgtggaccaagaagggaagattgggacagtatgtatacttacttgaataaggggcattttgctaacgtgtttgaaaggtgaaggcccgtctgaggagaacctcagggatcaaaaacaaatacaacccaaagtaggtcaagaagtcgggggcgaactcaatcctcgagatcacgtgcatggtaaaatttgtcgcgagatgagagaacaccacaccgtgaatatcaaaacaagcaggaaagtgtaagtaacttgcaaatttaccagtcaaaaagtgtttccccaaattgatcagtgagtaattatgataataaacaaaattgatgtcaaaatgtatgtgattagcctgatttgcgagatcagtggaattaagggcgtcctgacttacgcacgcagataaatataaatgtattagatcttagagagagattaaataaaaatgctccccaagcacgtgaaaagtccaatcaacctgctgataactctattcaacaaagagtcattcaactgaaggatcaattcagaaaatatcaagatggagaatatgaaaagcttctaggatatgattcaaatgatgacccaaaacatttccatcctgacatattgaattcacaattttcgggaggatttaaaaatccacatgtgatactttatgatgggacgatcgactcatcataaaaaaattaacacttataattttctaatgagtattggttgtgattgactagcgatattccttaaaatttattacatttgattatatgagacccaatacttaattagatcaatagcaatattaacacgtaaaaaaatactaaacattattagtgacttttagcatttctcctttctaatttaataatttttactacaagtatagcataatttatgatcattgattttgtaattattattttatctatatttttataaatagtggttgtatgattaatcagagactataaatgctacacgatgctccatatattccctttgtacatatggttgaccataagaagtttaagctttaaaccatcataaattatatttttttttttttttttttgagggaacatcataaattatatttatactattttaattattgcaattcacagcttcaaatatattatgttttcatataaataaataaaaggcttctccgaattttgacatatataaaatcatgctttttgaatttttttagccgttgaaaattcccccttaactattgagattgttaaatttaaggattttcgtctaatttcatttaattttactgtttcagtgattgtttatgtactaaactatgctccccaaagtttgatatataccaaatcatgtccctcaaactttaatatatactaaatcatgtataatttttttactaaaattagataaaagtctttaaatttaacaatctttatagttcagggggaatttttaacaaccaaaaaactttaaagggcatgatttagtacatgtcaaaattcaagttaatttctaccattcatatagcataaagtacattacattattggccatattaagaattatatcaatcatgacagatcatttggcaaagtatcttcatgtgaaatgcaaagtcttacttttatcattatagtattaccacaaatcttatctactaaacaagtgtttatataaacatttaaagaaattgtcaaaattaaaaagaataaacatttaaaaaattgtacaattttctaaaagatgtcagaagtaataaatatcgaaataatataaaaataaaaactcggttacaatacaaaggaagaaaatttaactaattttttagttaaaaaaagaatgaaaaataaggaaaaatgggtatgggggagacatttttggattgagaatgatatgcagatcccatctttgtcttccaacgagaaccccgaagcaccctggaattcctcaaaggtcaaagcttttcttagctgatctgccacagggctttgccggttgccggtcaccggtcacattcctggcggtggagagttaattgttcaattctaaatcttgaatctgattcaacaaacgccattggaaggtgagtttgatcaatgcaggtagttatttgggattgtttggttgatgggaaaaatacagaagaaaaagaaaattgaaatatgggtttatgatatattcgcctttggcactgttaatttaattattgcaactgtttcaaaatctcttcttttgaaggaaaaaagataaaagtgaaatgacgtgaaaaaaagctgaattgttatttcaacttttctgggtcccactttaatcgtgttgcatattcgaaatctgggcacttttccttctctgaattctacattttctcaggaatcaaacaaactacattcatcaccacattgtgttttgttttgctttaatacgtttggatctagaaataaaaaagagaaaaaaaaaaagaatcattttacaatttaacattaatgatctaggtagtggtacaacatttgacttatcgaagactttgacgattgagatggttttgttgaattcaaatgaggtgaaaattaagttacaaaaagaaaacatggaattcaccattgcattttcttaatttattgagttttttttttatgcttttgttgtaatctttgtataaacttctggagatttgcaattagttgtctttttctttaaagctgtagcgagattatacagggccttatgcacatattacacgtacatatataatgatacaaggtagcatttttttttcttcttttcatacagttgtttattactgtttccttttttcctgttccatactaaagctgtagagttgggagtgtaatgattttggaagactagagaaagtggatggaagtacatttgtgaagaaaggtgcaagaagcaggtgttcgatggaggtagacatggattctcgagaattttgtgcaaatggggtatgcatgaaagcaacagaagttgaggtcaagctcgacgaaggaaatattcaggaggcagaatgttcattgagagaagggttatcactcaatttcgaggttgggtttttctttctctgtggatatgttcttgaaatgaacaaaaggcaaaactaaatggatacttgatgattgtggaacctgacaatataatcatctggatacttccattgtgatgaacagttttttttttgttttgttttccttaattttttttatctgtacagttcttagagataatgcttataaactacatggtatttattacaatgatgtttcataacagattatgataatgtacaggaagcaagagctcttctaggaaagttggagtatcaaagaggtaatgtggaaagtgctcttcgtgtgtttgatgggatcgatctccaagctgctatactgcgattacaaccttctcttgctgaaaaaccatcatctaagaagggccgctctcgttccgagtcacagcatgcagtctcgcagcatgctgctagtcttgttttggaagccatatacttaaaagccaagtctcatcaaaagcttggtagattgactggtaggaaattgctttaattaataagattatttggagatcaattgaaaatcttaattgctttttcctgttttttcttctctttcgtgttatattgttttggagctcattgatttatgttttgcagaggctgctcaagaatgcaagagtgtgcttgatgcggtggaaaagatatttcaccaaggcatacctgatgtagaagtggataataagttgcaagagatagtaagtaacgccgtagagctccttcccgagctttggaagcaggctggttgccttcaagaagctattgctgcttatagacgtgccctccttagcccctggaaccttgagaatgactgctgcacaagaattcagaaagcttttgcagtatttctactgtacagtggagtagaggcaactccacccagtttaggtttccagatcgatagctcttatgtgcctaaaaataatttggaagaggcgatactgcttttaatggttcttgtgaagaaatatcaccttggtaagaccaaatgggatccatcagtgatggagcacctaacatttgcattatctgtatgcaaccaatcttcagttttggcaaatcaagttgaagagatcatgcctggtgtgtatcatcgtgttgaccgttggaattctttagctctttgttatagtggagcaggacaaaagaatgttgctttgaatcttttaaggaagtcgctacacaaacatgaacgaccagatgacctcatggccttgttattggccgccaagatctgcagtgaggattctcatctcgctgctgagggaatgggctatgcacagagggcaatcagtattgcacagcaagaggccgagcacttgaagggtgtcggtctccacatgctgggtctttgtctagggaagcacgctaaagtttgctcttctgattttgagaggtctcgaattcagtctgaagcattgaaaacattagatggagcaattgctttcgaacacaagagctcggaattgatttttgacttggcagttcagtatgccgaacatcgtaatctgaatgctgctttgcgatatgcaaaacaatttattgatgaaacagggggctctatgataaaaggttggagattgcttgctctcattttatctgctcaacaaagattttctgaggctgaagtggttacagatgctgctttagatgagactgcaaagtgggatcaaggaccgcttctcaggcttaaagcaaagctaaagatctcgcaatcacttcccatggatgctattgaaacttatcgctatctacttgctttggttcaagctcaaaggaagtcttttggccctttcagaattgatcctcaggttggagtctgaaccttctttttttaatcctcattcacactaaaataagtaacaaacacaatatagttaaagcagtattcttagtgatgaaagggctataatatatcatgcaacattttagaagatttttatttttaatcagacagagctgaattttcttcacatgtaactaaatggaggattagttgttcttttatccttttgtttaatcatttgtatcaattggtgtaatgtgtgaaggcattgaactcataaggaatgatgataagctagcattcgtatattagtagcatagtttaatgagtactcaacttgtttctttgtatatttttcctacctcgttttattcttttttacatattgtatattttccaatcaacctgtcctctaatattctttgctcttcttttgtgtagtggtagaatttcttgatttatagatttattttattcttttttaatgatagattgacgatgatacagtcaacgaaattgaagtatggcatggtttagcaaacttatactctagcctttcacactggaaggatgcagagatatgtttggggaaagccagacaacttaaagagtacactgcagaaacattgcacacagaaggcaagaactctatttttctcatttttttcttcattaaatttcctgagtcatatatatatataaaaatatatagtgctttgctctagtttcctaagattatgtttggaaagaagaatatgactgtgttggatggtacactattttaaatgtgttttagttatgaaattagagaacatattgagctaccaaataattcaccatttttataaacttaggatagtttaattccacccaatccgccatttttgtgtatgattagtgagataaaaattgtaattttgttttcatttttattcctcgtaattttaatgtttgcaaatggttaactcattctgttttttttttcttttattattattattgtttttgaacaaatgcattgctttgttaagtcacccaccaatgtcataccttgtttgatggacctgtatacatgtcactctcaacaaagctttcctcaatgttaggacaattaggcagttaggagttcgttagaactaactgtttaattagttaattgtccttaagcttagctgagttagttaagcttgtcttgatggttctgttattctattactgattgtatataagcttgtaattcacattcaagatcagtaatgaaatactatctttcaatgtctcttttgttcaccctttctctgtctttactctctctttcgttctctctctgtttcttgtaactctctcacaatgttcaatcaaaccacatataatgatctgtgttccctgatatcactcatggcttcttggaaccaatggatttattacaatcattgtgtttgaactccttgtaaaacttaatagaatttcattcattaaaagttgtatgattcaacaccaattattgattaatctgatgtgatatttttctttgtgaatgactaggccttatgtatgaaagacgaggacaaattcaggaagctcttggcacctactgtggtgctcttcttattgaccccagttatgttccttgccggatcttgattggttctcttatgtcaaagatgggatcagacgctttgcctgtggcaagaagcatgctttcagatgcattaaggatagatcctaccaatcgaaatgcttggtataacttgggaatggttcacagagacgatggaagaattgctgatgctacagactgcttccaagcagctgccatgctcgaggaatctgaccccatagaaagcttcagctcaacttgttgactggctttccctgcatattcacggcacaaatttctttaggatacccctacttctctggccatcatatctttaacctttacaaagtgaagtgaggcctaatactcaagattccaattgattttattttccctaatcacaacacaaatcatcagaaggcacaaactgctcaccatattttgggaaatacagattacaaaacactggcaaaacgtagtttatgatggaatactgaaaagaaattaaattatagattatattattttttggggaggctttgagagaaagtcatttaaagggcttatagcaatgtacttgtcaattttgctcagctgtgtaaagtttaattgttatttttttt

SEQ ID NO: 29230 - DNA, 1766 bp, Cannabis sativa
ataaaaaggataatccccttgtgcgagtcttgtacttgagggagactttttttttttttttttgaaaaattaatgcataaatatattaaaacactaaataagttaaacctcgcggtaattacaaattaagttacttaaaatggaagatagatccaccataccaatcacattacagttgaaagttcattttgctacatcataagctgcatagttacaacttctagaaataaacaaaaaactacatctagtcaaaatgttcgagagctttttatattgaattacataattagtaatacccaataaagtggaggaaattcccttcagagtattgatcaccatcttagagtcgctctcaacgatcacaaaagaaagcttcccactagtcgctgattctggggccaacagacaagttacaacttctccaataagcagttagagaaattgaggatattgcttgctacccataaaattgattccttatgattcattgtcaaagccaccacacacattgagtcgctactaattttaacatcacagttgattttgacctaatcgtccaacaaaggagaccacatcgaagtcgtgcaaatcacctgtgagactttctaatcttatgtacattttttctttgaatgactttgtttaaaaatcacaataaaaaggataagtctcataattattaactcgtttttttttttttacttttatttttttctttaagggatcgatcacttttagatataattcagtcttaagccgcttatatcaattaattaagaacaaaaacattaattcaaattccaaaaaaaaatcattacaaattaatgtagctgttatatttaattattattaaatattcattcatgcatgttgtagttatactacaattttttttttattttaagttttttttttttttgaaagtttttcttttatttttattttaagttgaggaagttttctttgttttatttatttatttgtttttttttttgtttggtttgataattaattatgggattaaaaccagaactgtgtcatgattcccaataagcttttcatgaaatcaggcgcattttcttgtgttgaagtcttgaagacacaccaactttacttaattattagaaaatatttaattctttaatatttttaattttttgttaaattttgaaatgaacatttctttaatgtcaatccaaccattccctcctatcccatctatctttcttgacccacttcatctcccttctaggacatctttttcaatattttctatgatttttcattcatcactttcctttatgttttattttttattttatatatttaaattatattttgtaatttttattttttaaaagttacccattagatttcttattttgttaaataatttaaactctatattttttaaaatggtacaaattaatgtcctaatgtgatttttgtcaaaataaatttaaataataataatctaatatatatattactaaactgattatatttttttttacatttgttcgtattaaaattggattcaaattaattatatttaaaaaaaattgataaaaattaaacttcatgtattattttgaactactttaaaaaaaaaataaaaaaaaatgctcttattacatttaacaaggttcaatgggtgatttttgtaaaacataaaatcaaaaataatattttttccatttttatttaataataaaataactttaattttctctcttgatttatatatatataactaacatatacaa

SEQ ID NO: 29231 - DNA, 2598 bp, Cannabis sativa
  modified_base (2544)..(2573): a, c, t, g, unknown or other
acaacacaggcatactatataataatatagttttattcataattatcttattagggttttgctgatccatttcttaaatccagggtattacacagcgagtacaaaatgaagttcaagtcctcctgagactgaactctctaggtcgcactgtctcgacatgtacaatcattcccttagctctaaactcactgttgttcagctttatcctttcccttacctagacatgaaagcaacaactatgagtcaacagactcagtaagaaaagcatataacatactatatgttaacaactcgtatctaggtgcccatacacctattcacaaggcttaatagatgagtaagaacgttttttaactaaggtacgagcgttgtaccacatgcactacgtagcactactgtactagtgttggtagggtttgcaccgtacctcaagtactactaagtgttgcaccacatacactacgtacttaattgtactagtgtttgtaacaccgtattgtacccatggaacatcatacattgtaccaatgcacttagtactgctactgtactagtgttggtagcatacgaatcataaatagcatgcatataatacacatacacatattcatatattaataaattctatgctattcttatctcgcttctaaattcaagtgtatcgatcggcctgaatggaaaatcatgcgttgaatggatgccctatgtcacaattacgcaaatgggtaaaaaacgttctaaaacccttttcaaggatctaaactcaaaactaaatattttcctatcgacaaataacattgaaataccctaaatattgaggaaacaccgaaactaaggctctgaaaattgcccaaactggtaaactgaatttttgggatacttcctagtgacacggttaactggttctacagtaccagaagaaccagttaaccagttcagagcagaattccccaaacattttgaaactcaaccaatttttccccaatctctatcaaactttccaaaatacttgtactaatagcagagaataatttccaagcactaatagcaagaaaagtgcacaaaaactaaaagtgacattattgatctaagcttgagttttcaaactcaaacttgctcaacctcttctcaaaccaacaaaaccatcaataataaactaaagtcaacttaaaacaaactcaaaaatcgaaccaaaatcaaacataaatctgacagtacctaaaaccacatattgcatgctataaccaaccaaagcttaaagaattcaaggaatagaaattacttggggttacctcaaactacctcaaaaattcctacttgaatttaaccaaatatcttattgaattttacaaaaatcaatggcaatctccttgggtcttccttggttggagagagagagaaagagaggatagagtttaggttatctaaatgtcttttgtcctttttctttatatttttaaataactaataatcaaacgtaattgattacaaaaagtttactgagaaacaattctgcacaacccactaaaagacaaaattgcaattttgtccttgcttccaacttaagaaacctataaacctaagtgtaaaatggtccaaaactataagtccgactaaaccccacaatcaaaatacctcaaatattaatcccactaagaaagagagagaaagggaggatagagtttaggttatctaaatgtgttttgtcctttttctttatatttttaaataattaataattaaacttaattgattacaaaaagttggctgagaaaccattctacacaacccactaaaagacaaaattacaattttgtccttgcttccaacttaagcaacctatagacctacaggtaaaattgttcaaaactataatcccgcctaatctcgacaatcgaaagatctcaaatatttatcccactaagaattaagttctaaacttacccatgtgactctaacagccatccatctcattttctatcgtctctacgcaaaaatcattaaaattacatatgtcatatttagcataaataatactcgtagagtttaataaaaatgttagaatttagaaattataactctaatgcccatttttaaaaattgggccgacaataacagaatatcatgtataataataatatcaatatataattaatgctaattgcctttactatccataatctaatcatgcggtcattacaccatggctctgataccaagtgttggatgttattttactatgatctaggtttactaataaatatgttgattatattctataatctaacatcctaaacatatatttcttaaaacaatgaattaaacacatataaagttataaaaaatcttacattggtggcaacagaataatatggctccttccgcttagatatctaactcttttttctttctgttgtagagtattaacaagatttgagtctaaatctccttcgtattagaattcttcacaatcttccacagtatgatggagtattaacttgatatgagtggacaaggtaatattattgttggaaattattttannnnnnnnnnnnnnnnnnnnnnnnnnnnnnttattaacatcctaaataagaactt

SEQ ID NO: 29232 - DNA, 1420 bp, Cannabis sativa
actgcacaacacccctttggaacacttgaactattattactagtcttttttctcaaaagtttctttgcatgaactataatagccataataataataataacgatgatgatgaacaaagagaataagtatattgatgaagagatcacaattgatgaagctatatatatatatatctattttttgtatgtatattatatagatggattttaatatatatatagtttgtagttgtgtgtgtataacgcgtgtatggaaacgagtcacatatgggtccaagtgatgagtcataaagacttagttttgtgtcattcttacttgaaatgtgtaaaatatgaatatagaactacttttataggttgtaaagaatatatataataatgtaattataaagttatgatttttttttttgaagttgggatgggccatcttatctttttgagatttttatagtgatgaattgattgaaacatgtttgtggtagtggggaccagccatgcccataaatatggttagtaataataataatggaacaagtggtacgtactacgtttgtacggttcgtccttatattatctaataatattatagatgagtgtgtgaaccgtacaatatcagtaccttgttttattatattgttaaattattatccctgcatcaaaattagatcatgatgtttactatacagtgttttttcacaatttattttacttcatttagtatcaatatttattaattagtttaccatttaatgaaaaatggtatatatatttttttatgtccaagaaacttctttcgatataaatggttttagtttgttattttttaatagaaaagaagaggaggaagaaaatcgatgatgatgatgatgatggagaagttactcatgacattttatattaaagatttatatatttttttgtttatagtttttttatattataataatcaagtcaagatcaataaattaaacacacatcaaaattggttgtagcaaaatcatataatatatatattttcacaattattaatttatttttgaattccttataataaaaaaaccatgaaatatgtatagctttaaatttcaaacttaagtcaacacatataaagaccttataaaaggaaagtctggatgtaactatagctagctggagtagtataccaatgaaattaatgctagtttatattgaaaatatatatatagtacacatttaggcacgttcataaaataagttaagctcatttcatcaattaatcatatactgatataattttttttttttttttatatatatatatatagtaattagcaaagcagtgcatgtgacaatgttctgtgtagtgttcgacgaaattaataagtacagaatatgaattaagtttattaaacgcgtattgagaggtacgatgtcatgtgtgt

SEQ ID NO: 29233 - DNA, 1578 bp, Cannabis sativa
  modified_base (555)..(557): a, c, t, g, unknown or other
ttggtagctcgatggttccacacaaaagccattgaaaggttaaccacacaaaagcctccacatgtatatctgaattccatattttttgctttatggatattgaactcaacagctatcaaccgttggattaaaggactttaaatatgagctattacatgtatgtgacatgtcacgtgtgaaaacaaaaagtttataaagaagaaatactagttgtacgatgataggtgtttataaaatagttaatctaatttaatttacacaatttaatttaatttaattcgtaaagtataaatatttacatttatataaattgaattggattagaaaatacaaaacaattatgtaaattggatgtttattttatatataattttcttctttacatgtaaaataaaattaaacatttttttatatatacattttttttttgaattattatttgttattttatttattttaattttttgttaaatatataaaataataataatttattttattttattttattattagttatgattaaaaataatatatttttaataaatattaaannntttaatattaaaaagtaatcaatttaaaataattaattcacacttttataaatttgattagattagattatttgaactattatacaaatttaattgaatctgaaatataaaattctcactcagtgcaatagaattatttgaacacccctaaaattgatcggttgccatgggtttactaaaaacttaactttcgttcatagtctgtagtagtgatagtgaactctgaaatatctcatcctttttattattttttctaacatatatataattatttaaaacactaattatacttttttaaaacaaaaaaagcactaattatactaatagataatttcaaatatatataatatatattttttaatttttaaaattaagatgtgatatatatatatgaacaacatcatccaggcacaccagcacacgagaggatatgaatgaagctttttaaaactattaattaaagttgagacaccactcaaaatttgcaaatagggacagtcgcctttttatttacctttttctttctattacttttaaataattatacatgtaaaacataaattgaatgatattctcatgctattcctctctctctctctctcactattcataaataaataaatcttgaaagattttcttttagttattttgcaagaaaaaatctcgatatatagttattacaataattgaataattgattagcaattattatattttatatatattaataattaataatagtgagtggccaagaacaaaaagggtaggaattattgaggtgttatataccatatatacctaccatatttcaaaaactccaataatagcaataataataatcggctataaccagagaaataatggccaccatgtatatgcataggtctatgatcacagcaatggtttttctgatcatcactaatattctcatcaacaggggtaagtaataataatatattagtaataagtatatagtatttattattaataataataataataataataataaatatttggg

SEQ ID NO: 29234 - DNA, 2389 bp, Cannabis sativa
tgtaaaagttactaattagaccctttattttgttaaatgataaaattgaccctatatttttcaaaatggtaaaaataagatcctgaactcaatttttaactaacttaagataatttctaacacgaatagatacaaaaaaaattgcaatttgttttgccataacatctttagatcagattattattaagttttattatggaaaaaaaaatcaacttaaagtcatatttgtacaattttaaaaaatataggatctattttatcattcaacaaaacatagagtcctattaataatttttataaaacacaaataaaatgaagaaaaagaaaatggtagccaatgagagggcaatctagatggagtgagtgtgacatgaaaacaacccataaagatgacaacaaatctgactactgctcattctgtttcgctatttatgaacattttaatatctaaccattatgcattgccatttggctctctcttaaaatcttctctcttcatacaaacaataatatatatatacatggaggttttggtgttacttagactttttgtatgcttttccaccatactcatggcctcctgcaattccacaagctcactttcctcattccctaataataccttcctctttggaactgcttcttcttcatatcaggttagctttcccctgtctttttccaaactaaacaatttttttttttaatatatttgtaatgtttattaataatttaatcgtagtacgaaggagcttatttgagtgatggtaaaggccttagtaactgggatgttttcacacataagaatggttagtgttttctttttggctgtgattattagtgttgttttctagtactaaaaatttataaatggggttttttttaaggtactatcattgatggaactactggagatatcgctgttgatcaataccatctttatgaggtatttttacagaaaaaaaatataatttttcttatgtgttcatgtatattgcagttgtaacttgtgtgtttatataatagtattatgtagttaattatttatgatattttttggaaattaatagaagagaaaggacacagtgaccaggcaatcacttattactcttgtctagatatgaaagatattgcttgacgttgacttaaaaaaaaagtaaactttagtgataagactattgaaactctacagcttgatattattggccctttactttttatttcattaattatttcatttgagaattgggtactattattagtgtttagtgttctttttttttttatattatataaaaatgcttttctttttacttgactaacttattactttgattctgtaatgaaaaacaggaagatttgaatctgatgaattatgttggagtgaatagctaccgtttgtctatatcatgggcaagaattttacccagtatgccttctcatctcacttaactggaaaagcttcagttctgttttacattatagtaacagaatcatagtgattatatataattgtgtactcaattctggaacccagaaggaagatttggactaataaattgggctgggattgattattacaacagactcattgactctcttcaacacagaggttttctctctctctctctctaacttccaataatattggattttgtcatctccagcaacattagttatttacttctggtttttatagggatcgaaccttttgtgactttgactcactacgacattcctcaagagcttgaagaaagatatggagcttggttgagttcacaagtacagtaagttacaacaaaaccttaacattctctctttttacttttgttaagggaatatggttatatttcagagaagatttcaaatactatgcggacatatgttttagaacatttggggacagagtaaagtactgggcgaccttcaatgaacccaatgttgcagtaatcagaggctacagatcagggatttttccaccatgtcgttgctctgcctcctttgggaattgcaccaatggagattctgagaaagaacctttaattgctgctcataatgttatcttgtctcatgcggctgctgttgatttataccgaaccaagtatcaggtcaactctttttttatcgaaaacaatgttcaaataatctgttccaacattattgtaaaaaattttggattatattataactgaaacataccctttaatttaagctctcttctaacttatttacttttataaactggtttgaacactcagaaaatccaagaaggaagcattgggattgttataaatgctttatggtatgagcctttcagcaactcatctgaagacaaactagctgttaatagagctatatctttctatatgaactggtatgagttattgattta

SEQ ID NO: 29235 - DNA, 3202 bp, Cannabis sativa
caagtataatattaaatctataaccagtcagactaaatgattttaatacgccctttcaaaatcgaatgtacatatttgtaacatgtatattagatagtaactcttcgaattgggagaaaaaaagagggtcagtgagtagatcgacaaggttgtgctttgtgttgatgtggagaagtttgagctgaccactttgaactcgttctcaaaaaatgtgacaatcaatgtcaacatattttgtgcgttcatggaagacaggattctcagagatgtggatggcagccttgttattgcaatacataaggacgggtgtcgtgtggttgataccaaagtctttgaggatagctagaagccatatgagctcccaggtagtgttggccatggcatgatactctactttagcagaggagcaagagactgtgttttgtttctttaatttccacgagatgagagtttctcccaagaaaaggtaataacccatgatagatctttgagtgtcgggacaggtgccccaatcgacatcagaaaagaccttaagttggatatcattcccaacaaggctagttttagcataggcgttgagttgaggtgaagagctattgtagaagaagagaccttggccaggtgtgccttttaggtattggaggatacattggacaacttgtagatgaggttgacggggtgctgaaaggaattgattaagccttctgacaataaaggagatgttaggtcgagtgatagtgagataaatgagcttaccaattaagcttctataagaggtggggtcggccaagagaaagttggtgtccttgttgagacgagtgttgggttctgttggagtgaagcggccttggcacctaactaacctgtatcagttaggagttataaggtaaagggtctttcaaaaacaaatatgtctttagtagactggccaattttaaagccaaggaaaaagcatagtggaccgaggtccttgagtttaaatttggagtcaagttacctcttgaatgtatcggcattggtggtattgttgctagctttggcgatgtcatctacataaatcaaaaccacaaggaaagcatcattagtagattgaatgaagaaagagtgattggaaggtgactgtgatacattatcattaattaaatttgagcttagcttcgcatgtcattgtctcgatgcttgtttaacgccatagatacttttatttagtttacaaacgacattaggaggaagttcccctttgtgtttcaacccttgaggaagagacatggaaactttttcatctaagtcagcatgtaagaaggcattgttgatgtccatttgatataattgctaattataattgacaacaaaggcaagaaggactttcaatgtattgaactttacaattggggcaaaggtttcttggtaattgatgcctagttgttgattgtagcctttggctactaagcaatctttgaatcgcttaacctcgtcattggctttgtattttatttaataaacccatttgcaaccaatgaagtggtggccaaggggagagatacattaatctaagttttattggcaagaagtgcctcaatttcattgtccatagctttccaccattgaggcattttttaaaattggagaaaactagtgggttcagagaccgaggggcgcataggatggcgacccataaaatgggtgaaaacttatcataggataaaaagaaaagagagatgcggtgagcagtagaatactcacatatgtaatcctgtaagtgagtggggtgaacaaatttgaattttgaaggaagagcgacactcatcctagctggagccgctacattgtgtgtctcgaatggctgatgatgaacattagaagaagcattagtatagttaaaaaagcatcaatggtcgcactagaacatgtgcttttaacttgaaaaatgtgttcataaaaaataacttgtagagaattaaaaattttattagtcccaagatcgagtaaggtataagctttcatagcagcgtgatatcgaatgaatacacaagctcgtgatcgtgggctgaacttgtgtcgtgagctttccaaggttaatgcatagacaagacaactaaagacccgtaggtggtcataagagggcaacctgttatataacaactcaaaataagattttaattgcaataaagcagaggttgttcagtttattagatacacagttgtatgtataagtccagtatgtttgagataaacaagactggaaggcaagtgctcatataacatttaagatatgttgatgcttgcgctcaactacaaaattttgctgagatctctcaacacaagaatgatatggtgtgataactttggttgaaaagaaagactgtaagtgtagtttctttgcattgtcacatttgatgcctttgatagaggtagaaaattgattcaatataggagcgtaaaattgtggtatgattgtttgagcatcatctttacttttgagcatataaacacaagtgaaccttgtgtggtcatcaacaatagtgagaaaatatctataaccttcagtgctgattctatgaaatggtccccatatatctaaatgtattaaatcaaatggagtagttgccatgttgtaagctgagttaaaaagaagtttcttttgcttagctaagtggcaaacatggcaaagagatataaaagaattgaaataaaaaaattcaatattttattcaatgattttgtaattcgtatagaagggtgtcctaggcgtaaattttatttttggacaacgatacaagtatgagtattaacattagaattacaagtattcttattgaaaacataattacaagaggaagttgagacttgctggaggtaaaaaagatgtccaacacgattagtagtcccaatccgaatattatgagttttgtccttagaaaagtaagcattaagagtaaacaaaactgagtatttgggatcttctataatagcagaaattgatagaaggttatattaaaaatttggaacataaagtatgttagaaaggaaaaatgatcatttaattgcacagttctaaacttatgcacgagtattttaagtccattaggcagtgaaatatgagatgcagccaggattgtacaacaaagaggaaaaacatgttatatcaaaacaaacatggtgggtagccccattatcaactatccatgatacagatttacca

SEQ ID NO: 29236 - DNA, 1334 bp, Cannabis sativa
  modified_base (1284)..(1289): a, c, t, g, unknown or other
ttgagtttgtgatatagtgtccttgccatcagattatccgtttgggttggatggatggagacatttgggagattttttcatccttatgttcttttgttatctttgaatatatgtatttactgtttttctttttctatatatttatgctatttttatttttgtttctctgtaattataaataaggtcatacaaatttttataaagcatattgattttttatcttattttacaatcatatattaaagtatatatatttttttactttgttaatggtttctcttttaaaaatctttataataacttaatattttttatgccttttacgattatttttgtgccttttatgacttttgtatcttttacggcttttgtattattttttatggcttgctctaaattgtttaggatatggcttctacataaatgacctttaaattttaacaaataagtatttcaagtctttctatttatggattgttttatattataatattcattattttactatctttctttcatattatttattttttcattaaagtatgtagtagtagagttttatttattgttgttttgtagatcgattttgtggaggacctacgattacagagactttaccgataagtttaattcaaagattgtctctttcgatacctgttatttgttttttcagatagtatttaagtattacaagccgaaactttggctcttttgctatcaacaaaggaagaatattttttaatgagctgggagcgttgtttgaggatgttatagctttaatgtttaaatttttaagggcaattttgtctcatgtggctctcgatatgatttctgcagctcataatttggcaaagcatatccttcgattaacgattgactatatattaattggtctttaataagattaagagtttgtatatgcaaaatgtttaactttcgggacaacttaagattatatcatgtactctcaaatatgggtactgtagttatacatctcttttgtatttttgatatctatgtatttttgtaattttttatatgaatgcatatgatagttatttaaaatattctataattttttttaaaaaatttaaaatacaaaaggtagatttagttcacacatataaaataaaaaaatttattttcgaaatgttaaattattttgaattttttgaaaaattatatgatttcttatataaatgtgatttatactatcataaataaaagtaataagattaaaacaatttggatatgaaaacaccaacaaatatatatatatatatnnnnnnatactagaagaaagttacgtgcaatgcacgtatacttagttttat

SEQ ID NO: 29237 - DNA, 1296 bp, Cannabis sativa
attttgttcatgatactaagtgctaaccttcacttgaggcaataattcctccggtagagggccacccgagtaacaaataaactcaaggaacacatctgcagcgccaggctcgagtcccgggagaaggatgctttgaactagttcatctgtcacttgggaagtatcatggtagcactgaaaatgcagtcgattagaagcagagcaggcaaagattaacaatgcacaagaaagataaaacataaatagcctgtcatatcttacaatgctagttagcacatgaaatgctattcacattaagtttggtcaactaattttactcacaagaatcatagtacaagttcttatatatagctcaatatttttatatttatatcatgacaagaatcatggagtagtccatgttcttatatatgactcaatatttttacatttaatcaatgtaagacaatgttgtacaataaacatggataaaagatcctgaacaggaatctgtgatgatttgtgcaagaacatgaccaagctcaatcaatggttttgttcatatgaaatgtaggcttcaaacacacctggctgaggatattcctcactgcttctggagtggcaacagttttaaagaaatactgaccaatggctgtatttctgcataaacaacatgtgtcaactgcgaagattaatatgtgatgatctaacacattttatagaggaaggaataaaaaattacaaaccccttttctacctcaacaaattctgaaatgatcttatgaatggtcttgcaaaccatggctgctttttaatatgaagcatcctaagagatatatttagaagcatgattcctttacaaatactcggttccattattgcagcctgaagaccaacaactcctataagaattccaaaacatttcagataaggaaagcataacatgaagcaaagaaaaaacataagtttcagtcttatgagtactgctacaacaagattatagaaacaaagaaacgtaactaagtacatttgtacttcttttttccaactttctttgttcaaaacactttattatttaatagacaggtaatcacctccaatagagttgcaaatgaaaaatgcttcactcttaaccacttctttacagaactcgttaagttgggttccccaagtctcaaacgtgtagaacgaagtgtccccaaattgtcgaggattcggcttttctgaatatccataaccgattagatcaatcgagtataccctatgcgatttcgcaagaacagaaatatttttcctccagtgatcactataaataat

SEQ ID NO: 29238 - DNA, 1892 bp, Cannabis sativa
ttaagccctaaatgtcaatttcgaactaggcttgtatttttacaccctttagtttctctttttataattttggttgaaaaaacagtctctaaaggcccacattgtaagagtggagtgatccatagaggcatttgtaggaaggagaggaaaattattagcctttggattaaaaggaaatcaaggaaaaaagatttactcacatgcatgcttgtattaggatccacgtgcaaccaagatagctccatattgtgccaacaacatattgcatggatcccttgtaggatatgtatttcttaaacatgaattttgtctctttttgaaaaaattgtgcttccaacgcacccaaagaaaaatatgtctaaaagaatagagaatacaagagtccaaaagcacactttgaaagtgtactcgtagacttaggggaaaagtgttaaccccaaaaaattgttgagaaaatatatcaagatcataccaaaggaaaagtgagaaggaagtgtaggaggcacaaggcaggagccctttcagacacgtgtcacaccgcccaaagtgaagagccttgctcctcgtgctggcgcgatgctgggggctcaagcgacacattggccttgtggtgttgcaccgttgaagaccaaagtgacttcgcgttgctgattcttaagtggcatcgtaccacaaacactggagcaacaccatgccccccatattgaagcggcagcgtgatactaatgctcaaggcgccttcgtgccatgccacatcaacttatccagacaaaagtctcattaaggcaaattttcaccatcaaacagttctcaacaaagggaataatgacacacacacctttgcaaggttcactcaagacctcaatgtcttgctttgcactattaatttctttatgcacattctatttcatgaatttttcgacaaaatatactccccaaagtacatagtacaaaaaatactcttgttaatgtataatatatcccattccattttaatattatattatataatttgttatatacaaatattataactaacgtaatctattcattacttgtatctaaaactaaaacccaatgatctatttataaataggctaatccaacctcacccattttattacttattttttatcaataattatgcttaattttggttaatttatatatttattaacattccaacatttttatgacgcattatgaataatttaacatatattcaactaaaaaaatatattttacatttgagaattataaaaaaaaaatgtaagagtatatatttttcataggtcaatatcgtattattttcgggttaggcgtgtcaacccatatattacctgtttaataaacaggttagtagcactacaacaaaaatgacaattttcgtcagttttcaaatgacatttgaactttttctatcaattccaataactgacgtagacatcatagatgcaaacatttattagtttgcatcagtttacaaatgtcgatattaattttgtgtgacggttgagaaacgttaaaaatattgagaaattacacatacaacttgtttgcgtcggttgtagactgacacaaagaaattaaaaatatagccacatattaaacataaataatctccacaaatctcttatttatacacataaataaccacaatagccaattaaattgctaccacaccctggaaaaaaaattaaagagaaagatcggaggagaaaaagagaaagagagatcagaggagaaagagaaataaattacctctgatggcgacgtacgagggcctctggggtggccacggggtggcttcaaggtggttgttggggtttgggctagcacgtgcttcgtgtgtttctgagagaataagaaaagtaaagagagagagagagaga

SEQ ID NO: 29239 - DNA, 2066 bp, Cannabis sativa
ggagaaaagtatcttgataagattgaagttgctgaggctcagcatataccttctgaaaaaactaagagcaatggcctgtctgaggattcggtccccgagcagggggaaaatgatgaaccaaatgatggaaataatgcatctgtcatggttggagctgttactgctgctttaggggcatctgccttactagtgaaccaacaggtaatggttaaatctattagaattatgcatatataaatagtgtcacatgctgaataaagtcattgcttatgtgagatttttaattagctgtacttgtttatttgctttatgctggcaaaaacattaaatgtttgctgttgtgaacatctctttaaagaagagtatttgtttccttcatgtcactatacagatattcggctgacatttttttgtttgtaccatttgttttattctttgattgattagaacgtgcaagaactttttgaatccaatggaaacgatgttaattcatcaaagtcctcaaacatgagtgctggcagtcaaaaggataaggtgtctgaaaaacaccaagggaaccttgtaaccagtctagctgaaaaagccatgtcagttgctagtccagtggtacccacaaaggaagatggtggagtggatcaagaaaggtcttactgcattactagtacattcctgagatatataagcttttccattctttcttcatatttacattaatatgtgtaatgttttgagcaggctggtctcaatgttgggagatttaagtcagagaggtggcattctgaggcttgtaggaaagcttgctttgttatggggtggtatacggggtgccatgagtttgaccaataagcttatttcagtttttcacatagctgagcgtcccttgatccaaaggtgaagtcaatgtctaatgttgcagcaatgttggagaacattattgaagttcatttgaactacctggatttcaagacttacttctttgcccgtattttttgtgtaggattcttgggtttgtgtgtatggttcttgttttatggtcaccagttgttattccactgcttccaactcttgttcagggctggacttcaaaaagccccttaagaattgctgagcttgcttgcgtaattgggctctacgtcgctgttatgatacttgttatgctatggggtaagagaatacgtgggtacgagaatccttttgaacagtatggcctgaattttacatcattggcacaggtatagattggacatattcttcgtatctggccacatttattttttgcaatcatgtgagcttctgatataactacatttctttttctctacataatgattgtctcctgcaaatttgacaagctagtagttataagaaagaagcttgataataggatttaaagtttgcgtcctgtgagaggcaaataattggtggaaccaattatatgctaattttctatatggaaccatttattcatcttctttgctcaaatatagttattccttctgcttgcagattctaaactatttaaaaggcttagctggaggaattatgcttgtattatcaatacaagctgtgaacgtagtacttggctgtgtgagtctctcttggccttattctccatcttcctttgatgtgttgacatgtctcaaagtgtatggtcaaatgcttatgatggttggtaaaggcattgcaacggcaactggtgttgccctagtagaagaattgcttttcaggtcatggttacctgaagaaatcgctgctgatcttggataccatagagcatacataatgtcagggcttgtgttttccttaatacataggtatgcttatttttttgtgcaagtacttatttaaatttcaaaaaattatgggatgttcctacacaaaaaataaattatgagattaaattaaaatgcacaaacatttctcactttcttaacttagtttttcaaaaataattcctcatttgatctcttaaccttaggtttggatatattttagggattatatgcaattttagtacttgtttgtttttagaccgacttagctgttgcttacttaatatcattcta

SEQ ID NO: 29240 - DNA, 2276 bp, Cannabis sativa
  modified_base (2018)..(2023): a, c, t, g, unknown or other
ttctccgactcccctctcacacactctctctcacggtgcacaacatcggccttcttcgaccaccccatgtcagacgggccatagaattgaaccccacgacccaaaaaatcccaaccccaatctgccctcttctctctctccttcgatctttctccaacccccctctgttattttcttgttcaatttgaccccccttcggtgaccccacttgattttttaatttcttgaaaatttataactatttttaaaattaatattacgtggactactaaaaatttgtcatgtgtacaccatgtgagcagtctactgtggcacttaactgtgatttttagacggatgagtaagtacaaagcaaaacagaataggagtttataggtagttttgtcccaaaaaatcgattttcgtagttaagcgttaaaaaaatttaaaattcaagtaatttagccacagatatccctttaattaattattttttttttcaccttttatttcaagattgctcacataaaatttaaagacagtaatatgtatatatatatgtatatatatatataattctagtactctatatgtatatatatatatatgtaattctagtactatacatatataattcttttttagaaaagtatatattatatgtaacttcgtaaatgtgtacatttatttcagtatcaaactataattaatgcaacaattgaaaagtatgacttatataaaaggaaaatttacataaaatattttttttgttaatttttttacattttcacatttaaatatatatttttttaattttttataaaaattatctgaaaacaacaaaacaaaatacacaaaagttacaaaaaattaatgttaaaataaaataaaaataacatataaagaaaaaaaaaaaaactaacagtaaaataataagatagaatataaaatttattaaaaaaaatcctatatcctataaataaaattttaaaaacaattcagtatttcttttattttttttttattgtgtttatttttaaaataatccatatataataatattaaattttgttatgccctttctgaaggctaattatttgatggttagtctgtcgtgattgctcatggcttgctacaatggacaaattttggtcaaacgaacctttttctatcaattaatttgcattaatattagcttctgtgctctgggtgttctttttcatttcagcattgctattacttaccagtgatgctaaccactttcttgatatgtcacgctgtgatttactagcgatattttttaaaagttattatattaaactatgtgggacccgatacttaattaaaccaatagcgatattaacacatatgatggtgctaggcacgactgataccctctaactttctcttttcatttcttccaaggaaataaaaactcataaaatttccacaagttaataaaggttagtttcagtcactcgagtgtcgactattttttttttcccgaaataataaaacttcaaatttactcacatttttctattctagaagtgacgcaaggtatgaatatactttgacatccatatagtgacatatataaaagtatgcacagtactctccggctagtggttcaagttgccttcgtgttcgtaatcgttggtcccacaacattaagagcgagcaagtaaccatttttaatttctccaacataaggttggctggaaaaaaatcacctgttccatatttctgtctcatctatgtcccaacaaattatattttgccaactaatttaaaatgccaattgtacatttaaccaatcaaatattattaactctgtttatttttctcctacttattttctttcttatttaaaataacaaaagtaatcatctccctctttattctagttattagtctacagtgtatattttctaatttgctataagtggtttgatgaagtatgtagagtatgcttagaattttctttttcttaccaggttgaataatctttgttagaaaaataagagttttgatttttnnnnnnaagcttctaaatctgataaaaaataccaagattgaagaataaaaatatgataattcatagcagaaataattaatattgattaatgagatttcaattttagttaaatatagaatatcaatggtcaatccacatgcaaagggataaattatattttggaggggttgatttgtttaatatatatatatatttatataaattagaggaaaacaaaccgactaagggagacttaggctcttaaatgtacagttggcat

SEQ ID NO: 29241 - DNA, 1525 bp, Cannabis sativa
ttttgaaaaaaaaagttttaaaattaaaccaaaaaaatgttatgtttacttaaacaaatctatatttttttgataaaaaacaacatatatttaagtttgctcctttaaaatttagtttttacaaattaaatttttaatattttttttaatatcaaaatgaattttctactaaaaaataaataattttttatatcgcgtaattaattttaaaattttaatttattttttaaatttcttaatcattcaaaatgatttttcttaagatctaaattaaattttttagatttactaaaaaaatgttgaatttttctcatttttattttaaaggggtacgatttgatagttgtcaaagtttatgggacaaagttgctaattgacaaagacatgtcatcatttaaatagaataattggacagaacctaacaaaatgactaaaattctgtaaatgtaatagtaatttaaatagaataattggggtgcaattctattattgtcaagagtaattctaaggtagtgatcatctctctcaatggagttgaatcgagatgggagattgatagctatacgagatcgtaatttttttttttgtggcatgtatattcttcaatattgttcggttttgtaactttttaactcataatgtggtaaaatagactttcactcacaatatgtatgattggttggatgtcgatactatttttacaaactttttttgtaatgaccacaccaagttattataatataactagtataaaagtataatatttaaaaaaaaaaaatcattaaattttttttattaaatttactgagattaattataaaaatataacattttaaaaatattgtgcattttagtcactatttagttaaagatcaacaacacaagcaacattgggcttaagtggtaatgtgtgatatctttaaggcccaagcctaagcatatttcatatcagagcgaattattttgttggggaattttcatttttatgatttttaaagtataagtttgtaaaaacatgactttttttgttaaaaaaaatattttataggaaaattttagaagaatcttaaaaatatgggggcaaaacaggtatctagttacctctttatggtaattggatatccctttagttacttttacatgattttcctacattttttaatttgtttttcaattttcctataaaataacttttttggaaaaaagccatatttttataaaaaaaaaatataaaaatccataaaatttataatttcctcattttttgtacataaagaaattgtgtaaaatgttacaaaaacattctcttgagaactactaaaatataatgataggtaaactaatttttatacattattaatgtgaaaaaaaattgggatattttattaaatatatttttaatttattattgtttaaataatttttttaaaaaaagatatatagtataatttattatttatttaaacaaattacacaaaaacattgcacactgctatgttacaattagtttaaacaaaggttttgt

SEQ ID NO: 29242 - DNA, 2593 bp, Cannabis sativa
gagctttacttactttcccgccattaacagcttccaccgactctttttctaatccttcgaaagaatttaccaagatcccattaagtctcgacagattcggagagtcctccattaatatctgagcgaaaagggtattcgtatccagaagcagagatgggattgacgatttggatatcggtgaaatgcctggaattcgtaagagaccatcttcaaaggggtttgattctgagttggatggttccaaaccagaggccaaggtcgggtagtaggagataaacgaaagcattctagccgaagacgagaaaagaacgtagcttggaagagagaggctttgagcgatggggataagaggggttactaaagtcacgtcgtgtacgagagcagagacaggcgacgaagttgaggatagaagaggacggaggaggtgagctgagcgacgaacggcttcgaagcgtagccaaaaagggtcgttggagttgactgtggcagggtccataggaaggagatgaagctgtaaatgagtgacttgaggaaatgcagagagaaattgagaggtgagtcgagactcggctagagagacagttgggttgatagttatgagtgtgactcggcagtcgtttcggcggaggagcaaggcggcgaaacggaggaaggggacaaggtggcccattccggcattgggaaacagagccacgtgggctgttttggggttgtggatatcatcagaaagagtcgacatggttgggattagaataggaactagcaaggatgaagaagaatctactgatgtagatgaatggttgatcattaattattgagaaatggtaaagggtaagtttgagccattatttgtcattattattagtcagttacaagtcaatatggctagaaagtcacttatctatctatctatctaactagattagtttaattttgagcattgctattagtaacaactactaatgcctagcaccttcttaacatgttaagttacaattggctagcgatacttcttaaaagttattatattaaactacatgacacatgatacttagttggaccaataacaatactgatacataggagagtgctaagcaccactggtgcctttagtatttctctttaatttttctaactacattaaattaattttcaattgtaaataaatatttaaatttaatatttaatggtaataatatttaagttataagtttagaatttttgtaatttctgattgatccaagtcattaaatttttattttttaaaaaaaattagttaaatatactaataaaaaaattacacgtaaataatgacttaatatttaatggccaagtacttcagaattcaagaaatataacttaagtattattactgcgaaaaattaaatttaaatatttatttataattgagaattaaatgacacaaattactctttattttaattgatattattttattaataaaagatttcttttttaattaatacatagatttttttattaatattttaaataatatggaattggaggtagatagttaaacaacaatactacctacctctcattcattaattaataaagttgtgccacctacccatcaccactttaatttaactccagtatttattcaatttaatccgaattattttatttatagtgtatttgattcacactaagagtttgtttgtacatcttttggaaaaactaaaaattaccatttaaaaaagctgtgataaaaatatatttggtaagcagttaaaaaataacttttaaaagaatttttaaaaaaattacagctaaaagttaaagctgctccaatctaacttttgaaaaaagttattttgattaaaagactataataaatttacttgtactaaaatcatattcacttatttattatatattagaaaaataaaaagggataattgcggcaaaagtctccaaaaacttagagtttatacatattaggctccaacctcgaaaattggcggtaatagtcaccaaggtcacttttttgtaagtccgttagtctctctttctaacagatccgttaaatcaaaataaatgacacgtgtcaattttttattagtccaaataataattttaattaaaaaaatttaaattaatataaaaaataaaaaatatatattttaaatcataaaattactttttttttttctttttctttttcttcgtcatcttcttcagacaattcccagccatgaccctcaccccatgcccatctcagccatgaccctcaccaccaaaattcaccaagaaaattcatttccaaaaattaaggtttctaatttttttcttgtaaagtaaaaaagtatctcagatggggaaattattgtctaatctcgaccaacatagcaccaaagccctcaatctcatcgtgcttcaaagatcgacccgttcatcgaagagattgtgatcattgatgctcatgtcactttctacaagttcaatattgagagcaatcaatgagttagtatctcattcctcttttagctcccagttttttgttgagaatttatataacaagcagaaaagaatttttttttttttttttttgtgtgttagatcctta

SEQ ID NO: 29243 - DNA, 1170 bp, Cannabis sativa
  modified_base (26)..(28): a, c, t, g, unknown or other
aaaccaattggcaatgagtggagtannncatgttcttatatatggctcaattctctaccatttattccatgtgggacattgtccacaataacgaccagcatttacatttagaattttatttgaacaattttgtgtctaaattctattatttttgagattttagtataccattgagaaatcctaactcttatttttataggatttcctatttttttcatattgttttattaacaaaaaattttgtacatttttcaaatggtttaaatttcataagattttattagactatttaagatccaaaggttaaaaagaaaaagttttgagtaggttgtatcagaaaaaagattttgggcagattgttatatattgtgacaaataaattagtaaatagaaatttgagtagtattgggttgggttcggctttttgggattttctgtcgcaaaaaaagatgtgttatgtaatcgatgaggatacatgtaaccccactttgcctgctgcatttgctatttatgataatcacacgaagaaaactagctaggccacaatgtcaatgtcaatgtcttgttatatatacgtgtatcgatccttcctacgtatctatatataaatatatatattatattatgtagtacctacctggtatgtacgttctcactgtacccccactttttcttttcttaattctatcatcataattgtgtttaaccatacattgatttttattagtaatcaaatttattttgtgtaagtttgatataatttatatgagatttaggaactaaaaactattgtttataatcttgattgagtcgagccttttgagttatagtgacacttttgaactggtcaggatgactgcaaaggttgatgcacatgctcagccttgtaggccttccgactgttctgaatgtgtcatttgactttggagacttgaatagaagccattggagtaaagaatttgaaagaggaaatttgttaaagctatcactaaaagatattctattttttaagagaaaaggttaactcttgaaaaaactggagggtatcatctcaagtcccatatcaaaagaataagcaagagttgtttttattaactttcctagacattgctgtaacaaagaaagagaagagaaaggtatggaaacagagggaaagagtgaactgttata

SEQ ID NO: 29244 - DNA, 4203 bp, Cannabis sativa
  modified_base (474)..(475): a, c, t, g, unknown or other
ttctcaatatcattacaagtgcctgtaggaaggagaaactcacttatagcataagtaggtaatgattggataatagttttgagtaaaatctctttaccagcacgaaacagaaatttttcattccgattattgatccaagagatgactttattcttgaggaaaccaagattcgaagactttttatgccctataatgttggggaggcctaaataaagacttccttcagtagcttcattcatactgagagcttcacatacttgagatcgagagagaatgctggtattggggctaaagaacaccaaagacttggagagattcacgttttatacacgtatcacatttttattggtacacctaatattattatttaaaaaaacataaacattatttcaaaatttataatattttttaattttttaaatattttatttttataattttacttaattttaaaataatttttaaataataatnntaggtgtaccaatataaacgtgccttgtgcacacttgtgtacaagaatgtacacataagcagtccatagtgatagttaaccggaagacaccataaatttgctaccagtttggagggttttactgttaaatttgcgtttggagggttaaatacaagtgaaacaacagttatgagagtttagctgcctaaaaatcttttattttaatatgtttgtcaaacgatctaagaattaagctgctgattatttgactcatctttctaattctaatcttagtcgtgtctaatatggaagatgtcctaattggattattaaaagcttaaattgctattaataaaattatatgtgctgcttgttttgtagtagtgaatatgaattgtcaccctaattaacaaatgtttttaatttaagcgtttatatattatattgcataacttaaactccaacgtagaatctacaatacactctcctatgccatttaacattttttttaattaatggatcaatgggtttcagtcaaaattaataaatttcttgaaatgtcgtgtacgtaactatcgccaaactaattaattactatattactttggttttttttcgaccacatataaactaaatcatatacatagccatatacacagtcctgtctttaaatttttagaatatataaacatatagttaccaataattagtaataattttctctattacatcagatcatgatcactttatatcttataaattcttaataccaatatccaaatttccaaatcttatctctttaattagagaattaaaattctttttttatatatataattacttattgtagcatttgattaattcatgtgtatttatatatagtagcggaattagcccaataatttagtgagggtgaaaaaatattttttaaaacattaatgaaatatttattttttattgaaaaaatataatttttgtgaaaataaaaatgaaaattataattttataagaatataaataaacatatgtaataaaaaaaaatataaattttaggatgacaaatataaaaatatatagaatatagataaaaaaaattatttttatagaattaaaatataaaatatctaaaaaatttatatacaaaatttatatcaataaaaaattgagtgtgtaaatgacctatatgcccccttattattattattattaatattgttattatttataaaagtattagcattaatttaggatcatattccaacaatatccaactaccaacttatgtatatatgtatattcctcgttattaatttcttgttcaagaatataagataataatttttttatatactaagatgataatttattatattattttacgtacgttgataaaatagtatatatgtgtatagtacatatcatgaataaatctaatgaacgaaaataataaatatatatttattaattcatcatatatatgtggaacaaaataacatttttttttttgacataaaaatacatattaatatcatgaatgaaaatatataataaatatttatatatatcaatatattattatatatatagtcgcgacatgtcatttaaaagaattaatagaaagtactattgttggtcaatcaaaataggaaaccatattataattagattggaataatgaaaagaatatataaatatctatggatatatattttctgatatattaattattacaccaagaattaaatataacaataactataaagtccatgcgtacgtgaggtttgcttaattatcatatatatactgctattcatatcgctaatattgtcaaatatttgaccttatatgctttgatgagcctatttattcaatatatatccaaattattattattattcactttgatttgatacttatttaattttttttagatatgttactgaaataggaataaatttttgcatttatgatattaaaattttattatctaattttttaagggtatttttttttattattattattattatgtaaatattgctgtctatatattagtttagtattgttttagaatagacaataaacttataatctttttacttttattttttggcatttttttttagcctaaaacgttacctctaaaaaatatatatatatccaaattaatacgtgtgtgaaatttgaattctaataaataatatattgttattaggcatgttagcattaattaatgatatcctttaaatattgttatcttaaattattatatgagattgaataattaattacatcaatagcaatataatatcaacgtacttttaaacatttcccttttataatataagaaaagatggcttagtcaaaattgttaaactaagtaaagctttggctggttttaattagtgcactgtttataaactttatatatgatatgatagcatatgtaaacattaaagcaatttaattaaggaaatagactagctattatatatatagtcaccactacatactagctagtcaattttagtctaggcttttatttaatttactttattctttttgtttttttagtgtgtattttgttttatatttgaaagttaattaaggaacattattagctagtgcactttttatgtgggattacatattataatttatagttgttgagttgaaaataaaattattggttcactggcgccctcatcatcttgttcacatatgtacgtactagctagtttaatttggatcccatgtacacatagataaattgtacttgtttaatttgattttacatatttagagcaacttgtgccaacaaactccttaatattaaaatcttagcgcaaataattaactttaaaattcattttttagcggtaaaattcttaaaattagtgttttgttagtaattgagctttttttttatttattttcatttgttagatgacatgctagttaaatcatgtagacatagtatatatacatgacacaattttattggtccacttaatttaattatttaaatattataaaattatctaaaaaaatatatttatttactttttttttactaaataattaaaagaataaaaataaactgaaacaaaaaaaaaattgtaaaattcctaacaaaatagcatcccgcatgagttttctcttcttctccttccttttcctattcaaatcccatcacaccatttttctctccagatcgcaccaccaccacctctgcaatccttcccagctccgatgtgctagctcgagagagagcagccaccctacatcgttggagctctacctaaattagcgaacacatgcatcaaaccccatgatataagcacgttacgtcgttaaagctcctcctaaaccagcattgccctccactcccccaaaccttattctccagacaaaaatcatcacaccaatataagcaacaaacaaaaaaatcatcacgaaaaaaaaagatcaacgatttagtataaaattactaaaaaagaaaactcttagtttgagaatgtacttctgatcagtactgacgagagaaagataatgtaacgtccctgcttcaagcatctattgggcccttacacccataaaataatggctcttatacacagggtcggccctgagataaaaaaggccatagggaaaaaaatttgggcccttactataaaaatagtatttttaacaattattaaaaaaaaatatgtatattttttaaaatattttttttatttgggctccta

SEQ ID NO: 29245 - DNA, 2586 bp, Cannabis sativa
  modified_base (2389)..(2390): a, c, t, g, unknown or other
aatttggtcttttagtgacactatttagtgacccgcactttttgtgcgtgtcactaaagagttaggggtaatttttagtgacatgcacaattagactctaaataatcagtgttagtctcatgtaatgtgtgtcactaaaaatatggagtgtcactaaagaataacattcaaaattttctaatttttttattttaaaaaatactggtctatagtgacacgccaggtgcgattggatagatgtatgctgacccacctggcgcgtcactatatcataatcctattttttttaaaaaaaatatatatatataattataaggaaataaaataaataaaatatatatataagttatatattagataaccaatacacctttcaacaaaaataaaacttagtttattaattatacatattttttttaaaataaaaaaattatctcagcaagaaaaaaatttaaaaatattattaactaaatatataaatgagaaaaattaaaccctaatttcttccctaactctctctcttccgcctctctctctctcttccgcctctctctcttccccttttctctttgttatacgcagtgtgcactgtgtttgagagagaatatacacgacttcctttcattcttctttgtattgtttactttccattgtgaatgtgaatctcactcaaccatttcattttcagataaattggttatttgccgtaaaactcaattttatctttattttatatacacattccctcatacattccctctttgttatacaactattttcttttttctatgcccagatgcgcctctctctctgcccagatgtgttcctatttttgatatctctattttcttttttctttttactgtttatctcttcctcttctatggagggatctcgaaatccatggtcaatggcgtttgaagctcgtccaatctcttcctctcggctgcttttaccccatcgatagcttctccttcgtccaatcgctcaaggtctcctttcgtgtccctcgcctcccttggtatattttttttcgagctaaatctctccctctatctctgattttttcaggaggactatgtttgcaggtcgtagtggatctcactgttcaaagtcgtccgtggtttacggtggtagagtttgttgatctcgtcatttaaacgctagcagctctgggttcttggtctaaggtggcgggcttcgtggatctcgacattcgaaccggtgattttaggctagtcgtctatggtggctatagggtttctgtttgtaatttcatttttcagatttctaattttattttattttatttctggatgtgttaatagtcatttttggctttgtttttaattattataaatttttggtgttgtattgaataatatttatgttatattgattcaaaagattattttttgttcaatatactttatttctttttttctgtaaattttatttttggttattgaatgtaaatgtatatacactttttaagtttttttttttttttatatatatatatctgtttaaaaaaagttttttttacatgaaaattaaaataaaacaaatttgatatataagtatattaattattaaaataaataaataaatattaaaataaaaaaataaaattttatatcaaagaaattattaaaataaattaatgaattggtatagtgactttttttgtgtgtcactatatctctaaaaatataaataaaaaagaaaaaaaaaagatatagtgacacttcatatgtgtggctgttacctttttagtctgacaaaacctgactctatacgcatatagtgacgcgcaaaaagtgagtgtaaaaggattcagtgacacgtgtgaaatgtcactaaaaaatgtttttccagtcaccttcattagtgacgcgcgttgaagtgtcactaatgacttttagagttactcaatgtgtgtcactaaaacccatttttctagtagtgaatgatgattgaagattcaaaagcctatgttatgaagtgtggcagatgctagagattttcaaagataccacgagctccacccaactagttaacacagatgcaaagtctgtggccctgtgcaatttgagggatttacctgatcggacaattacccaaaggtaaaggcggagtgcagtatgcagtggtaacagttgattactttactaagtggactgaagctgaaccattcgcaaccattacataaaagaaagttcaagactttattgtgaagaatataatatgtcggtgcggactaccgtaccaaatagtctcagataatggcaagcaattcgatagccaatccttcacttatttctgtgcgaaccatggtatcataaaaagtttctccgcactcgcgcatcctcaagcaaatggtcaagtnnaagcagtcaacaaaaccttgaaggttacactgaagaaaaaacttgaagatgctaaacgaaactggcgagaagagcttcctgaagttctatggtcatatcgcacaactgagaaaatgacaacttgacagacaccattcgtaatggcgtatggttatgaagctatactgcccgtcgaactcgagccaccttcccacag

SEQ ID NO: 29246 - DNA, 1441 bp, Cannabis sativa
  modified_base (1200)..(1201): a, c, t, g, unknown or other
ttacgtatcaatttgtgtaattaagtattgggtcttatataatttaaaagaaatgctaaaagacaccaataatgcctagcaccttgctatcttgctatgtgaatatcgctattggttcaactaaatatcgagtaccatataatttaatataatagcttttagagagtatcgctaaccaatcacaacgcgacatgtcgagaaagtgctaggcaccacaagtacttaatagcaatactcataatttaatataataactattagaaagtattaccaaccaattataaagtgacacatataaaaatactaagcacaataccccataacaatactcaaataaatgtcattaagtcttaatcaaaccgatttttgggagtcacgtaagtggtttaagaaggtacacgtatgcatataagcaaccaagatgaatggtcaatacaagtccctccaccaataataaccaaacaaataataatcaaacaaattggtcgttgtgatgatgtgattttgaaaggggactttatttttgtttttatctttttatccaacaaatgggactttatattctattattttcattttgtctaaatatatatattttctaaattgttcccacccttttttaatttaattaaaaatatataccttacttaataaaaatatgtgccataatttatataaattatgggatatcaattaatatgatggtcattttaatgcgacataattataatatattttataaagtgaaaggaacatcaatatgccattggccataaactaaagtaatatcctaaagtgtcacatttttgatgatgtcatcttcatgacaaagtagctatagtggccccatactgcattgtaaatttgtaatgaaatttttcataattactcatttcatccaattgaattgaaatttaattgcatgtaatctttggtcatcatctataattaaatatctaattttataatttaatataataatttttataaaatatcatcagttagttttaaatatcaccttataataatattttattttaatttattagtttgatgaattccttcaaattataattaagactttcttttcaaaaaatgatcatacataagagatcaagtcatataatacgtggggtgtcatgaaacacagtagtagtatactgtacaatataatcttaagttttacatattttaatttannaaataatataaaaaattattaatagttaaaaatatatcacattaatcaatatagtattcaataccttaatcataagagatacgtgttttatcaattagtagtcttccaacatatataataggaatatatatatagtgaataataataaaagtaataaatattattttagatattgtgttttccaaaagtttctaattgaatcatttattttattaaatgacaaaataagttttgtatttt

SEQ ID NO: 29247 - DNA, 1386 bp, Cannabis sativa
atgctctgcggttagacgatgagctatcttagttcgagaaagtttcagcgccggtggcggacgtctgcgtcgtaaattcataagtgattctaatcactttgtcaaaaaaaaaaaaaaaatacatatacttcgacatataaattgtactacgaccttttaatttaagttatgtattatttataatattatttaatttttataacatttaaaatatatatatataacctaacataacactaaacatacattatctagtttaaaatatatagataaaaaaaattgtttgcaagtggctccgtactagcctaccacatatttatcataatggaaatgtcaagttaattggaggatggagcagcatcacctgaacaaacaacagcttcagtacttgacgatgactgaaattgacgaatatgagtcatcttgctctacccaaaataaaattatactaataaataataattaaaacttacatattcagtacttataatttataaagatctctttcttttccttattttaactaataataaaatatatttagagatataataatttattgatgcatgtgaaggagaaataaatatgatgatagatgaaaaataataaataaaaaagtaaagagagagaaagagtgaaattttggtaatgtattttattagagtaacctattagaatgttggactacttggaaagaggttagaaaaaaaggaagaaaaaaacaataatttgacaactaaagaagaaaacagtcttattttgaattaaaggagacactcttttagcagctattggtggtagtgtggactaaaaaagcaaaatactatgtaaagaccttagcattaatggaaagaaaatattatctaattattttgacacttgtaaccaatcagaatttttttaatttttatttaaaaaataaaagaaatcttttttaaggcgatgctgcctccacgtgtaaaattattttttatcttcattattaccaaataaaaaataaataaaagccgatccttaccataaattaaatcatttcttcaaatatgctttgattaaacaaaaaagggttcttcaaaaatcaaatatcagattcaagacgtttttaaccaaaaaacaaacaaaacccatcatcttcgaacttgttggagccgattactggggattttatactctatgattatgaaaaatacagttatccactcctattccgccacgtgtcggaacccaaaaagcctctttctttctctctctctctatatttggaatcaaaaaaatcaccggctatctttctcactggcgccctttctagtactctccttctctctttcactctctctccttctatttagtcttctttaagtattagatcgatcgatcgatcgagaa

SEQ ID NO: 29248 - DNA, 1184 bp, Cannabis sativa
tggatgtcagtgaatgtaggttgctaggttttgaatttcataattcttacattatcagagcacccaacttttttattcttgttctttttccagtccggatttaattgaattttgaattgttttcctttggcagggaaaagatcttctggaaattaattatcccgttggtccttttggtaccaaggtgagtgtgatgtgatgtataattgattgtaaagtgcttttgattttgacgtgggttgttggttggttttgatgttgaattttggtttttggctcttggtttggtgttcagatcttttagtatatgtaatacgaataatgtgtcctttacttgaatgttgttttggatttcaaaagtaaacatgactttaatcattattgcttgatcttaaggtaactctaggatagtatcgagtacagtttcaatttcaatgttattccccatgctgatttatgcatcgtctaagtttactaggtgttgtttcattattcgatcaatctattatctatctattttctatttaatctcctctgtatttcaaatgtgaaatcctatcaccgcactattatatttgtataatttggcgactttgaatctatatttatttgtaaccttatttcgattgcagttctactgttcaaacatggtaaaatcattttatctttgattcaattttaagatacaaggaacaacctagtggtttctattagtttaacatttagaaacaacctagtggtttctagtatttcctttacatgctggaatatgaatattttgctgctgtggtcttataaacgagtttcaagtctctgtttccaagtaactttcgataatattttcttctgtctcttgtacctgcaggaagctcctgccattgtcaagtcttattatgacaagagaatagttggttgcccaggaggtgaagggggtgagtggcacacttggttgttttaatgtgtttgtgtgtacttccacgtaacttattcaatttaagagaaatgatatcaggtgatttctctaaattcgtagttgtgatttctgtcatttattattatacagaggatgagcatgatatagtctggttttggctggagaagggcaagtcacatgaatgtccagtttgcacacagtatttcgaggtaacaatttaaagcctttcttctactctctctctctctct

SEQ ID NO: 29249 - DNA, 1297 bp, Cannabis sativa
tgctgacgtggcatatcggtatttgtgcaaataaatttgttgaaggtatttttacaaataaaatcaattttaggtataatattgaaaaaaccccaattatatattgcaacatcagttgacattcacactaaggtcctaaacctaacaaaattcaagcattgcatgaacttaataggtatgtgaaatggaggttaacaaatgctagaatgagataggatccttaggaataaacacttagttttatgggtttagaagttcctaattggatgaaggtggaatttattggaattaaatccaactaaaaatattttaaataaaaaaaaaaatagttacaaccaaatcttacttgcactaccaagaacctaacaaactaattacaacagaatccacactatacaaaacaactaacaaaaagaattaaaagttggaggctcgatcttatacatgcatgccatctcagcaatctgcaccaacctcctccaaacaacttctcctctagaattagaagctccttattcaaattttgagttgatctaattttttgagagaatcctataattactttgagtctcaagataggaattcagagttgagaaaaagtaaaaaaagtgagttacaagtaaaagaaagagagcgttgagagaaagtacaaagagaagaaagagcatgtagtgtttcgagtcttaccagttgctctatagttggaagctccattgtttatactgaaacttggattgaattagtgcaagggcaaattcattcatgaggcaagttcaaagatgaagtatcccatcaacttagggggaacctctatatattcttgtgtttgattttttatcttcttctccttctagcatttgcataattcatcaccattcacactattaattttgcttcgcatgctaacatagatctactttcttgttgataagaatagaaccaaatttggttttgtttatttgttcatgtgtgaatttaaagatatacttagttatttttcagaccaaacatttgtttgttaaaatatcaaaattggccttgtgatatgtttttgtgtagggttattctcgaaattttccaacctaaataaataactaaagttgaaaaagtaatgtggtattttgggtataaatatattaaaaatttttataaataaaattatatatatatttaagcaatgcgcggtaaaaatctctttatgttttaatttttatacacttaacttccttattttttttgtggcaaaacccccttaagtttatttttctttaccaatttgatacgtcagttaaatatt

SEQ ID NO: 29250 - DNA, 7020 bp, Cannabis sativa
  modified_base (1697)..(1704): a, c, t, g, unknown or other
  modified_base (1731)..(1738): a, c, t, g, unknown or other
  modified_base (4522)..(4522): a, c, t, g, unknown or other
  modified_base (5174)..(5176): a, c, t, g, unknown or other
caatttgacacttcaaacaacgagcctgaatattaatccttgatagctggtttgaagatagctgaagtgttaaaaatcaagaatctagtgtgttacagtgattcacagttaattataaatcaagttttaggcgaataccaggcaattggtttaaaaatggcaaaatacttagagaaggtttggaagaacttcaaaaagtttgattattttaaaatcgaacaaattccaagagaacaaaactctaatgtcgatgccttggcaaaactggccttgcaaaatgaacttgatagcttgaatttggtaccagtggaagtgttaagcaaaccaagtatatgtgaaaagcaagaagttgagatgattgacagctcgcctacatggatgacacccatagttaattatcttctcaacggacaacttccaacagacaaaaacgaggcacgaaaacttttgtattcagtgtcttgctacacgatagtagaaggcaatttatatcgaatgggttattcaatgcctctcctatggtgtgttctccccacagaatcaagagagataatcaaagaaatctacaaaggcttttgtggagaccatgcaggttggcaaagcttgtcaaacaaaataattcgacaaggatattactggccaactatagatcaagacacacacgaatttgtcaaaaagtgcaataagtgtcaaatatttttacatatacctcgcgtaccaccaacataactaagaatgatgacctcaccatacccatttgcaatatgggggattgattcgactggggcactcctcacagggcgaggaggagcaaagtacgtagtggtagctgtcaactccttttcaaagtggatagaggttgaacctctagtttccataacttgcaagaaagttctcaattttgtcgtcaagaacataatttgcagattcagaatgcccattaagatagtatttgataatggaactcagtttgatggtgagttattcactgagttttgcgagaggaacaagatcattaagagcttctcatcagtctccaggcctcaagtaaatgggcacgtagaagctgttaataaaaccttcaaggatactatcaaaaagaagttgtacactgcaaaagggagatggttagatgaactaccacaagcactttggactcatagaacgattgagaaaacaacaatagggcatactctgttctcgctggcatttggctcagaagcaatgctaccagtagaagtcaatattgcgacccacagatgagatttctgtaatcgggaagaaaactaagaactcttgaaattgtccttggatctacttaaagaaaaacgtactgagtcgcaaattactaatgcagcaaatcaacaccgagttacaagattttcaataagaaaatgaagaaaaggcttttgaatgtcggtgatttggtgctaaggcgagtatttgcaaacacgagagatacatttataagagtatttgacccaaactgggaaggtccttatgtgatcgaggcaatagttggaaccagggtttagaaattagctccgtttaaaggctcgctaataaaaaaccactggaatattgagcatttgcgacactactaccagcaaactcacaaaaatgttgtaatctctttttctctgatgtaatttttaaatttcagttattattaataaagttgaagtatttttcaagtnnnnnnnnagttttattctttaaaattacttgagnnnnnnnnatatgtgtatgatcaactgtaatttatctggaaatacataatatattgcaaacccactctatttttaaaattttaaagttttcgtctatgaacaatgtaaagtcaaaaattgaattttctgctagaaaggaaagtcaaaagtggcagttgtaaatgagatttaactcataaaaacaacactaagctacatgcaaagctgaatatctaatgactcacattttataggaatgtgttatgaacgaggcaccaagatgccttgaaaagataatgcttaacctaaggtatgaatagaaggcctaactatttatatcagcaataaaaaatgtacaaagtaattcacaagatgaaatattaatctaaagtatgtttaagttagcataaagcaaattataactatttacgcgaagtagaactaataaactgctcgtgaatagaatacatggcagacgataactgctcgcatgcatagtagattattaactacttaagcaatatcgaaggaaaaacgagatcaatggaaatgcttagttagaatattttaagtttgatcaaagtataattgtttaagttgtgaataaaaatgcaaacaagcaaatatattaagttcaaatgtaaagatgcgaggcaataaataaaagataaaataaaaagcaaagttggccatccaacaatacaaatttgtctttacaatagaaaatgccacaaggggcaaaccattgtctcggtcatatggccattttcctaaataataaaaaaaaaattaaaaaccaagcctacattgtaggagacttggatagatcttcttgttccaccttgacctcttcatcctcaccaagttcttctcccctagttttctcgcatagcgcaagcatagcatccaccccttcactaaaaaagctaaagtccatatcagggttggtcgaccaggtctgataaatggttctcctggtgatactgctgaacctgtctttggtttcagcctccatctctttgagttttttgtcatggtcagcctggagggacttgagagactcctcaagctccttgatcttcttttgttcagccagacgttacttttcagcctcttcgtttatgcaagaaacctcggcctcagagtcattgcacttttttggctaaagtgtccctatgctccctggtctggcaaagctcagtctcgagcatttcagcccactgagacggcctatgatgaatagcaaaggaaagaagagatgcctgcaagaaggaagcatattaaaagaagtaaagatgataaaatgaggaaaagtgagaacaaggagaaaaggaaattaatgtgatgcaaatgttcgtaactccttttgataagatccttagagctgcctcgcgtgagaagctcctagtcgccagaaccaagagtgaggaagttatgccaaccgttggtagcatgcggcgagcagacttgcgagccttcagttttggcttcaaggggtaggggataggagggctcgagaagaaccatctctgaatgagaaccaaagaacttcacttgttgcattgacccagtgggttgttcattggcactcaccacagctaggacctccttctctagagattttgctggctggatggtgagttggcctgatgatttcttcttgttggttgtggttttggccctcttgggtttcatagtagaacccgaagcctcaacaacttgggcaactctcttcttagacttcttgtcgactgggggaggactcttgaacatgttctccaaatctagatccatatttgcgaggtgagacaagtacattagtacataagaaaaataaataagggaaaatggggagtaaactcccacttgagaaagttaccgtaatttttaaaaggtgacgagggaggactataatattcactaaattccctagatcttgtgatcataaatatgtcgtaagggtttagaggacctaaatcccaacttgaatctatatgacccgatctatccaacatagtcccatattgctcggcaatcccatagtaggaactagtacagctaatttgaacgtggaattccgggtaccaactatcgaacctatgtgttatgcgatctatgagaaaaggattccatgtgtaaaaattgtattgactatctcggaaagatactagggtatcacgtttggccctaagcactgtaggtgaccacccacattgattacctcgggatgcgccttcttcagcttctcgaggggcagttctctagagataatgtgcgcgagccacgtagtccacgctctctttgtcggctggaattgggaccttttaccacgaagaatacttgagtactttgtagtcacaagtaaattcatccgaggcaagaaggcaacattcttcagattaatctcgttacataagaagtctgccgatctcaaaccaaacagaagattcaacaagattctgtgacgctcggctatctcaggagtaggaactggtctttgaggaaccactgtaaacagataaaagtttaataagcgacctcaaaaatgcaaaataatatatttcaaggttaagtttctatgaaagagaacttacatataatgtgaaatgcggttgtatttattagagggagactcgtcttccaaaagaagtattctttaaactctatcttatttggtaacctaactatgatcatgtgctcattcgtgtgggtgtcgagatagtaaaagcctgtagctcgattacttgtaggaaccgtcttaactgagtaaaaatagactatctccaatggagtagggcactcccatcctaaantattgtataggaccttcaagctcgcgaggatcctaaatgagatgggggtcagctggatgagggcagccctgagatagttccagatttccttaaagtaatccctaagggaaagaaccgttccagccttgatgtgctcgaggctccaagcaccaatgcccaaggaattgctcgtgctaggtccactgtactcctcacaaattaccatttcagaaggaaaacaaatgaattcccctgagccatgaaccttatgatacaaccctttctctacttgatatcgcaggactttagtatgccgccaacgtaagccccaattgacctaaccttggattcgatgagtttagcctcaaaggtgacactaggatcctgtggggtctttgatttacgaggcttaggagacataatgtcgaactcaaggtcacctggctcaaaagcaacactaactttaggtaaaagtattggtctcgcgagtggaatagaagataatattgtaggttctggccaagctgcgtctcttaaaaaacgatgtttgccctcagaaatctcttgtagaaatcgcctataacgtctggcaacttctttctggttcgacataatcaaatggtctctaattttggcatcgtttatctccaatttggaccgaggttggaaattnnngggtttgaatgggagggctaattgcttaggatattctgttttcaaggactctgaagaataaacttctgagccagattgggacatttttacaaaaaagaacaattccaattcctgaatgaaatttattaaaccagaggagtaaagaatatgataaacctaaatttatatcatgcctaaaccctaaaaattacccaaaaaacttaagctagaaccgctaaaacaaaatgaagtggcaagatgctaactataaaaatagtgatcgaaaaccaagaataaaaaagaagaacagagaagaatgggttacttactgtttgaagtcgagtagctgtgtgatgaaaagtcctgcaaccgaagacatagtgaacggtgtgatgaactttttggactcttgaggtcgaaaaacagatccgaggaaattcccagaaagtatgtcaaagaaaaggagggcatgcaaagtttcaggaaatcgagatggggatttctcaaaaaaacttgagtttctaaaaaggtaaaattggtggaaaaatagattccttatcgttttatactttgaaattagttaccgtaggatcaaaagtgttaagaagatccaatgattaaaaatgggagagaagtggaaaagatagctcattaatgccaatgatgtgcctcgaaaccacaaaattgccaaaattaaaggcatgcatattttcaaattggattatgacagaaatacccacggtaatcatttaaaaagaatttttatttaaaaaaaagacttttaaggggcaattgttatacccaaaattcgattgtacttcagaaagtgacatgtgtcaatctcaaggaatatgaatcaacaaatatgatgataattatatcattaatggaatgactcattaaatatagaataaatagagtatgctcgtaacttgatggttgtatagtcttaagcgagacaaggatgtacaaactatcaatttccgtattgacgagaaaccgttttgcattagaaggcgtaatcccgagggagacatagacaatgcatagcgaggcatctacctcgttgtatgtaaagaggtattgacaaggcgaattggtcattagaacacttagcgtatagtatagattataataactaagtgtaataacttgaaggacatgattgtctagtctgcaaggccttatggtcaaagagcagttcttaagtttgctcaatacactggtgctcatgccattgctggaatataagtaaactaagtcagtcacttatgtactaggcgagacacctcagcgaggtacatttggcagcgtttcctaattcacgtcagcgttgaccaccttaaagacagtttaaatcacagctatgtgattttctaaaattaattgtacgtatttaagtggagcataattaaagcccacaattttgggaaatattgttttggaatttgaacttaaatgtaattaactaccaacctatattactatcaatatggatagattatacaaaaaaagggatgaaaaaccttagagagaaaaaggaatgtatatagaaatatctaaataagatagactcgtggactatggagagttaactgcaaaaccacgtaaaaacctggtgttattgtttcaattattcttctaaaatctctcatagtttttgtgtctactgtattatgaaaataggctcataattattaacgaaaatttgcgttaacatctactaattcccataaaaaatcaagcagtcattacaaggatgatcgtgaaaatgctaccttttatcgaaattacttattaagcgactagaggaaacactttctggttggtaactttaaaagttggtgatgttttcttgttcattt

SEQ ID NO: 29251 - DNA, 3334 bp, Cannabis sativa
tatatatatatttcaaaatgttaattaattagaaacctacctacatacttatcattatcatgttcttaattttcgcccaatctctttcacattctcttatctcttagagtagctccaatgctagttgttcatgaaccctttgtcagtctaagaaaagtaatattgattgcttgaccactaaagaaattaaattgtgtgggctactacaattactacatgtcaagcaatggtagttgaattatttttttataatttttctatcaaaaatgagtattaatataatatttaaaatattaaaagtaatttaataatatattaaataatatagtgtgggtccattctcttgacttttaaaattgcttagcattagagtaattttaagagtaaagtggtcaaaaataatgcgaatgaaacaaaaaataaatataatattttaagataatgtggaaattgttagctattttttaaaatgcttgcattaaagttgctcttatggaccacacaaaataaataaataaaaattaatattattattacttttgctgatatggcataattatgactagcagaactaagatgtcaaaaattttaaataattaaacaattactaatgacaaaatttacacatcaagaacaacaatgagataaaataggggcaaacacatagtataaaaccagaaacataataaatgtaaaaaataaaaaattaacaccgaataatatactggttcaagtcctatagatcgatgtgatttatagctctactcctgtcttggaacaccattgaaatccttctttattgattgagcaataataggtaccatacagtcgagacgagattctctattaaattctcactaagagtttcaactctcacacttacacccaagaatcttcttcatctacagaagatttttcttacaaaactcaaacccaatctctctcttttctctgcaactctcaatcttttgtctctcaaagtcgcaatcccaatctgaatcgtgtcttcaattcatgtgttctatctttttttttcaaaaaaattaactagtcaacatggtatttatagtcttaagatcaagatcctaaagtcagtagctgtaagaagcgaggttgttaagttagttagaaacaactaacttaaccaactctttagtgaattctctacgtcagcttaagtattaacacccccgagaacatgtatgagcttctagacttgcggatcaaggacacttgccgatgatgcttggatagcatatagtctactggagccgactatctagatctaccattccaggaaggacaactagccaactggaactcctttctagaggagggctagctatcctgaagactgaacccgaagtggacatgatagatatccggaaactcccttccagactcaactatcattttacaagactcctttcgggactggcatccgtgagcgaataactttctaggaatgacatttgtggagacctttttatttgaaagaactatacaggagatgcagatatcagttcatagtacaccaattatttggtgtgataatcttggagcagcatctttagctgctaatcccgttcatcatgcacgcaccaagcacattgagatagatgttcattttgttcgtgatatggtgctgcagaaacttattgacattcgctatgttcctactgctgaacagatagctgatgtcttaattaagggactttcagtagctcgatttctcagatttaaagacaagcttcaagtggttgattccccttttcgcttgagggaaaatgttgagaaaccgttagaagatggtttaacctctaactgtcagagtcagagtctattagaaagttagagtttctgttacaagttgttgtattgttagaaccatttacagcagtatctttactctataaatagcttgtaatctgagtctttgatcaataagaaaagagctccattcaatccaaattttctctctgttttctctgttttattctatctataatctagattttattttgcaaacttgatgtgttatgaaaaagaaaagaaatcatattccttgtagcttttgtaactgtattaagtggtagagatttatgggaaaaaacccatcaattttaccaaaccaatatatatatatatatatatgtgtggaagaaaagcagtgagattatgctatgtgtgagtgatatgctattggttcaaccatatttatagtcactaagcttttctatgaatagtggtgttttaactaattagttaacaaattaataaaacagaggaatgtgattttttttgtttttggtcttagcatttacttgactaattttcatttggtgagaacgacatgttctgtatttgtcatttattttatacagtataagaagaaattaattatcaatagatatagaaattatatgccacaaatataatgcatgtaccattaattcaacaatctcatacattaaagtgattatgataagatagaatttgagggacccattattgtttttgctgtaaatttcagtttcatgtggattattattgttgtggtaatagtatttcattgtcttttgtcctttgataaattggtttctttgtatttatatatgtaatgagtccactattctataagatgaggaggttttaaaagtaaaatcgtagcttattgtatgataatctgaaatgaattgatgggagatattagtaattaattttatattgatccatggtttgaacaaagaatatgttatgaccaacaagaagtagcttaaaggcctaagtctatttgtgttatttcatagtttatttattaacaccatatgataaaagaataaatgagcttctgaaagttggatagaacaaacgtgcacttaaagtaccaaagaagaatctcggaacctataagagggagaggtagggtgaagagatgtcaaatgactttgattagtagaataatattgaggatttttcaacttgtgtttcttaaattaagtagattttagccttataacattgaatttattttgggaaatttacatggtatactgacttttgttattgttttttacaaaaatactgtcacacggcagaatttatttttttactgtgtattattataagttttatactgcagtatactgtgtttattctttacttttttttatttgttttagtgttattttacggttgtttttcataatttattttttaacgtcgattctactgttcttgctctatttgcttgatttaataattgtcgttcttttatgttttttaagtggttatatatgcttattgttttacatttgtttttgtgttgttttag

SEQ ID NO: 29252 - DNA, 6686 bp, Cannabis sativa
tcactgagttcttggacagagttctaataaatcatatagttgttgtttgggttgcttgaagagattatgttatgtctctagaagacaatatgaagtgaaagtattgtgctcattaaggcaatgctaatggttatttgggttgcttgaagcaaagaagagtggttttggttcagtcttgaaatggctgtcagattatggtttgatatagaaaatcaaactagacaaatggttaaatactaatagttattgcttgaagaggtacaagagtgactttgttttcatctttcatggatagaaagtgaaatcagaatgaatggtttcttaaacttattaagttctcttgggttataggtcttggaaattcagattttctgcaaatttcgaagtttaaacaatcgttgcatcttaagctttggataaattcctttttccctttgtttgtttagtttcagatgtgatgaaatctgattatttagtggtttctttaattatagtgtgtggcctgaatgctctcaggatgagatgaataggaaggtgataaaatgaaaactcccagtaatattaaggatctttaacgcctgttgtttgtgtaattggaaggttaaattgtaaaaaaacaactcgagtttttttttgcttttaggcccgcttgcattgctatttgaatggttgcattgactttatgcagtggtgatgataatgggaccaagcatttaaaatatatcattgatgatgttgtgtcagaacatttgcatttgcatcatcagtgtgcctaatctttgagtccaaataattatatcccattcgtcatcagtttaaagtttgtctatgttctagagaaaacaattgtaattggctcaatctttattttttcttctgtttattaagttttcttgtattctggctatcatttccaacgtgtttctgttttctgaatgaaaacagaaatgccaaacattatttttttttgtcttttggtaataatttttgtgctctctgataactacattgttgcatattgattgtgattgctcacaacttcgacagtagtttgtgtaataggtggctagaatgttctaggcatgatctttcattaatttgagaagtttattggaatttgcagttcaccaaataagagacaacagtcaaaaaaagcctctcatgagcatttaataagtggagattctgacctggatgctgacattgcttcaacggctagtgctccagttttgaatcaggaaagcatttctaatgatagtgtacccgatagtatagccaggaagaacgatgatgcaaaagagttgaacagtgtagatgtcactaatgatacaaaatcttcggtaaactactttacccatattttacattgtgaacacaaatctgtattcagaatcacttttactagttcttttagtctttcatagattttattgtttctttgatcttgtatgaaaggtaattaacaacattgattgttaaattttgtatcaggaaagcatttctaatgatgatatacccaataatttaaccgtgaagcatgatgatgcaaaagatttgagtgatgtaattgtcactaatgagacaaaagctttggtattctgcttaaccccaaattttacaaggaatacaaatctgtattcataatcacttttagttttttttaattagtcgattttgttcgtcctttgtttttcatgatttcattctcatatgaaaggaaattaagtgcattgatgataaaattttgaatcaggaaagcactatgaatgatgatgcagccaatagcacagtagtgaagcacgatgatgcaaaggatttgagtggacaaattgcttctgatgaattaaaatctatggtattgcctttaccctgatttatactatgtaattacaaatatgcatttagaatcacttttattatgtgatatattctacacatagatatatcgtttcttaaactttgattctgatttgtggattgttatatccttttgattttgattttagtacttctagcgtggccattttagtttgaagagtcttttgctttttgatctattgaggaactgggaggttgttatgtaattttgtgtcatcatcttgagtgtgggatttatactggattgtactttaagagtgatgtgatatagtttatcaaaaaaaaaaaaagaaaaagaaaaataaaagtgatgtgatataggctcccagcaatttcctttttctttgatcagaattggatttctttaaattgttgtctcctttcatttgactagtctttgtcatctaggttctcaatgtggatgcagcagagacggtttcggatgttaaacttgaagatttgattggaatgataaaaaatgcagagaaaagtacgatgtacttatgctattttatgtagcttctttttatatctttttcttagcttaatacttttccatgaacataacctagaaatgttttcatcatttgtatttgttcttgatatagacatccttcttctcaaccaagctcggattcgagcacttgaagagcttgaaaaaattcttgatgagaagacagagttacaaggacagatcaataacttagaactgagattggcggaaactgatgcacgaattaaagtagctacccaggaaaaggtacatgtggaactcttgggggaccagttacaggagcttcgagactcactcactcgtagggatggtggtgagaatcagaatgatggattaaatgaaatctctctgccatatgaaagtagcataaccaatcttactgctgagcttgattcattgaggttagaaaatctctctctgaagaatgatctagaaaaacttacggaagaacttggtaatgtaaagagtactaacgaacgggttatgatgctggaaaccgaacgtgcatctttggagtcttctctgaaagagttagagtctaaattgtcagtttcacaggaagatgtatcaaagctttctactttaaaagttgaatacgaggacttagtggagaaagtagaaaacttgcaagtactgcttgataaggcaaccaagcaagcagaccaggccatcacagtattacagcaaaatcaggagcttcgaaagaaggttgataagttagaagaatcacttaaagaagccaatgtttataagctttcatcagaaaaaatgcagcaatataatgaattgatgcaacaaaagataatgatgatggaggatcggcttcaaaagtctgatgatgagatacattcttatattcaattatatcaagaatctgtacaggaatttcaagatacactcaatagtctgaaagaagaaagcaagaaaaaggctcttgatgaacctgttgatgatatgccttgggaattttggagccgcttgttgctattgattgatggttggttgctagaaaagaaaatatcatcaaatgatgcaaagctcttgagggaaatggtgtggaagagggagggccgaatatgcaatgcatacatggcttgcaaggaaaagaatgaacgagaagctctgactacatttctcaggctgacttcatcaccaacaacgtatgttatcatattttagtagtaaattacatagatatttcacttgcagttgtataatcattcatttatttttctttagtccaggattacatgtcgttcatattgcagcagagatggcaccagtagctaaggtgagttcagcttagcttttgtcttctcatcgtttctctctggtttacatttttatgccttgtcaatcttcttgcttgtgcatgcttctctattcacagtttttgcgtatgcacaagaatgttttcattgtcatgtgataggcttcattgacaggtgtatgaattttgtgacatctattgtcttagttttactccttgattgcaacactgtgatttccctggtcttcaatttcttctattttcatttgttattctcgcttcattcatgcacagggattgggttgtatccgctttctcagttgagtaatcttcttgttcatttacttaatgtgggatttgaacatgcacaatagtggcatgtatttaacttttaattgctctattgtttgttgtttgtcattttcacttgtattaaaagttattatagaccttacatgggatatttctcttatattgcttaagacaacaaatgtacctgcttaattatcaacttctcgacttaaatatttgatttcagttttctttctttatttcatctctaataagcgagtgttatttattttgcaggttggtggtttgggtgatgttgtggctggtcttggtaaatcactgcagaagaaggggcaccttgtggaaatcgttctccccaaatatgattgcgtaaaatatgaactgattcgtgacttaagagtgagtttgttatttgatacttcaagcaaatattgtctccgaacctggtttcatgaaatcttatttatgtttagaaaccatcaacttgtacaggaactagatactgtggtagagtcatactttgatggtcgactatacaaaaacaaagtttgggttggcactgttgaaggttaagaaattcaaaattcaagattttacagtatttttggtttacgtcgctcttactgttgctttgtttgtttaggtcttcctgtttatttcattgaccctcttcatcctgataaattcttctcaagaggacaattttacggagagcgcgatgatttcaaacgtttttccttcttcagccgagctgcacttgagttgcttcttcaagcgggcaaaaaaccagacataatccactgccacgattggcagacagcttttgttgtacggattgtttacatctgctatttggtctctctaaaatttgacatttttttcctttcctcttaatgtaagcaattaacatcctaacttctttcttaggctcctttatattgggatctatatgctccaaaggggttgaattcagcaagaatatgttttacctgccacaactttgagtaccaagggactgcacctgcttccgaattggcatcttgtggtcttgatgtccatcagcttaataggccagatagaatgcaggactactcatcacatgatagggtgaatcccgtaaaggtacagcaaaatatggatttatatgttatcagtcacattcatctcgaagcaagtttttccgagctcatttgttttaaatttttataatgacctcgttttgcagggtgcagttgtgttctctaacattgtcacaacagtatcacctacctatgcacaggaggtgaggactgcagaggtaagatctttcaatgtagattacctaaatctagtttcacaacaaaataagagaaaatgtcgtcttaatagtttacaatatgatttgcagagaggtcatgggctacattcaacacttaatttccataccaaaaagttcatcggcattctgaatggaattgatactgatgcatggaatccagctactgatgattttatcaaagtacagtacagtgttaacgatattcatggaaaagcagaaaacaaagaagctttacgaaagatgttgggtctttctacggctgatcccagaaagcctttggtaattatattttaggctatttccattattgttactactcttttctcctttttcattttcactcattcattcatttccttcacatgaaatatctatttttcctaactttctcaagttgacttaagtaacaactgtattaaaatcaatagcaattgattttcaagcttctcttgatgggtgttgttctttctaacctgacaaaaacagccttgaatcccttatggggtgtttggtataattttagtggaggacttatgtttaagtggggccacttttaagtttatttttaggtaatctcaaactctttttttaaatacttgattttgagattgccttaatcaacccctctcaactaaaacccaccaagtaaaactcttacaccaaacgccccattacagatatggtcttgatttataatttcatggttgtcaatagtattcatattaggtgtagttgatgagagttgttaaatgatctaaaactctacattatatttttgattatttaggtaggtatcataacaaggttggttcctcagaaaggtgtacatcttatcagacatgctatatacagaacactcgagctgggaggacaatttgtacttctgggttcaagcccagttccacatattcaggtagttctcgtctcttctctctatttaagtatgtttctcccatttctactacaaataaagggtaaatactattttggattctgtgttttgcaaaagttactaattgaatcttctattttgttaaatgacaaaatgaacccagtattttttaaaatggtacaaataagaccctgaattgattttttgtcaaaataaaatttaaaaataatccgatctaaaagtgttataccaaaactgtttacattttttatatttcgtattaggaattgtcttcaagttggttatatttaaaaaaaaaaaattgtaaaaaattaagcttagagtcctatttttaccattttagaaaatacagaatctattttatcatttaacaaaacacagggttcaatcggtaatttttacaagatacgaggtctaaaatagtatttaccctcaaatatattgtataataatttattatttaaaacatagtaatatttca

SEQ ID NO: 29253 - DNA, 1642 bp, Cannabis sativa
atttactataatgtcactaattattatgattcattaacttttactaaatttcacattctttatttgctatattatgatttaaataataaaagaataaaaaataatactttttttgtatatttttaataaaatattaaatatagcacaaagtcattttttgtgacaaatgtatcatatttagattatcttttagcacactattagagcacatttcataagtgaactatattttaactttatatcatttatttacgtatccattagagatgctcttatgttccattttgagctcggagtactatattatgttctattttaaaaaaatacaaagtctaaatttttatttagcaaaataaaaaatttaatcgataaattttattaaactcatcatttaaaatagtatttattattctaactttactcttaatatcaaacataaccttaacttgaccacacatgaattgatggatttttatgttaacttaattacacttcatgggttgatgaatttttttattaacttataaaagaatgagaaaaaaaaaaaacataaaagaaaagagtactccaataaaaggtgattaaaaaaaagaagttaacctttttatggtttcttttgttggttacttctttgatggtaaattcatatttgggggacaagaaggtagctaagtttgagaatgtaattttagtacttttcctacaaactcttgtaattatttttaagtgatttttttttttctattaatttagtatgccttttatttatgtacttaatatatactacatttttagataatttttattataaatacaaatattttatattattatataattttcaattctaaataaaactaactttttctttattatatttatatatatgtgtatatttttttttttggtgagaaatagtatttatgttttatcatttatttttttatttttcttggataaaagcacctagtgaaaaattgtcccacacccactttccaaaagtttgtacctttcattagaatcacaaaaatgcctaaccccactttaccactcctcttcaaagagatggatgcctttttcatagttataatctaaatcatcaaataccaaaagaaaaaaaattatatggacaaagtgagcataaataagtagtgacatattagtgggttaggcaagtaccatccacatttacaatgtggaatataccattcactataaagcatttcttttttcttttttaattttttaaaatatagtattattttttatcactatgtacaagtaattttttattttttcgatgcataaattagttagtaattattttatatgataatatataatataaatataagaaacatcccgcaaatttttataaaatttcgaatgatttttaaaatatgaaaataatgattctatagcctattgtgtttgcatgtaatttttgaaactaacatgtatgtaataaactatttgaattttaaattattaaaattttcaaaaaaaaaaaatcagcgaaattcccttttacattatacattgggttagaaaattacaacttattcatattttataaacactttaatatatagtttcttagaacttattacttgtttattataaaggattttttttttttttt

SEQ ID NO: 29254 - DNA, 1586 bp, Cannabis sativa
  modified_base (1187)..(1192): a, c, t, g, unknown or other
ctggtaaaattaattccaacaaacatcccctcagttgtgttcacagtggaggaggccttctttgtctcctcgactattttcacagcaaaggaggtcttcttcgtctcctcgactattttcatagcagaggaggtcttgttcatctcctcggctcttgtcagagtggaggaggtcttgtttgtctttttagctattttcacagtggaggaggtcttcttggaaaatgccaacaaagtgttgtagtattacacgttgctctttggttgactgagaatgttaccaatgtctgcttttgtcgggaacttgataagcaggtcgaatattaacaaggcagcttggaagttaccttagtttggctgctcttaccccaagctttagtttcttgatagctaggggagaagcaaggaagcttgtatgttgaagccatctgctagtagcgagatagaccattattgaggagcagtaagttattgttagcgtttatgccctgaaatgcgtgtaaaaatatttctgtttataataagagttgaacatttttatttatgcttgtatgttaaattattaatatttaatattgaataatttattatataaatatcgaaaaactcattattatttttttgaaagaaagactttttattaaatcaaatctcagtacataagagttttaagttccatcggagtattggactcagaaaaaatacaaccagaggagtatcgagagttatgtgctacccaatgagctactcgatttgttgatcgttcaacaaaaaataacttaacattaatcaaagaagaaagcaaagcttgacaatcttgtattgtacggagaattaagaccacttagccatgaataaaacagacagcaacatagtaaagtttagaaatttgtaatcaataattactagtacggttcactgatgcctgttattcggtacaagtaatttcgattcagattagtgatgtagtatgacatctaagtgaaggtgttgtatataatagagattatatacgacatggactgatatgaaattaagcaatctttattaaacatgtcgtttattataacgaccttattcatataataaggatgatcgatagtagatttccctaaatcttgaataatcatgaactcatgtttatgttattagtttctttattttactcgttaaagtttctcagagaannnnnntcttacaacttctattttaggaatctaataatatcgatggctgggaacataatctacaattatggaatcctgaatttcttaatggatcgaatgttgatttcctttaagtgttaattatggaactgaaaagttgtgcacaaatttactttcacaagtgaattaacgatactaaaggataaagaagtaattagaagggtaaaatagtaatttgaccaaaactaattacaaaccgacacagggaaggctaatcattggaattgattatatcaatggacacttcagtaatactcagtaaatataattttataattactaagagtttaatttcatatttatagtggagtaatcatagaattaataaacatgattatttggttgataaaattcaataaat

SEQ ID NO: 29255 - DNA, 1384 bp, Cannabis sativa
atattatatttcctaatatggtatcataagtaaaaattcaaaaaatcccaacacaaaatttctaaattgatttcttgattcaatcttcaatggtgactactcaagttactagtatgaatcctcatgggatgtctgcagctcctcctgaaaaatgatttgctccctaaatagatgctcttgatgttcttgatcagaagatagttcaccctcaattttctttttttctattaaaagttatcttcttctttctttggattttatgatatatttcctcttattaatatattattttagttagtttattattttagttcttgttggtattctttatcaaggactttctttatataaagagtacattctcattctcttgtatactcaatatacaacacataagtgatatatttcctcttattaatatattatacattaattaatatatatacattaaagatagatgcatttcattttatgatatacattataggtatatatttccttgaaaagatttaaaaatttgatgggtgcgaaaaaaaaaaacaatattggataaaagaaataataaattcatcaaacatgatttataacatgtacaacttgcttattataataatatctacaattacgtgtgtctgtttaggtttgctgaatattgatacatcaggaatagcttgtcttgaagatatgcatagaaatttgaatgcacaaggaatccaggtactttagtttttttgcattgataatcattaattttaattacctctcgtatttttttttttttaagttgactaattgatctttcattttttttcttttccttttctacagatagctattgccaaccctagatggcaagtgattcacaagctaaaactagctgagtttgtgagtaaaattgaaggaaggatcttcttgactgtgggagaagctgtgatgaattatgcaactgcaaaatttcctgtgcgtaccactacttaattttcctaattttaatccttttttaaggggtgtcaatctttgtttgtggtccaaatgtacctcttcacttcacttgcattaacacactttgaaaataaaataagaaaaggtacttgtaagtgctattagaaagagtttgattgtaataacattttaaaaaaattgatgatggtattgtaatgtaaaatatcaacaataatctggctataatatcaacaggttcaatttgcaaagtgctaatatttgtacaagagtagattagattatattgttttgcagactacattagtccacaatattggtacatattaaatccacttaactattttatgtacatattatatccacttaaacaatcaaatcttcacttattatatatatgaaaaattatagtaaaatatatata

SEQ ID NO: 29256 - DNA, 3245 bp, Cannabis sativa
ctactactcatgtactccctactcctgtaaatcccaactctttagaatgtacagaagtagggaccaacattggctatgaccgcagtgatcaggctcatgatcgtgagaagaataactcatcatcatcagatcaacctaatgatgatgagatttttgatcaacttcctggactggtttcagaactaccattattaaataatagtagtactagtactaatagtactagtaacaatgatctcgtggagaataagagtgataaatactattcaggtaagacgacgtcatttggtggccattcatcgtcatctcccaattctaccgtttctgaagcttgggaaaaactcatggataacgaccaaactaatgaatcttactggaaagatattttagagtacgtatctctctactaattaattcattatttttatttttattggtaagaacgtctctattttatgcattttatatatagaaattatagttatagcacacgtatactctacttattttcaaaaaaaaaataataataatttacagtgccaaaaataatgcttaaatattcaattgcactcggacatcaaaaaaaaaactacatgtctaaaattttattttcagcatcttaaattattcaaaaaataatttatttagccaaaaaaaaaaaaggctattaagaaatttccaaacacataaaagtgacacctctattatacatagtacttacttcatacacataaaaatattataataataataatattttttgctttgtatatttgcagattgatgtcataattaataagtattggccaacttattatatctactgcagaacccatcaagttgaagtttttatgcagattaattagattattagggctggattaaagataataagttctttcattaattacttattctttcataaaatttgatgttatttctttattttcaattttattattattgtggagctagctagggcttattttattaataggccgtatacgtacaattgttgaatttttatatatgtaaaaaaacaatatatatacatatatacttgtttatttgttatgtgaagttcatttcttacttaatattaatttatgttttttttttgttgacataatataatccatgtattcaatttttgttttatattttaagtttaattattttaaaattggtacgagttaatgatctaggtctacatatcttcaaaatgcgggagataattagtattattaatttattattattatactttaattttaaaacaacttgataataattaatgatgatcattaattagattaaaaataaataaaaaggttatgattctataactaaactttgttgcatgtacatgtgaaaaaaaaaaaaaaaaatctaggagaacatttaaaatttattatagagatttaaaataaaatgttagatttggtgtgacttttgttattttacgtagctattatgcatattagcatacatatcaaaagtactcaagttagaataattctgttgtatacatatatataaatatttatgtaaatgttttagggtggctttacaatccacctagtgcactctctacttgagtatttaacaaaaaaaaattaatctaattttttttaatcgtatatgttataattatttaagaaatttttaataatttataatatagaaaacaatgttgaaataatttatttcacatgcatataaaataaaaaaaaaaaaaaaaatcacatgtacgtgctatttgtaccttatttttggcatgttaatttttctgaattttactaaaattttataaaatgtcttaaataactacaagtacaacatacataactaagaaacaaattgaactaaatttttttatctgaataccgaaacaattaagagtgcatcaatacatattttcctatgtttaatgtatgtaatttttagttaattagttatatccactaataagggtgtttagccaaactttttagaaccaattttttgaaagaaaaaaaatcacaaaacaccaaatgttgttttttatttttaaaattaatatttcatcacatattcttttctacatttcgggtctcggggccagatcccaaacctgcacccggacccagactctagccccaaacatgggatatatctgtacccaagatcttgactcagccttgagatcagaggcaactcgaatttgggaccctgacccgatctcagaccctaactctaccagaccgaattcctagaccaaactcgaatccaaccccaagacacgtctaaattcgagtctgagttcaatctttgaggccgagaccgaatttggatcttggggtcgatttcaggtctatgtccagggccaagtccaagtttggagtgggactagtttcatgtcgatgtataatgtaaaatatttgaatattttttatagtaaaaaaatctaaaatagtttttaaaaaatattagtcaaacactattaaatttttaaaatgataaaaaattattctctattcttatttttaaaaattaaattctaaaaacttaaaatagcctctaatccctttatgtgtttgaagcttaatttgttatgagtttgttaattattaagactagtttttattatatattattgggtcttgtgatattattaccttaaagataatttcacaacaataatattaaagattttgacttttagatcttgatgtcaaagtcaaaatcatatttgtcacctccattcttattaatatatatatatatattcaaatattaatttacatatatttttggtcaccaagtgtaacatcaaggtatatattgatttatattattattattatgtattaaaagaattagaaacatatatgcataaaagtgaatgaaggtgattaaatggtgatttattattgggtgttagtataagtttagtcactaaaagtcagattagttgttgcatagtatacttttaggtaagattattattgttgccgttgaacatgtgtacttacaagcaattgactatacacatatagcacacaaataaataataaataattattttattaattatatataattaattaccaactaaaactaccctaagttgaattaattttagatttaattaattataataaatactaattatttatgctcttattagctcctatcttattatactataatacgaccagtttcatctatcaattcaattctaattaagatagacaccatgaact

SEQ ID NO: 29257 - DNA, 3207 bp, Cannabis sativa
  modified_base (701)..(702): a, c, t, g, unknown or other
  modified_base (3143)..(3149): a, c, t, g, unknown or other
ctctataaaattcctgtgtctttacattgctttactatatatcaatctttataaactacttgttgcttactaaataagactcactgtcgttggctaaaagcgaggtcaacacacagataagacgaacttgtaagaagacatcaaatctaggcagacgagggaggaagagcttctgatggaggtcgagaatttggagtctgacgccctagaagttttctatgaattctggaagcccaacttaaaaggaaactttgattacctcggttatacgaaagaggcatatcttagttagtatgcgggctaggcagccaaagaaaaccctaaagtagccaattccaaagccccaaccaattagaacatagagaccccgacctctaattaccaaatcattccgtataaagaacttagaactcctgcgatgtgaatctcttttttctttttcttttttatttgttcggcccatgggcctttgttaaatacaatatgactgaccaagcggtctttaaactttgtaatacatcattttattttgacacgactagctaaccaatatcttgagtttatatcgttcttttgtcatcttttcttaaatattttcccttgttttagtaattgtacgtactgctatgttttttagcctgttatttatcaatgctttgtattggtatatttccccccaagtgaccgagcagacttatganncttggtcacttgcatttcacaagttcaaattttgtttgtttggcttttgggttcgaacagaccctttgtacgcattatgattgtaaattcataacttgatataaatgtaattgacacaattagaatgataattaatatctttattcatttattggtaggttagaataattttgttaccgtagtaacttacatttatgaaagctattacatgatctaactgatctttagctaatttaaacataaacaatttcacttttagaactgttctttaaagatggtcatctgacctgagtaggtcattttatctaaacctttgagcaggatccactcagatggccactaattaagagtaaatgttctagcaatgtgtacttaaaatggtcatccgaccttgtacacttaatggtagtattttctcaaatattccccataccaataccttggtactagaacgagctccatattttgtcatgccgccccagcttatatgctctagagtctgtgacttcgaccacctgatatggaccttcccaattaggtttgagcatgccagccgctctgtcttttgtgttcaagaatactcctttgaggaccatatctcccacaaaaaattttcttgccctcacttgctttttgaagtaccgagctaccttttgctgatgagctactagctttaagtttgctgaggctcgtttttcttcaatctcgtcaagtgattctgctaggagagcatgattatcttctttatcgtaggtcaatcttttgtgggatgaaggttctaattccacgggaagcatagcttcattaccataggccatagcaattggtgtttgcctggttgttgttttctctgttgttcggtatgaccacaatacttttggtagttccttgggccagttccttttagcctcttcaagtaattttttcatggtttctttaagtgtcttgttgactgcctcgacctgacaatttgattgagggtgtgccactacggagaaactttttatgattccatgagtcacacagaagtttgtaaacatctggttgtcaagttatttaacatcatttgaaacgatcttgtgtgggagtccgaaccgacatattatgttcttcactgcaaagtccaatacttttttagatgtgatcgttgctaaaggcttgactatgatccactctgtgaaataatcaacagcaaccactgcatactgtactcttcccttgccattgggcaattgtctgatcaggtctattccccaaatggtaaaaggccaaggactttgcatctgaattggctcgttgggcggtgcacgggggatcttcaaaaatctttggcatttgtcacaattctttacataggcctttcaatcttctatcattgtcggctagaactatccttgccttagtattttccttgataggctttgtcctgctgcatggttgccatagaatccgtcatgtacttcagacaggagccgtgtaggttcttgttttgttacacatctaagtaatggcatggaaaaacctcttttatacatcacaccttctactatgatgtaccatgcaactttcctcatcatgttctgagcttcatttctatcatttggaagttctccagtattgaggtaggctgctatgggtgtcatctagtttggtactgtgtctatcattttgatttcttgcgcacaattgatactaggttggccttatctattgctatgctgctcgcaagtcgggctaaagcgtcagcatttttactttattctcttggaatttgcctgagggtttaacccttgaattgtgcgagcaagtcttgtatcttggttagatagcctatcattttctctcctcgggcctcatactctcctaaaacatgattcactaccaattgtgaatcactacagacctcaatgtattcggcacgtacctcccgagcaagttttagtccagcaatgagggcttcatattttgctttgttgttggaggccttgaactcaaatttgactactccatgcaggtccccaggtgtgacaagggcaatttctgcaccagaaagttggtttgtagctaacccatccatgtgcaatttctaattagatcgatcttcattgttttttggtaggggctcttgtactggctacaggttgtcccttatgttgccttcttctttgcctgtgcattcaactacaaattctgccaaggcctgtcccttaactgttgtttaaggttaaaagattatttcatactgacctaactctatcgcccatttaagtaaccaccaagaggcatcagaattttgtaatacttagtgtaatggttggtcggtgtatacccgaacagggtgagcctggaaatagggcgttaacttccttattgctaagattaggcagtaagtgagcttctctattaatggatatcatccttctgttgggttttatgccctnnnnnnnactcatttcatataatcaaatttacttattaataaagatcagaaataaatttttatgt

SEQ ID NO: 29258 - DNA, 4129 bp, Cannabis sativa
attgtattagtattatttaatacataacaaatggttcgtattagcttgtattataatatttacaaaagatttcgggtcaacaccaatctcctacccgaactcggacttgggacccggatccggacttgggactcagacccagatccggactcggacccaaacccggactcggacccagacccgaattcgaaccccgaccccgaacccagacttaagactcgagaccccaacacgtagttggtgttggggtcgagtgtattgaaaatatattataactttacacgatcaagtaatacaagtcaatattaaacattatattgtattaaataatactaatacaatacaataaaatgcaatccaacacaatacaatataatacgatacaatacgacgtaccaaatgagcctttaaaaaaataagttagtaaataatgactacatgtgatatgatgattcaaaattagtaagattagtgagaaaaaaaataactactatcttagaaagagatattgggcaatattatttaatataaatgaaatataaaattattaaactatttataaaaatataatttgcactcatctaaaaattttgagatggaaccatgcatgtaatttttgtcacaataaaattgtccaacaaaaataaataaataatggctatatagtcaaatatattgctatatatgtaagaaaaacaactcatatgcattagtaattgcatgagatgcttggcttaataattctgtcggatagatcatagatcccatttaatgctttcaataattcgtttgccaaagacaaaaccacaagatcttctaaacaacacacaaaatgttgatatatacatgtatatatattttttaatatatatttattatttatatgaatatataaatttgacttggtcctcattgaagattatttcagtatgtcaataattgcatgaggaaataataagagaaaaaaaaatctaaacattcactaaaaatcttattgattttttttaaatttctctttaacatgttaaaacttatataaatagatgaaaatatatatgaatttttatgggatgtagaattaaatcgaatatatatgcattatgaataaataattaaaatatttttagtaattggtaattttttaaatttcaatcttacacgagctacaatctacaaaagaaaacaaaactaagttagtatataggtattcgggcttctaactctcttagataaatttattgattttcacataatatatagtgagtttgagaatcggtaccttatatttataggtgagatactataatgaccgcatagtttaaacatgaaaattatctaataattagaaatttaattgttatttatgaatatatgtgcataagtagaaaataagacctattattaaaaataggcaatagagaaataatttctcgattataaaaattttattgaattctatgtgtagtagagctgagcaacggtcggttcttttcctataaaaatctagtattatgtttttggtctgcattggtgtaatttgaaaaccaaccaactaatccaaaatctgtcttaaaaccgaccgtttcaaaccctggtttgatcagtttaaactgtcaaaactgaactttttttctttaaaatatgatctaatttattctataagcacattgttgtacattctacaactacaaccatacaaattaattattcaaaaactaattgtaaacacattgttctacatattgtaagtgcaaccatacaaattagaatatatagttaaaaatctaacatttataaaataatttcaattaacaattaatatataatgattgaacaatttgttacctgggataacttgttcacatgtctctaaaccttcaattgcatccatgtattgtcgaagtataataggttcctcatactcataagtataccatttcttagaaaaaattaaagcctccaccatccttggagataaagaactcctaaatgcatctaagattcttgcacctgtagaaaaagctgattcagatgctattgcagacatctgaatagctaagacttcctttgccatacgagcaacaattggatatttgaatcgattatgtttccaccattggacaatatcaaatgcaggatcaagcttctcacgatgatcatttaagtagtattcaagatcatcttcttcaacgtcgtcactaagttgtagttgttcaagaagaaatgattctgtagctgcactaataacaggctcagatggttgagattaagatacctgagactgagattgagatggttgagctttagatggcagagttgtttgttgtttataaaatgcatacaactgtgctaatgtatcaatgaccaactttatcatttttttagcctcacttggattgtacacaaatctaaaacctcgattcacaacctctaatttttaccttggatcgaggatattggcaataaatgtcaacatatttagcttttcaatccttccccaacacttgtcatatttttgcttcatactaatagtcatagttcctaataaagtatcaagactagaaatcatagtagttaaattagtctgttctttcaaaatatctagaaggaatagattggatgtgacatataatgacccactaaactgattagtaagatcatagaatctcttcaaaaaattaacaaatactcttgtcttttcccagttaagattacttggcgaaccacccattctttcttcatcaaagtcccttgtgtagtttgcatctccttctaaattttcaaaatccttcttgaattttatagcgtctaattctaacatcatgtaggtggagttccatctagtaatgacatctaaacataacaaggcttttgattcaatatttgcatccgtacaactttctttaatcattttcaatagatggagataacatcacatatctcaccgcattttgaatacttaaaattacttcattcaactctttcaaaccatcacttactatcagattcaagatatgagctaaacacctcatatgaaacatgtaatgactgcatgttagattatggattagtaaagacaattagcattaactgttgatatttttataattatttatgattttattatattgtgggttccattattaaaaatagacattagagttataatttctcaattctagagatttattaaactctaagagcattatctaagttaaatatgaattatgcaatttttatgatttttgctcggcgaagacaaaaaatgcgatagatggtcgtttgggttacatgggtaagtttagaacctatttcctagtgggacaaacatttgagatatttagaataccgagtttgagcagggttatgacttttgaccattttacccctaggattataattacttaacttaggagatttaagggcaatttaggtattttatatttgaggatagggtggcattccatatgagtggctgctggccacttagtttttcagctaaaaataatgagttttcttaggaataattaattaaaaaaagattaagaaaagaaaataaaaaattcaagaaattcatttccctttctctctctttgttcgacccctcaaaccagtagaacccaaccctaatctccttcttctttctggaattcaacaagaaaccaaggtgttaccaagtggaggtaaatcctagaacttggtttttagttgttcaaactttatgtttagtttgattatgtgaatttgagaattattggttgttaggattagaatggtttgtgaattagtttctaagttcttgttgagttgaaattgagttctagcagttggttagggtgttaagttgaaagaatcctctcccattttctaaacctaattacaaaatcgaaaattcaaatctattagcacaaccacaacaatattgagatcccaaatagaaaaccaattaaaaataaaacttgattttacaagagaacggaatgaaatgtaataaaatgagcacaaggcttttcgtcattcccattccacaacaggaataagatatatatatagagagagagagagagtaacgccctaatctatagggacgccacgtgtatgatttataaactagtttaatactagtaga

SEQ ID NO: 29259 - DNA, 3500 bp, Cannabis sativa
tgatccttatgttctatattggttgattttctttcattgatctaaaaaactctcaaacaccgaaaaaaataaaaataaaatgtgtttatatcatttgaatatgtccttggagtaagatatattataaataataattaacagtcactgtaataattgacaactaatagtaataggaaggaagatcctttgactgtggttactcgtgatcagaacaagaattccaagtattattcatagtctaaatatatcataaataatttatagaagaatatataacgaatctctacagctttatgtagttattctctatcatccacctgagactccaatatttagcatcacacttgtaagcccaataggcccatccgaaagtggcacgtccatatacatctaattgagctttcccaaatctttggtaatcttccttcgacgctcctcgcattgcaatttcaccacaccattcccctacataaatacacaatgttttcccaatcaaatgacataaatgatcatcaatggaacttaagtaataagtagacataccaacaaaagagagagggccattaggggtagtgacggcgctgagatcagaagacctttggttgtaaacgaaatcgatgttttgttgaacattcatgcttctaaacgagtctgaatataagttatagtaatgaacatcgatggctacattggcaaggcctcccgcaaaagatagcagctccttcgagtcggcgggtcccaaacgatttgataaaatcacgtacgcactcgatgtgtacttgcgcactgcgttgtaacccaattggtagtacctaatcagggtgtctagtgtcacacctggtgacattggttcattcattaacccgattgctgctaggttcgtcttattaccatatctgccacataaattcgttgatattattattattaattctttctagcctaggctagcttagttgaaaaggaaaaaagggaaaataccttgctgctaaaaagtctatgactgaaactgtgtcttgcatgtaggcatctccccattcttgaaatccatctctagttccgctgtgttcgtttccattttgtgaaccttgcactgcgtgaagatcaatgatgactttcatcccataatttctgtagcatccaaccaaatttaatttgttactatatcttcatcaaatatttcttgtacattagtttgaagactgagtaagaaataggatgtagctcactgtgcccattgaaaagcgttatctaaagcttgtaatgagccactaacaaagggatgtggtggtgtaggatcatgggctatccaccatccaactggaacccttacagcatttaaaccgttggatgacatgaatctaaaatcatcttccgtgatgtatgtactcctatgatcctgatcatactcaaaagttaattcaaaacatttgatcatcaaattcagatattaatgcgtcatcatcaaaagtaacattattatatgttaggaaatcttgcctgtaagacttgagaagctctttctgggccatacccatttgagatttggtattcaccttgaatcccagatacaattgtcatctcaaaaactgatggatcattgtcatcccagcttgacccttcataatctgctgtcactgggctatctgattgtgcctagtagtatagttgcaatgcccaaaaagattccttatatagatatatatttaaaatcaataatgtaaattaataacttggatcaagtcaaaacaataacattacttggaggaataaaccattggctgttctaatgcgaactcgattaggatcatcttcattccttataatccgaaaagtttcagaatcaccagggtcgtttgagactgctactagtgtgtttccttggccttgattcactaatcccacgaactgtttattaaacactctgaaattgaaagaggactcgttgtttctccacagctgcaattgcaacaccatatcaatcatcaaataaataactcgtgagaattaatgtatcgaattagagaatacaattagagtagaagcacttacacgaaatgtttcccaaccagaagcattgtctcggttagcaacaacagtggttcctcccccattttctgagcaaagatatttttgcagcttcgtagacttaaattgcactttagttccatcctactcaaaagaaaatatacaaaaaatgttgaagccaatataacaaaataaagtttgatgtgtgtaaaaaagtttccatgtgagggggaacacattaatgaagacacttttgttttggttaagtttgtaccaatagatctttgttgggtatattatcaaagagagaacgattcatccatccctctattacaagccaatttcctagatttacagcctttaatggcaattgaattgcattttgggcaagagatggagagaaataacaagtgaggaagaggaacaccaatacaaggtttgaaaaagtagacttggccattttgctactcttttttattttgtttttattttaaacttgaaaaatatctcatacacgtatggctatatatatgaagagaaaaactacgtaagccatacgtttggaatgtcattcattcacattatatgaatcatcttaacattgacttatactaaagagtcaaagtaaaacagagcaaggttagggggtgtctagttcaacactacatttatatcgaaatttattaaatcaattttttttttttccactcatcaattttcttaaactcaaattcaaagattgaagtcctgttttttttttccccgttgataatgttgctttctttttacttcattttgtatgttatttggaaaaggaaatgccataaaacgtttttactgtatttttttttttttttttggaatctgcatgttattgagacgtttttgttttgtttttcatccttaagactttgtatactcctaaaattacattttaaaaaattctttttatatttacttacttgcccttctaaattcaggtttcgaacttggtttaaactttaaattaataataattaataatatataagaaaaagtaggtagggttaggtaactaatccttttagtgttttttgtaaaatagttagttggtagccaagtaaggcttaagttaatcatgcagagtggtcattccatatcccatttgctaagagaaaaatatagttcaaaagtagagagtacagactgtttgtttgtttttttttttttttttttgacatagtggagagtggagactagcgttttacttcttctaaatatttcaattgacttatagtggaagaaacttttaacggttgtggatcgctgctgcatttactagacaaattaattaatcaatagatttataatggtattaagacaattaagacttgaaatagtatttactaaaaaaatattatttaattattattgaaagtccaaatcacccaagttaattttgaccataatttttattgtaatttcttttagag

SEQ ID NO: 29260 - DNA, 5102 bp, Cannabis sativa
tttaattttggttgtttaattaatcaacagaataatagagaaattaagacaagttgattattagtaatcataaaggatagtgttattaatatcatcttagatcatcacatagcaaggttaagtagtatttttcacttgcatagacatacaacaccaatagatcatcacatagcaaggttaagtagtatttcacttgcatggacatacaataccaaacataaaatagtagggaaagagttttgcatagtcaaaacaaatcactactatgcacccttattataccccttttgcagtccattcaaatctctggtgaccaccccaatgggcgccgccattgtcaaagctatgctggtaattgcctccaccatcattcctagccccccaactgctcctttcatactctctttccttcattctcactgctcctccagatgggacgcgcacctcttcaaaggcctcaaattcggcctttttcatggaattttccctatcaaacatggcagcattcgaaaaatgagaggagttattgtaagaatgagtatcgaattccttagacattcgtttcccaaatccagcaccaaccgagccatgatggactctgccagtttggtgcatgttctggctgtgccagccatcatgacgcttggcaccatagcttcctccctctaccctgacttggtttttatgtaactgaggctgtgaatcgatgaagcaggcttctggtggcatgtgaccactccccaaaacatggccctggtattcgctgttcgagttccaacctagctgctgctgctgctgctgctggtgcatagcgtaggagctctggtgctgagactcctgctgcatggcataggagttttggtgatgttgatatccataaccaccacgtttcaacatgttatgttactttagttttttcttacttagatgtctaagaaaacttggcttatgttatgtctctctgttctttcccaaggttccattttataaggcctttgatagaatctagataagaatgcatcttagaaaaatgcatgaaattttagccatttgtaacgctaactttattccctgctttgaagattgatagtgtgccataccaccaaaatctaaatataaatgccattttgctaagatatttactttgattagacacacaaaaatgtattatgtggttcattttagaccgaggtttttaattattcatttttttctggtgtaaaacgaatcataagttacaattaatatcattaaattattataaataatcaataaaggtccctcaatattaaaataaggaatgcagcttcagtttatgcccatttcatcattaacaacagaaacgatataactaatttaacaggagataagagaaatcagaaggaacctttctctgaatttgttgtccaaaggcatcgaattctcaaccaccacacaactagtcttttgcattataatatagttttcttcacgttgttacacatggctatccccacccaaattcattatttattccaactatttagagcttatactatacatataaatatatatatattttatttccctattggtgaggagggaggtgctgtggtccaattactttcttattcttatatcttacaataacatggagaagagattacctttattttctctcatagagagagaaagagagagagtcagcttataataatattagtattgtagccagagatagaccaaacaacatgccatgaatcagcctggtcggagaaaaaaagaatgaatatggtacggccaccgccaccgccaccaccaccaccaccacactaggatcaaatcttgttcaggctgccaagattggaagcatggagaggttttcgaaatttagcgtaaagacaactttcaggtcaattaaataacttatatatagcaagggtgaagaataatactagctctaacacaagatcatatcaagtttgaagtgactaaaggtatagcaagggaagcattatatgataccaaaaatgaagaaaacaaagctatataaattataacaaagaatcatccaaatatgtagagtaatgtttccatagttctcaatgaagaaaaaaaaaagacaatttgcaaataaccaaaggaatatatatatgtggaaaaatttgtctgatacaaaatttccctacaaggggaagaagcatagtgaaaagtcatgctcttttgtggggtatacatataataacgggaatcatgccaacgcagacagaactaagtaaacataacaccctagcactgtaattgggagcagacattttacagaataagttaagaaacaactccttaaaaaaaataattatgtacaacaaccgcaccaccctttagaactcatgaatttgatcgatcccccaaacaattttcccaaagaatgataataaatttagctgaacaaatcgattggcagagccgagtcagtgacgcaccagtcatcgattgtcagatgaaaccttcatgaagagtcacacaagccgctgcaagttgaactaacctttacagaaacagatagacatcaaaactttatgactagaagaaaggatcagctcagccactctctcttatgcaattcccaggcaaaaggaatttatacttttctgcattctccaatagatatgctggaagatgaacagctgagaaagaatgaggaataggtcccattttccctatgatatctttgaaggtgtactcttctggtagcatatcaaacagatcagcccccttgcagattacattctgaactctcttggaatgtaagaaatgagtaaatcgaactctatcaaaatgactgtatgctttcatcttaaatatgaattcgctaattctgcggaagcaaaagctacaatgccatcctgcatctgctaaaatatcgtctgtctgacggtaatgagcatacctggtctttccagtttgatacctatgcacagaagctctccaactgttattatccacgagaaactcaaacgaataaagataattcttcagccgaagatgaaggacttgaggtatatcatcacaccacctcagcagattaatagtgtgcttgcttggaatctcatcaacatcagacattatcagcaagtcatcatctgaaatgcctgctattctgagaagctgatccagtgccactcgttgataagcttcttcaacaaatgggttttcttttttcttaaaccgtcctccaacagtgccatatgtcaacctaggttcaacaaatttgaactgatcacgattactggcaaagaccagaggctttgtaatcccagtaaacgttgaatttgactctagaagaacaaactgagtgatatagggatacaactctttccagcgaatggtcaagatgtctagctcattactaaacaacacagcatcataaacacgcctaggatactccctcactccccaaccatgaagtttacaaagatgttccattgacacattctcatgataatagtgcggcatatcatgaaaaggtttaggtggtgattcccacagtggccgcaagaaatatgagatcttctgtccgtgaacatagatgaaaaagatgcaagttgggataagggcaaagagaaagacaagagttttcacatccaaaccacggagaatgcagcgaactctagacatgcttaacactttgcttgattcctgctccataacgaagatttcaaatttgtcagaacaaataatcaaaaattcccaaatcaaaatattttatatcaactagattcaccatgtaaattgagtaatttgacatcttctttccataaccagagtaactttgacaagttcaacaactaaaacaaaatgaaataaataaataaaatacccataaacgacagtatccccataccaaacgaaaaaaaagctcatttcttttttaattctgttaaattgcccaaacaacaattacaggtaatacaacgtaaaaacaggaaaagaaaaaggaaagtgtgttcattgattgggtcatgagaaaaaacgaagaaaaaaattcctggatcacaataaaaccataactaattcaacagaaaattccagagatccaagcgtatttattgccacattatctaagccacaaaatattctcagatcaaatttactcgatactttctaataaccacagttcaataaacccaatctctaccactatatatttatatattatacatcatagggatgggaaaagagagagaagaaaaaacaaacctggccacaaacatcagcgcatatatcatcagtcttcttagaacagtaatgccctcctccttcacccatcatccaccacattttcacttcgaattacaacaattccgccaaatcaaataccaccaccagatcactctcaaagccaaaaccgaagaagaagaagaaaacgattctcagatctctgaactcagatcaaacttccccgatctccgaatcgaaatcaatattccttctccacagcttcaacctcttcacctctctctgttctccttcgtcttctacactctctctctctctctctctctctgtaaagaagttataaaatcgaccccaaaataataaataaataaataaataatgttaacaaaaaatatttattgttaattttgaaaaatgtaattaattaaatatttagtaaaagaaatggaaagagagattattgtgttgtatgtgcctctctggtattgggtggcagttgtcaaaccaaacagagagaaagagagccgttttatgggctttgtctccattttctaatttacgtaaatacccttccattgcttaggtgttaagggttgtgtggagagaagggtataaccgacatttgagattgcaaacggatttaaagtgggtcccaacgcggtctattgactgggctcgagacaactgggcgtggttgtctgccttgtctttaagaatcaaatatatatttcaggaaagaaattagtgggtcgacggtatgagtagaaactttccactgtcaccgattccacgcgcagtttttacattcgttctacgtggcactttctgctggactttttaaactctgacacttggcattttacagaatctctttctaagttaca

SEQ ID NO: 29261 - DNA, 2434 bp, Cannabis sativa
ccatgaaatgataacaccaaaacttgcaccacctcctcctctaattgcccaaaatacatcctctcccattgatttcctatcaagtacgtcaccattcacatccattagtcgagcatctaagacattatcaattgtgagtccatgcattctcatcattggtccatatcctccgccactaatgtgtccaccagtacaaaccccaggacatagcgctgctgagaacccatggattggactagtcatccctatcttatagtacagctcgccaaggctggcaccagcttgaacccaagcagtttcatcactatagtttatgttgatggatcgaaagttaagcatatcgaggatgatgaatgggacagtagagactgatgagaggctctcaaagtcatgaccgcaacttcgaatcctaagctgaagattgtgctgtttggcgcataatattatggttttgatttgggtctcgcggttgggttgtatgatggcaaggggtttaggggtttggagtgtggtatatcttttgttgtggatgcgtgagagtaaaatggattggaatgttgagttttgtggagtgataatgtttgacatgaatttatcagagttttcttggaagcattctaggaactcgtttaaaggtgttgatgaagaaaattgtgagagaaaaatgaatgacagagtgaaaaatattaagtctcgaagtagtgtaatatgcatatttggattgaaatgtattgcttttgtcaaaatgtaggaactacttgttcaaatgatgattttgacactatatgtatgtgctatatatatgtgtgctacaaatatgtgtgcgcaaatgagctttcattagtcatcaaaaatatttggtgagctgaaaatggtaatgaatttattattattattattattattattgaattaagatacgctgtcatcaagtaataagaaattaggtaacatatatagatttgattcaatttttagttaacaagctattctgtgtggaaaattgctatcaatggctatgaattttctttttattgttttttctttttgtgcattaggatataattgtcttgaaataaggaattaataacattaagtaacataaattttttttcttgttctttttgcaaaataggtaacatagatttgttttactttttggtttacaagattgttatgtgtctatttttattcttttttgtggaaaatttctaacactcgttatgaagggtttcttttcttttctttttttgtttccttttgcatttgaatttatattgtcatcaaaatatgaaataatacaatataggaaatatagatttgattcctttcaatggattagaagattcatctctgtactattgtattatttttatttaatttgtgtggaaacctccaacaatatgattatgagatttattataattattattattattattattattattattgaatggaatggtgaatgtaagggaagatgtggtaagtaatatcaatgatttctaataatgtgatgtaaaatgtaattgtactaatttaattgttataaaataatgtagaaaaaggacctcgacgttcaagatccccacgccaccgtgttcggatcaaatcttagaccaagagaacgaaacttgtcactgattaggacaagaaaattgtcgaaaagattgtaagtatatatatattaatccttaattgagaactaataatgagttaatataaacactttatatagtaattgcttgaatatgtgcatcaggctcaattaaaggagcaagttactcagggataaattcaggtctatggccaaaatgatatcctgacgtaggcgctcgagacacaagaatatcctggacgtgtcagggctgctgggtatgctagcacttgagaaatgttgtttccttagttatacaaaataaatcatagctaattttaacaaatgatttgcaggttccttactagggcatctaaaatgtttgccaggaagaaaatggatgtttctgatactgtggctcagtaacagaaagagattgataaattaaaagtcgaaatcaagtcctttaaacagaagaaaaatattgcccaacaagaggtagaacgagaggtggatgatcatacgtatgttctacaacaatacgctcgtgaagatgagggtcgaccaaaaatttatgtagaagagtttgtttctctcaacaagccacctctcatgtacaattttgatgaacacagggcccttgatcagctagtatatctttgctctgacaatatcgacaatgttgtggcccgagcgtatatgtatgaacatgagggtccaatcaaagttcactccaaagactacgatgattgacatgttatattatttattatataatataatgtttaagattaaaattgtgatatgttatatatattattacatataatataattg

SEQ ID NO: 29262 - DNA, 4921 bp, Cannabis sativa
tttttttgtatttttacagaatttcacacagaaactcctatagcaattaacggaacaacttaaatcgcaattaaaatccgtatagcaacctacgtagaaactactggaataactcaaaccgtaaattttataaaaataataaaaagttaaaaaatagtattaggcaattccccaaattataattattttgaaagtttgagttattttttaaaaaaaaaaatagagacaaaatcatacaagtatcaaaatttaagagataaaaaatcaatttattctatatattattatattgttattataaaagtaaagttactttttattattttaataatatttacaaactaaaaactaaaaaaaaaaaaaacaagagtaaattgttgtacaaccctgaatatttttcacaattaataggagtgttcatcaagaatgatattgtaatgactgaattaactatttaatgagaatttgatgatttattaaagaaaaatgtatctaaaaaaatatattttaattaaagtttataatatttaagcttttcatatttttcattttattaatatgttaatattaacaaaccataattaaatagactttattataaaatataatttatcaaaagagtaatgatacatacttgaatttacaatattaactttaaatattcatattaattcatgtttaggaaaaaaaaaattattaatgacatgaaaaatgaatttttgtacaatttaatttaagtatatcatgaattaaattataatattatcatcattataattaaaattttagttgcagtttataatagtatatacaagtattatataaagacaacatattctcaacattttatcatctaccataattggaacttagttgaagattgagctaaattttaggcactcctgcaacatgagtaatagttatattaggaaacagagaaaatgaaccatattcatttatttctttttttacaaagttagacaaaaggagacaattcagaaacattcttagcatatgattcaataaattaaattggcaaatgaacagctaaacaccaagatatagccaataatatacaattaaccttctagtctttagaccaatgtgttggacctcaaaaagctctatatggtaaactattgtttgggcttattaaataaaggaggaaagaaagaaacccagcctagaccccaagtcacaatacgcttttgttcgacccatttgattatataataattaattattgggttattctaacataatttgtcgtttatttctttattttcgataccaaccacgtaccatataatcgaaacttaacacaacaataagttgttcctctttttcattttgggttccaataatttgtttaaggcaattgtcaaaactctttctttcaaatatatataaaatcatcaggaatttatttattttataatgaacaaacaaaaaagtattaaaagaactaaagcaattgaagttatcacatccttcacgatactcaggtgacaccctaaagctaagattaagaagagctttatcagtatctacttttgtccaaattgtgtataaaaaattaggttataacctacaatagaaaaagcacttctgtctaaataaactaaatttccccaaacctttttcacaaagaaaaaataaaaacaaaaacaaacaaaaggagaaacttcacttgtatgcatgtcaattgacataataccccacccataatttaattaaatacaatcaactttttattagtctgaaattagtgatacataattatccacatccattattattattattattattattattataaacaagcacaagcacttgtctccgtgacttctcttatacgtaaaactaaaagtaccctattctattctattatgtacccaccaattttcattttttaaaaagtaataataaaaagttattaccaatttagtaccttgaaaatcaaagtcatatctcatatggtccaattattagtgctcttattattagcccctccaaagtcagaaaaacaacacagcaaacgaccaaatcttatggagaagagctgttattgttttagccagttggctaggcaaaactaagtaacagtaatagaatgaaatgaaatcattaattaaaccaaaattaaattacagatgttattctacataatgaaaactttgaacatacattgtcaagacaacaaacaatcaaaatgtgttaaaaaataactcaaacacaaacacccatcaagatgccctaacccaccaaataattacacccatattatatctacccaaaattacccaattgccaaactcgacactaaactcagtaccgagtcagcccaaactcattcctccaaaaacaacattaaaaattacaacatttttttcctttccattttgcaccaaaatagaaaatttacagagactaaacctaagagaaagataacaaaaaaaaaaactgaaaaagaaaaataataatattgaaaattaaaaagttgttgaatttgcactgtgtaacatatgcatattccttccggcaccaccaactcggtaccttgaccctgtgaatccgctgccgcccgagttaagcgcagcttcccagtcaccttcttcatcttccccttcatctctccctctcatcatctgcaacattctcttagctttctctctagccctctcactccctctctcctcaatctcccttaacacctccacggctctggcttccttagccaatcctctgaatctcatgcttccatggctgagtgcaaacagagctgcaacacagttctcccgagtcgactcagattccaactcgttcctcctaagcatactcacaaggcactccactgcattggcatcgagcatggaggaccttccctccggacaaaccgccaagttgcagagaatcagcaatacccgacttgccgaagatcccgtttgggataaggccaagagtgtcgggaccgcgttgagcttcaccagtttgactcggttgctctgaaccagtgtcaagtggtacaaagccagggctgagtcgtgccgagtccgctcgctctcggaacggacgagtgcgtgcataagcggcggcagagcgccgagtacgcctatagccattttgttctcgtcttctaatgccaagctgaaaagagctccggcggcgtgctcctgagactcgctggagccgcctttgaggacgtcgatcaagaatggaacgaatcctgaccgcacgatcatcaccttgttcggtttttcgagcgaaaggttgactaacgaagctatggcgtttgtctggacaacggcgtatctggaagtgatcagaggttttagagccaagagaaggcgaggagtacagagcgaaaccctaagctcttctttcgttctggtcgtctttctgagcaaaatcacggcttcttcttgctccactacttcaggattcttgagcttcttcaacaaattctcttcttcttccgacaccgtgccgttggaattggggattccagttaaggcatcgagctccgcaatttcagaggaagacgacgaagagtagcatagaggtctagtcgcgaggggaagaggagtacccgggttcgacgtgcccggaatgacaaccgattcctccgatgagctagagtagaaatggttcactcgggggcccaactcagtcgccgcgtgggagaatatcacaggtggattctcagctacaccgcggagaagctcccgttccgaaaccctaaggtccggtttccgcgctctgttaacctcctcctcctcggcctccattaaagctcgaacgaccttctcgacagattcgtactccggtagacgcgggtgctccataccggaatcgtcgcaccaatgagcaatcgtggacttgatggctctgttcgcaatcacggttgagaaatcgggtcgggacccgtcttcaagcttgggagaaaaccctaaatctctacatacttgtacagtggccctctcaaaggtctgacctgaggagacgataactgggtcagccatcaaagtaccataaacggggcagacgaaatccttagggggtggcttgatatccatttttgaggtcgagggagacgaagaagaagaagaggaacgatagaaggagatcttccacctgtgtttaccattaccccccataatccaaaagtaaagctcaaagagattctttcaatctcaaatccgtattataataaacatatgtctgtgaataaacaaagttgaactagtcaatggccaaaatgggttttggtccaaagtaaagattgagcaagtaaaaatggtaaagaatataaaaagaataggtcttgtagacctgtagctatggcggagaagatgaagatgttagtagaattgagtaagcagaggtaagggaagaaggagggagagtcgagattattgggtctcttctaagttctagcaatgtttttttttttttttctttctttcgttttttccttattatgagcttttctatgatatttttttgtttttaccaaattttctttttttcttaattggaaaattgtcaaaattgatattcttttttttttttttccttctggaaaaacaagattgaccactccacaccgattaccaactcgtttggcaacgacaccgtggttggtttttttgtctagaaataaaattaaatcaaataattttttggcaactcgtttggtgtggaagattccgctcagtagtcatatgagtactgatttatggtactgattacatgatgtgtcaggagtttttactgttaggagtgcatattctctgcttaaatcaatgaaacccaacaaagatattccagatagctctggaatctggcggctcttatggcagctgcagctccctccaaaggttcttaatttttagtggagagcttctaccaacagtct

SEQ ID NO: 29263 - DNA, 2677 bp, Cannabis sativa
ctggaattgaaaattctcctgcttcttctcacattggttatgaagagcaggaaaaagagctcgataaaccatttgcggaagaagctgaaccttatccaatttctagtgatagccagatgtcatgggacaaccctgcagatatcagttcaaaggtccatgattataatacggctgaacttgagcatggaaatgaggattttactgccattggtgaactgagaaatcaatcaaaagtggaagatggagatatgcaatcaagcaacagaacagatggaaacaacaacagttgtctaagcatttctgctaataatgatcacaagatggttattgacaatgtaattgaaaaacaagacggtgaaattcatcttaccagagaagacactttgcaggtagatggttccttattaggtgaaaaaaccatttttactgaagagttaaagcaggaaattgtttttcaatctgatgaaacagaagttactgatgtgtgtcaaactgagttgagaagtcctagaacttcttcaatgccaaattctatgctagactgtgaatctaatgcagctgcatccgtgcagtgctaccttttggaggatagatcatcattattagtggaagacattataccaatggttgctaactgtgatctgaattcccacgcacaacatgaggttgggttccacgatcaatctacttctgtagaatttggtaatatggaggaagttgatcgagcaggagcagtggatgctgaagatgttaatgcctcttgtcaaaaagttggaacctttggctaacagtgaagtagagaacccccatgttacatgtgaaccaagttttgcagtgcaagtcaaaagtgaacattcgtcaaaaaataaaatcgagcatgttgatttagaagttaaaaacaatttatctgttgaaagttctcactgtagttttgattcacagcctggagatgagctttgtccttgtgatgataattcttcttccatggttcaaatgtatatgctggaaggtgaaaatgatgacaatgctaagggtgaccaaattgagcaaatcacacgttaccaatgtgaaaccaaagaaatatgtaatgatgaagaagagagtacaaaggctcctactttgtcatttgacaatagccactctctggaagagcctcaaatattggagaatgagtccaacaccagagtcccacttcatacagacatggctcaaacgtttaaggaatctgagggaggtaacctcgtaatcgaggaacaagatgataactgcgagcttcaaaatccagttaatcaaattgaagaagtttcctcagctagtgttcctcaagatgaggatgccacagaagaacagtacgtatcttcagtgctcattttgtttgtttatttcatgtcatttcagagtttcccttttcttcatctatataaatatgaaaattctgagatgcataaattttatgcctgtagttgcagcaaagaatctggcattaatacaaaacaggatgttcttgttataaaacctccatttgaagctgccggagaggtaagacgggtttagtactttatttgtattcataaataagttacttggctaagttggaaattgttgattgttttcaaatttctctgcaggaaattttaaccatgaaaagtgatgctgtacaaaattcaccagacgaaatgggtggtcatgactcctgatttttatcatggcatttgttgcatttgctgagaaggcaagcaattgtttacgttgaaagaagatacaatactgctgataccaataatggcgatgaagaaaatgccgagcctttcagtgtcagtgagaaatggaccttagaatttggagtctgcatggaaagctttgtttcttgtactccagagggtaagaagaatcacaccagcaaattgagtaaaaatcgaaatttccatccaacccgaaagcctccagaggcttaagtatctttctcatgtgtgatgtgatttcatatgaaggttgattatttccaatgtatgagaagtttttccaatggaccttagaatttggggtgaagtttttcatagatgtttttggctaggaagtgttgtctttgatgtttgttagtttaatgattcatgagttgttatgtgcattgtaagttcagcttgaatcaaagcaaaagcaaaagggagtcatgttattgtaattgtttgtcaatctcatcgtttgtataattttttgactatagaattcttacaatattttaccagaccaagtacaaaatagggtttttaagattcaaatacataagaaaacagaggttacaatgatacaacctttaatttttattttgaaaccacactagttgaattgggttgagtagtcatttggtatgagatgagtaatacttttttatttttctctcaattttcatcacataaaactaaaacatgtagtggaggattttttttttaagaaattataaattttaaggatttttatatttttttgtgcaaaaatatggttttttcttttgaaaaagttattacaaattgggatattgtcggccaaaatatatgaactttaaattttttaatacttagccacaaaaatcgattttttgaaagtaaaattacttaaattctcatttcgttttggaaacatatgtataaaaagaacatatttcatttagtctctttat

SEQ ID NO: 29264 - DNA, 1780 bp, Cannabis sativa
  modified_base (221)..(222): a, c, t, g, unknown or other
ttttgccgcaaataacccaaaaaaaaattaagaaaataactaaatataattaattaatttatgaaaatcataaaaatatatttactatatattattttttttaaaaaaaatatataataattaaattaagttatataactttttaatattgcatattattatattgtagatcattaaatatatacaacaatatttgatatatcgtatcactaaaaattaanntaccgtagtaatataaaaaaattaataatattaaattaatattcaaaaaaaaatatattatgctaataaaattataggatttttcttaagtgacagcattacttttgctcttatctataagagcattttcttttagttttgattggttaagatagtgagagatataaaattaaaatgagtaagtaaacatacaatacatactattcataatgttaatattaatttatttttttaaaaaaaaattaactttattaaagaagttagtgggattttttccaaaatcaaaataaatttctcaaatgcctattttacggagtataagtttattttactttatttttttcatcatccccaaaagactctcgatagccaccgtctccaacacatcatgatcatcagaaaatttttgtacttaaattcaatggaaaagagtgttgagtctaaatatccctgttaataagtgcataaataataaatgataattatttgatcctcccacaaatttgtataatttatatagctttgaatatgtgcgggtaattatataaaaaggaaaccgtgtgtaagatttttgtgttcatctctgcgtataacctatctatacaactgcagggaaattttctattatatatatgatacatatcaatctatagggatgaatatacatacatacataagtataattgaattataataactagccggtcataagctcaaaggacattgatgccattttagctatatatacattttgttgctttgaaactactaatatttccccctttatttatgtatttactttttattgttggttcagttgaattaatcagcatctaaatattgaatgactttgacaatggtttaatcccacaaagtttgatatttgaatccttcacagacatccacgtagaaatcgctattgttttttgctcctaaaataatgtaattgcagtgtcctcgttggcaactctagtgaatgaggtggtggcggcagcaacaaagtctgggttttttcttttccttacagttacccaaaaatgtcacatgggtagaatatgagttaaaaaataaataaataacaattctatgtgcgataccttatgataacttaagatactacaaaaatttactaccactggattaaaaattaaaggctataaaaatgctcttacttgtgagagcaaaagtgatgctctcacataaggaatacccgaaaattatatataccactattaaaatatatttacatactaaaaaatttaaatataataaaataaaaattaaatatcatcttaaataaatgatgtactataggtaacaaaaatgatataccatacaacaaaacatatatatctacaataaaaaataaaataatataatattattaaaaataaattgtataccatattaacaaaaattatatacaactataaaataattataccacacttacaaaattacatatcacctttatatgtaataaaataaaaatcaaacatgcaaataaaataatatactatgcaataaaacttatataccatataacaaaaaatatata

SEQ ID NO: 29265 - DNA, 1949 bp, Cannabis sativa
tcatttaataaaatagaaggtccagtcggtagtttttgcaaagcacaagatccaaaatagtatttacacaaaataaattatattattaagctattgaatgaatatattacaatatgtgctgagcacttatttatataaaaagaaggaaggaaaacgaagctcaactaactaaggaagcatgagttgtactaactgataaaggtaacaaaattacctatcttacgtaactaacaataacggtaaaataactaattgaggaaaacaagtaaattctgttaccctccttaagttgaactgtatatgtcatatacatacatcttgctaacataagtaagtatagtagaaggcaagagtattggtaaaagcatcagcacgttgtaagacctctaactcatggtcatcttattaagttctttcccttacctgcaccaccaagcatccgtgagtcataaaaatccaacaagacaagcaataactcaaacactttatatcactacacaaataaatacaatatagccatttaatcataatcaagtaatcatatactcaatccataggaaaaaaatctcacaattatatgaaagaaattattaataacaaatattcgtctaatgagacaagctaatgctgttacttaataaagtaactatttatttaccgttgtctaatgagacaatcttaatactgttgcctaatgagacaaccaatatcactatcgttgcctaatgacacaaccaataagtaagaaacttaacaacaaattcaaattagagtagtaactccttctcatattgttgcctaatgaagaaactaatggagtgataactctttcttatagacggtaattaccgtaccataaattgacatactatgtgatgcaattgtccttttcttacctcaagtctaaattcaagtgtatcgataaacaagtggaaaatgctcgacgatcgtaggccctatgccacaacaacgatagaccagtaaataactcaattaaatccgttctaggatttaaactcaaaatcgaaagtttccttgttgataaatagcgtgttaataccctaaatatcaattaaacacaaaaatgaggtaccttaaaacctccccaaacagtccaccagacccccaaacgattaaccattttttggggccctgtttggggaaatggttagccgtttcctctgcagaaatgacaaacttcgagtttcacttctcaaacccttcctaaacttaaccaaaacctgccaaaatttctagaacagttataatacaaattctaagcataatccacaactcaacaatcataattgtacaacaatcacaaaactactattaaagctcaagcttgagttttaagaactcaaacttgaaactttcaattaaacaacaactaacaacctttaattaacttacaaactacaataatctaagcttaataacttaacctaacacatacaacttcatacagaaacaaaaccatgaaaattacacttaaaaccaaactttttcttcaaaatttcacaaagataaggaagagctaggttaccttgaacttccctcacttcaacactactcttaagaaaggatttcttggataatttgtggaggaaacaattttgagtaaccttggtttgctttgggtttcaccttggccgaaaaagagaaacaaagagagagaaagagtattttgattttcttaggtttcaccttgcccaacaccaattcaaacaaacctaaatcaaaccccataattcagtttaaacaataacaaaatccaacagaacgtaaaattagaaaataccataaaaacctcaaataaaccttgaaattaaaaaaaggtgaagagagattaacttaccttaaccttctcaaccataaaataaatatatagcttataatttaattctataaactaggggtgggcatcatccaatccaattcaattgaac

SEQ ID NO: 29266 - DNA, 2522 bp, Cannabis sativa
catctcctcagtttctaataattaagtccaacaaccaaattatgccttgaatgcataattctttaaatcaatatataaagcatggcatagaaattaaaaatcaataatcactagggtaataaccctagaccatataaccgcttactttagggtaataaccctaatctcggttcttaagtaatcatatttaatattcaacatgagtgccactgcgctttactctatgtactaactagtgtcttacttgatgtcctgcaaatgtggagattccaaatccccgagtgctcttgaccaagtgctggtaatcctagtcacaaattcttgagattcacaaatagggttaatccctaaatccattctcacataattataaaattggaattcaaatccagataaaaatatagagctcagaacgagctttccaacgatacttggaacacccaaatctaagtccggatcacaaagttatgaatattcgaatattgcattcgaatatgcctagaaacacaagacgggccgcggcactccccctaaggggccgcggaacctgggttgaaaacctaggactttcaaagaggcgggccgcgacgcctagtgagtggagccacggtacctgggttccaaacccagaaagcccaaaaatcaacaacacgaattcatgtccaaaccctccaaaactcactcaaaaggatgcagaaactcaaatgtattatacacaaattatagctaccacaatagggaattatgaacacaaaattaaacccccgtccaatataaaaataagcatttaaggtagcaatcctcaacaatcaaaaataagctcaaccttgagctaaaaccatcatatcttcataaaaagaagttgcactccaaagtctcaaaataactccaagaacttagcatgcaatttaaacaaaatcacttcaattttagtaattaaaaccccaatttcaacataattaacacacaaaataatcaaaatgcaaaacatataatttccaagcttaaacaatatacacatcacccgaaactatcacaatcaaaccaacatgcatttaagaacatcaaagaaaatcatgaatattcaacttcagattacaacaacaaaaattaaaggaagaaagaggtggaaagctacctcaagctcttcaccaaaacaagcaccaaaatctccacaacacaagcttgattcaaggttcaattcacaaagattagaaatttgaagagatgagaatagagagacggttaagggctggacaaaaccataattaaaatgcattttaattttctgccaaaattccttttattgaaagtaaaattaaatggtcaaaaagaccaaaatgcccctagggccataatataacatattcacaactcaagggcaattaagtcattcaatcatacaccacatttaaataatttctcagattattcaatcactaataaaataccaaaataaaatcttgaaaatgtatttcggtcccgaacccggttcggcctgaaatacccgattatgactataccgcaccgacttgtcagaaaatacctacagaaggacaaaacaagaatactatataataatatagtccataagcacggtagaacattaaaattacagtttcacccctctcgggtcaaaattacaaaaatgcccctagctcaccaacggggtcttaacatgtcattaatcagcataatgcacacatattaaattatacaataatataattccacattaatacacatttaactacttcatcccagtgaataggtgacctacattttcttccatataacaattaagattgagccatctcgattgttgcctgatagctgttattgtacgagaactcgatcaagggaaggtactttacccatgatccttcaaaatctaacacaaatgcccgtagcatgtcttctaaaatttgaatggtcctctcggactgtccatacatctgaggatgaaatgatgtgctgaatttcaattgagtacccatggctcgatgtgggctctcccagaatcttgacatgaacttcagatccctatcagaaacaatggaattcgggacaccatggagacgaactatttctctaacatacagttcagcatactgatcaattgagaaattcgtctgaacaagtaaaaagtgtgctaactttgtaaacctgtccactatgacccacacagagtcgtattgtcccgtagtcttaggcaatccaaccacgaagagggaacccaacggagacaacaaaggaatagggttcaccaaagggatgataataaattagattgggaagggataatttctgatgaagagtttgatgggataccagtaggtaaccataggaggtatggtcgggatagagaagctaggaaccaggtagataattattcgggatatataaagatgaaaaatctctcttttcaagggaagagtgatcctgaagcgtacccggagtgggagaagaagatggaattggtgtttgattgtcacaactattctgaaacgaaaaaggtaaaa

SEQ ID NO: 29267 - DNA, 1371 bp, Cannabis sativa
  modified_base (599)..(600): a, c, t, g, unknown or other
  modified_base (1209)..(1212): a, c, t, g, unknown or other
  modified_base (1309)..(1343): a, c, t, g, unknown or other
aaaacccaatttgctaagcttctttttaactttgtaatgggttctaagaattgtattccctttttgaaatgaaaattttaacaaactcaataatttatcgaatatgttgtttcatatttcaccaacaactttcaaatgcatctacttagcaatgaagttgagtgaagatatccagttgtaacctggaaacaactccgttttaatctccttaaacaactcgttctaatacttgcacatacaatttccctcaacataggtatattttcatcgcgtgctggagaaaagacatcatcgatgacatcacgcttctcatctgtatcattcacattgattacatcatctactatagtaacttctgcttctccaaggaaagtccactactggtaactagtttgaaaaccccatcagaatatgtgtccacacacatcctttggaatgtgtcatttaaggttgatgcatttcacatatggacatctaatttttctatcagaactcttgcgttattcaaacatttatgaaaaggctaggatacctttttatcaagcaggatcagtgcgatctcgcaaatgttagggattattttaccaagatctagattnnctaacatgtatgttgattaacactttaaatatgaattctctaaaataatagaattaaacacgtataaagtttagaaaatcttacattggtggcagcggaataatatgtttccttccactcagatctctaactcttgtttctttttgtcagagagtattaacaagatctgagtctggttttccttcaggtgttggattcatcacagtatttcagactgattgagtacaattgacttgctatgggtaggcatgtactctttcactatagggcttcgaaatatatgaagagaaagagatgagaattcgaaatctatagaaggaggctctcaattttgtagttgtttgacaaagttagaaacctagaatgttaggttggatgagaattagaaccatcttattccttatataggatttctcttagggttagatttaaattatatggaattaaaaaagatgaaattggctaaaaattctccttaggtggtcgaccataggttgggccccattagttagaattttccaattttataatttatcttttctttcactaatgtcataatttccaattttaaccctttaaatgtctaactatttatttaataattaaaannnnttatcaaataaaatttctatttagcttatttattaattagacttaacaaagcctctcaattaacatataaactctaaaacttcttttcttcacaatnnnnnnnnnnnnnnnnnnnnnnnnnnnnnnnnnnnatagtctaattttaaaattataatcgat

SEQ ID NO: 29268 - DNA, 2839 bp, Cannabis sativa
ataaaataatatgatattgaatcttagtatcttgagagtcactgcaaaaagaaacttatatcatattgtctctttagaaaacacctaatatggttgtgaatatagaattatgtttgtgattatattagtccatacaagattttaatatctctcccatttggacaaataaatcaacaaataccctattaatttccatcatgcaatatgcagtcaaataaattatgtatgatatcatatcgataagatatgtatactacacataatttagactaggagacattaaaatataatagcagccattaaaccaagaagcatgtagtacaccaattaagatcatatatcagtcttattgtgtaattgtcacttcgagaaccaatacacataagaagtgactgcatattattatgaatgcatagattaatctctttaggtgtattctactttaaagctttttaaaacataaaaactttcaaactttgatgagtcaaaactttgagagactatatttaagacaatcctatgagagagatcttagcaaataagtaatagggagccaattttgcaaaatcaccaggggagttggctaagcaaaaataaaggaaaaaaatctcgattaagaagaaagcaagaaatgctgccaagaatgggatgtcagggtctcaggttgcgagaggataggagaatgaaggaagggaaattacggtgggggtagacgggactataaggccactggaagaaggtgaaatgattgctggagctactgatgcaatggagaaaatggagttaagaaacaatatcaatgttgaggtgagtatttcttctaatatggatttgtcatctctttttgtaactaatgaagcggcgagccttgtggatcaaggccactgagcacaatgaaaatgattaggtggaacgtctaaggaattgggaattcctggacattacgagcatcacaatcccatgttcgtgatattgggttgagtattatttttctagcataaagtaaattgactcgtactcaagctgagcgggtgagtagtgtgttgcattttgagaacctttggacagttgacagagtggggttgagcgggtgggttgcttttgatgtggcgtgatgagatgcaaattcaggttttatcaagttttcctggccatattttggctattgttgtgggtaaagggtttgcaccttggacgttgacttgcttttatggtaatcccgatgctagccaatagagattctcttagcagttgttacaaaatttatgttcagagattagaggagtgtggttatgtgttggaggctttaatgagattattggccttgctgagaaggtgggtggacgtgatcgttttgcgagagctatggaagaattcaaagaggttattgatgactgcaaattgatggatttcaactcgttgaagcacgaattaacttggtgtaataagcatgaacataataatgttatggagcggttggatagaggattatgtacggtggagtgggttagtcagtttgatggggcggatcttagtctttcagattggtgggagtcagatcatcaagctttagtggttagtataccgactcaagagtagggggataagtgtggttgcgttaagcgtaatagccggtttcatttttaagaagcttggtgtgagaaggaggagtgtaaggagatagtggaatgatcatagtggttgaggtactactgtagcttttcgtgaaaagattaatagatgtgggaatgcattacaaaaatggaataaaaagataaagagaaatttaacaattgagattgataaagtaaagaagaatcttcacgagttgaccttgaagcagcagcttggggtgtgagtggaagtgaaaaggatggaaggttggctgaatgatttattggagaatgatgagatgtatttgtgacagaggagtagagctttatggctgcaatgggagatactaatactaagtatttctattataaacccacaacgagactcaagaagaatgacatcaaagggctacgagatcatatgggtgtttggcaagatgataaagtgttggttcaggctattatgaaggattattttgggaagttatttacagctactgagacgcgtgatgtgattttagatggggtcttggatatggttcaacctaaggtttcagatgctatgaatgcagatttggaggtaaaaattcaataagaagaagtggttaaagcgatcaaggagataaattagactaaagccacaggagtggatggtctctcgaccttattctatcagaaattctggtcaaagctgaggaaagatgtcattgagatatgcttaagtatgctaaatcatagggttgatctgagttgtattaatgatatggtgattgccttgattccgaaaattgacaagcctaagtgtatagaggaattttgaccgattagtctatgtaatgtgatttacaagatagtgtcgaaatgtcttgctaatcgactttgacagtctttgcgtttggttatatcggattcttaaagtgcttttgtcaaagaaagactcattcatgataatgtcatcgttggttatgagagcttacatgtaatgcgaaagaatagatttcaaaatagttcaaaagtggcattgaaactcgatatggcaaaggcgtgtgaccgtgttgaatggtgtttttttacaagccatgatgttaaaattagggtacattgttgcttgggttaataagataagggctcttttcagttttaaccaaaaaaagtaacagtattacaaaaatacttccagctggccaaataaacaaatatacaacctaaatagaaaaaattacaca

SEQ ID NO: 29269 - DNA, 2082 bp, Cannabis sativa
ggaggtagagtttttgtggaacaataggcttggtgctcaggtacaaaggcctaacattggggaatggaaaaattgccccaatgattctgttaacctaagtgaaggagtataagaagtatatctggaagacagtgtaagaatcaatatttttactatgacaaatatggtccagtcacctttggcataactcttagttgtgtctagagtttagttgtttttagtaaaatgtccacatcagatgtttgggcaactcgtttgttagtttctattacatatgtaacttttttctggtgaatacctaattttaggtcaatataaataccactctttctattctgttagaactagccttttttattgaggattagggattatgtttctttccttcttattttgttatcttttgcaagttcttgcaagaactccattgggggtggttcaaggttttgttgcaacctttgaagtcatggtgtgaggggattttagctaagacttggcaccatagatctaaaggtgttcagatttgaacttttgttaatgggatttcgatcaattgaagtaagggaattttgtattcataaccaaggaatttggttaactggggtaaaagttcacttctgtaaagattgagttgttttcttattgtaatccagattggttattgtacaaacattttttaatataatgaaggttattatcttagtttgggaacccaagtactagtcggattgaatgagtttacagtgcaaataaagcttgtaaatgttgtgttcttaattctaatctgagtaattattttccaagtaataattcaaaattaaataattggtgcaattaaaatgattagagaaatataaataaattcatattctaggctttttaattggtattaaagctataaaatttctgagaaagtttgtttctatcctcctatctttaatactctacaactgtttgttatttttcctctgtgacatttttggttcttgatttctagtttatctagttgacactcaccctctctaagtcttaactttgggagtatattgcattttttgtgtgtctctggtgttcataccagatggagatgtttagggaaggtggatccacatcatgaatctcgatgttagaaggggctaattaccctttcatgaaataaaaaatgtgggcattcttaagagctgttgacgaaagagtttggatgtccattgaagatggctggagagatgcccaaccattgttgaagatgaaggtattaagatgaatatggttgtggattccaaaggagatggagatggcaattttaattcgaaggcaatgcatgctctctttaatgcagtgtctaaaaattagctcaaggtcattgccaactgtgaaattgctaatgaggcatgggaaaagttgagaatcaaggatgaggggacggatgctatgcagaagtcccttctaagagcattgtgcatttcaagttatgtgcaaccgatcttttcttgataaactatacctgtcgcattatagactagggcatttgaactttagagatttgaaaagaatcaaaaaacttcgagcaattaaagggatacctgatatggaagacaccagggatagactgggtgggtcgtgccaactaggaaagcagacaaaagcctctcatcctccagtaaacatatatgcttctaacctcacgagtgttggaatggatacatgccgattcgataagtggtaagcgattttttatgcttttggtagatgattactcatgacatagttgggtagagtacttcaaagaaaagttacacacttttcgtctattctctgcattggtcctttggttgcaaactgaaaaggactctaaaattggaaaagtatatcggatacaaagtgaccatgggaaggagttcgataactcaatgttcttggatttttgtaatcatttgggaattcaacatgaattttagctccgaagacaccttaacaaaatggagtggttgaaagaaaaaaaaataagattctacaggaaatctcacgagttatgatgcatgataaggatatctcaaaacaattttgggctgaagcattcaa

SEQ ID NO: 29270 - DNA, 3228 bp, Cannabis sativa
aaaatatttttattatgctaataaaattatataccactattataaacatcataataaaaaataaatatcatctaagaataataatatacgtaccatacaaaacaaaataaaaatatatcatacaacaaaatctatataccaacaaccacaacaactcataaaaaaaaaaaaaatcgacataacttttaaataaaaaaagattttaacaaaactaatatagatataccataatctttaaataatttacttctaattctaaaaaaaaaaaattaatgattttgaaatgaggacatttactaacatagtcctatgatttagggtcatttgctatatttttttaaaatgaggacataaactaacataatcctatgatttagggccatttactgtaattttccttatattaaattatatgagacctaatatttaattacatcaatagcggtataaaacgcacgatgagggtgctagacaccactagggttttttagcatttctcatttcgaaataacattactaatgagcactttaatgtgccaagcactaataggtgacataacactattagtgcaattcaatattgggtcccacatattttgatttaataaatcatataagaaattgctaaccactcattatgtgccacattagtatgatattgggtcccttaaaatattagaatattatacatacggtgataaataaataattagatttatgttataaaataataacgaatagagacttaatagaataagatcgaagacaaagaaaagagaaaataagagagtgaatgagatttttttcaatagtttattctaatggggtgaacccctatttatacaaaaatataactagaataatggaaaactaaatcaataaaataaagagaaatacaatcaagaatttatggtggtaattaatgcattgatttagacatccataataatattttataacacccccccttggatgtccattaaaaatatctcattaaaaactttgcaggaaaaagaaagcagtgtaaattaactctcactcatttagacattcgtggagatattctaatcgatgaattccgatcttatgaactatcttctcaaatgttgatctcgataatgactttgtgaataagtgtgcatgattggcacttgatttaatatgttggacaccaatatagccatttacttgaagattatgtagtaagaagatcttggtaaaatatctttggttctatctcctttattatagctttagttgagcaatgcatttcacattatcttcataaaaaattactattgttaatattgctttattgagtgtaatctatatgttttccaaatatattatatgttaatgattttactcccacgcattctctacttgccacataaagtgcaagtatgttaccataatttaaagttgattcgttaaaaattttgtcaggaaaacttagtgggataaaacctgaggtaagaaaaaaaagagtgcaatatttatatttcatattcataattatttgcaagttgcttcattaaaaactttatcagaaaaatccagtggaacaaaactttaactaaagaaaaaagagtgcaacatgaaatgtcaacccttaatgcacatatgatctataattcttttggtgataatagatctcataagattattgttatcacttttaaaataccattgtatattatctatgatcatacatttaccataactcttctaaagtatgtgtggacttctaaattatggatgggggttctaggaacttcaataattatccaacttattgaatcgtgcgtgtatacaatgttgctcatatcaaagtttcaattttaagtagttatgaacataacacattaatgataatataaatttttatttgcaagaatgatggtactctaagaccatatatttgttctattcttgttgtatgatcataattttcatatcaaatgatcatatatctataattctttatgcatatgaagtactacagaacttctctactaatacttatgaacaaactatatacatttaatatttctcaatatacaaaaagaaatcaaagtttgttcttcaatcatttataatataatcaaaacctcttcaagagtctatcaaaatgtataattttaagaatttatattgcatagacaatcatatgtgtttttcaaataataatttacttacatgtctttcttttatacaaagatctttgtcatatagtatgcgcaactttaaatttatatcacttaagacatgtattacattcttctagaattttttgataaggcatatttcaaattttcaatatattaggagctacaaatagataaatttttgttgtaatatttatgtgatgcttataaattctcataaaatatattttaggctataatcaaatcttgattatattttctcaatatttaagccttatttcaattaatctcatgtctatgcaaactttgtacaacaatttattttgtgtataaatatatatatatacaattttctcattagaaatatttatttgcacatcctacatgtcttactttaatttatgaaaaataaacttgtctagactgtgtcataatattttggccaaaaataaaatatatgtcgataattcccgacaagtctaatatcatgatccttgctatctcatgtgaacttattgcatatgcaaacattcaacatctattgttgataaaatattcatgatatgataatttttacccacattgacataacttatagagatatcttcaaattacatattttttttaaatatgtatatcatttataggtacatacatagaaccacttcaaggattcaattatgaaatatattatgtctaatgtaacactctactagtttaggcgtgttatcgtgattttatattaaatgtgcagttcatttctaatcaatgaatttattaaaaatcgtgagtaattaaaattttgcttaattactaacaatattaaaaataaattacttttatataatcgggatcccgagtttaaaatatttacaactgattcaaaatacttgatgtaaaagttatcgcctagcgattataaaaaaaatacaaccagctgtcccaaagagcatactctccagatctaactaccccgacatgtacaatctgttagacatttatatgtataaactgaaatgtatatgtttaagtattaagtgcggaattaatcaaacatata

SEQ ID NO: 29271 - DNA, 3290 bp, Cannabis sativa
atcctcaccccattaggggcgggtccccgcgaggcctcatccccatgggcgaaatgtgcatccctaattggaacccaactgcgaattgcctgaaccacgacaagacaatgtgattccaacaccacatcataccaactttgatccaactcaaagcttccttgatctcaatcgcctcttccatctcaacaatgagtgcttgacaagtaaagagtctgagtttctactatcgctccattagaatctcttgcaaccaaatccaaactgaaagcactaccatcaccaagcaaaattgcaaaacaaaattgcatcagcaccaccttttaagaagtaaattgtggtctaacccaattcagcaccatctctaccctttatggtaggaaacagagcaacattgactaaagactgggccattctccattgttcaaggtaagacattgcagatgcaacaatactgagggtggtggaacttttatgttgacaaacacgtcattacgggcagtcccaagagcccaaaataccactgtaacctcacatttcttttcattggtacagattgtcaaaatcttctcaaactaatcaccaaatttaaatgttgaagttaaaattctataagacttcgctgctagcactcaacaaccaacgaaaaagaaaccaaagcatgaaaaatagtttctcctctcttgaataagtaggacaataaatttgaactgagacaaacttagaagatagttgaaccattgtagaaaaagaatttgaggaagcttgccataactaattaagtactttaagatggaggaacttttaaatttcaaagtttacgccaaaaatttgagctattagtcgcatgccaatttcctttttgctcctgaattaacttgtaagcacttcaacttgaataaaaacctaaactttcattttaccaataacactgattagctgctgaataagagccattaggaatactcaaaatgaaatgctttgagtaataactcaacatcccaattgcatgcaatactatatttgacattgacatgtattaatagttttgataaaattatactatttttcagtgtgtaatagaaatctaaagtaaaattataccacggccccggccaactatggccctggatcccaaacatcgaacctcaacgcaaatcgcgaaccctaaagcccaacacaacacggacaccaaatcatagcttgactcaaacctcaaactctaacccaaacctcgaatctctctccgaccccaaacttaacttcgatcccgactctcactagctttaccacagtacaacttaagtttataaatattacattgtattaaattttatgatcgtaataattaatacaatataaaattctatccaaattcttatttaatataatacaatgccttatgtagtatgtcaaacgaaaccgattaatataatttaaaatccaaacattaatatatatatttatattcaataaataatataaaataattaattattttataagacattacttgatattgttggtgttgaatagtgacccacatcagctcgctagattagcgtgatgattaataaatttaagtaaataatttagagagacacacaaaatttatagaagttaactcctcatgttgtgatggtaatggagctatgtctacttcgagaatttattttttacgagcattacagaaaaagcctaagtatttaagttctagtttctagagagagatactctggccttgtgggtagttttctgtatgtgaaaaatgagttaagggagtcatccttttataggtgaaggaggtccaaaaaattaggaaaaaaatacaaattagacattttttaccgtaaatgatggtctaactatgaaaattagcttctagtagtgatagccattttttggtgcctgacgagtcccgctgtgcgtagcccagagcttattttcgtaactcccttgggggtaaaatttgatgatgatagctttagaattacaattgaagtgtaatacatgacttaaattgcgtcaattggatcaatattgagtgagttatgactattttacttaaggtaattcatgaaccagtgcctaggttgacatccagcgcccaggttgacatcccagagcccaggttgatatatgacgtcaacatggacgctgggtaagtgtaaaaacatcttagggatgtacttgaagatgctcaagtaatattttaacatcatttagtctgtttctgtgttctagcaaagcaggtcaccagttcttagagatgttgctgttttgcaaaaatgagacactcaaaactcttcattttcgagtgagtttctcatgttagaaatgaaaaatgtgaagttgtgaatttaacttctttgacttcatggatcttggttattgtgaaacactagacggatgatcaaactagaattggaatcagataagcaaaatccagcgcaccatgtcatttgtcaactttggcactggataccttattctcgggatctcgttttgatacttctaaggtttctaaatttgaggacgaggtctcatatcctatttttgagcattctggattcattggtcgaatcaaatttggcatttgagaaattgaaggcagcgtcccagggtgattctcaacctaggcgttgaggcccagcactaggtcaacctaggcgttgggccctatttataggcgctcgagtttgtgattttctccctaagtttgcttgaatcttcattattcctgatgatgaacaagaaatctgaacactttttggtgaacttgatcagaaacagtccatgttgataaagtgtcaacatgggcgttgggcccagtgccaagtgccaacctgggtgttgggtcctagttatggccttccaaaaattctatttgatccccaaaaatagttgaatctaaatattttctattttggagaagatgctcaaaagaaatctttgaaaacaccattaaaaatggcctaggttgacaaaatgtcaacctgggtgtagggccagccctaggtgtaaacatgggcactgggccctgcttatggcacccaagtaatgttgtttcttctctaaaaaggacttatttccccattttttatgaagacaaagaaatgcaaaagtcggatctccaatctgatacttggaaggtgccaaaattgataaattttcaacctgggcattgggggtgctcgagtcctcgcgaccttaggtactcaaaaataaacttactctaattctaattatgatgtcttaaatatgtttgtggtatgtgttggaattattttacc

SEQ ID NO: 29272 - DNA, 1792 bp, Cannabis sativa
ttgattttcttccattgttataaaatctctaacactctacaatttgagctatttcattattagatattaattataatttcttttgacaataaataaacattaatcttaattaattaataaagttaaattgatcataaaatctattaataacaatatcaaaacgctagtaatatataataacaaactattaaaataaaggaaattataacaaaaacatttgacaaagagaacaaaatatatttagattcatttgttgttttactataataagttaaattgtgagtatatatataacattcattttagaataggtatggcttttgactttcctcatgactgttaattaggttaagtatagatattttttagttaataatggtatagtagttgcttacgattcatgaaaataattatcaaatgtagagacccaaaagacaatactcaataggttatggaccttaattattatggctttcttgatgattctatacaaagtccaccaataacgatatttatttaataaagttataacaaaaattaatttgggtccaaaatattaaacatgggaaggtccaaactgttcaaagcaaggcagtcttggaagattgatcaactacataatattatatatatatatatatatagcgcattgctattaggcaccagtgtctagcaccttctcgacatgtcatgttgcgattggctagcgatactccgtaaaagctattatattaaattatataggatccgatacttaattagactaatagcgatattaacacacaggagagtgctaggcaccactggtgccctttagcaatatatattgctattaggcaccagttgagcttaacaccttctaaacatatcaccttgcgattgactagcaatactctctaaaagtaattattacattaaactatatgagattcgataattaattgaaccaataataatattgacatgtaggaaagtgctagacacttctcgtgccaattagcatttctcttattaatataatgaagataatggtggtcaatgctctcaaaattaaggaaaagatttttgggtcctatcaattgaaaaaaagtgtggttgtgaaggttgatggtgcaattcccatttccttttgggattatagacctagagatagggtattacatgcacattggacccaatcaacaacaacaaccttttctatctaaaaaaaaatgaaaaataacaaaattttcctttttttttttttttttttttgaaatcacaaaattttactttactagttgatatatatatatttttttttttcttcagcaaatgtgcttaaaacgttaattttccttgaatttcagtacaaacagtttactttgacttttgagccgttaaaatcagtgtcagcttagacttttttttttttactccaaccacaaataaactaaaaataatattatttattattataagttattttttaattaaatggattaatttttattaacaggaataatattaaaaaaatttacaatgcatcccatatgttatacacccctatttattttcgcatccagaataattttttagtttatatatatatatatatatatttttaattttcgtgtacacgttgtagttatttaagacatcctataaaattttgaaaaagattaacaagtcaaaaacaaggttcaaactgtctgctgcatgcgcaactattttattttataaaatagttattttattttcgtgtacacgttgtagttattttattttcgcaaatagttatttattatcattt

SEQ ID NO: 29273 - DNA, 3860 bp, Cannabis sativa
  modified_base (45)..(65): a, c, t, g, unknown or other
attaaatattatttctgatctatagtaataagtaaatctgattannnnnnnnnnnnnnnnnnnnngggcataaaacccaacatctttaacattctcaggggcaacaaatttcagtggacaaaggaatgtgaaaccgcattccaagagctgaagagacaaattggctcagtaacttgttttgtctgaatccctagacaaagaagagctagacatgcacctagcagtcacagaacatgctgcgactgctgccctcacaagtgaagaagacagtgtacaacaccttgtatactacaccagtaagagactgattgacactaaaagtcaattcccactcatggagaatctgacccatagtttgcttttggcttccagaaagctaaggccatacttccagatacaccctataaaggtgtacaccgatcaatagttgcgataggttctacaaaaacctagagcatcaggcaaactactaaagtcaaccattgatactcggccaacataaaagcacctcacaacaaaacatggccaccaaagaccaagctctcatcagcttcatggccaatcatagaagcatatctcccaaaatcttttagagtttgggagaaaaatgaatgagcctgagaagaagcgagggcaagaacccaagagcttcattgaccacctgcctgatggaggcatggccttcaaggcacatggggggcaactgaggcacaaggcaataaggttagttacaaagcttttaacaatgaggctaaacataaatctccaaatactggccccaggttagcacacgaagcatgggctaaccacctagacatgcaccatgactctcagctagtcgtactttatgtcctaggtgaatatacatctcaatacaagaagatgatgccgtactagtgctttttagacagctcaaaggctatactagaagccaagcccccaaagacgacacaacaactgatgtactcgctcaattagtcatctgcaccttgacaatcaaggcaaacttggtatctgcttagttcttcaaagaactgagtccttctatttcaaaaggaatagacatgctagaaaataaccataaatacacctacaacagcatacctccaaaaaaaaaaccttgccggaaagtagggattaggggatggatgcaaggtgtccaatcctgtacagcataacacacaaacgtgttattccaacaccaattctaaggagtgttactgagaaagaagttaaatagctattgacagaagttcacaaaggctctacaaaaattacaccgggggtaaagccaatcgagtgtagaagagattaaacgacaccatcgacctggccaagggaagtctgcccaatcttgactgtagcaggcagcccagccataaagtcaatggcttcgcttgccatagcctcctccaaatggccaagtgatgctttgatgtggctgaccacttagttttgccttggctagtcccatccactagcagtctactatcatacttctagtctatagtgaccaagtggtaaacaaaatcttgctagcaggatcccttgagaaaagggaaagcagaagagaccaaaccaactcagagtagcatggctacctataaggagttaccaggcttgtcaaccaatagattggagaaaagaatactttgcaagagaactactccctgaagaatattctttgacagtaaagatcctgcagcaagcatgttcggacaaaacggaaaaggtctgcaccatgttacaagataacaataaaggttcatacaagtctggcgagtacgatgagaacttaaagttggaacttctaccacaaacaaaaatagggaatgtatcggtaagtactctcactagccaacttgtcaattagttcctctaacatttcatcgtgcaggaacccataaaagagctagttcccatttctttttagcatggcctcccatcactctttagtgatggtcgttgcgcagtaagctgcccaggggtagccactatgtgatttcaaaagtggacactaaggtttaagcttttgttacacataagaccaactgtgtctaaactacttattcataagattaacttcttaaagttacccttttagttctacattcgaactatggatagcaccccaaggaagaacccaaacaaagtttgtgaaacttggtgaatagcaagtgaccaagagaattgcctacatggttgcttggggggcacccataccgtacaatgcatcaaactagcacaaagaacttatgcagagaaattttcgcttagaataggctactaaacctgcttataagtcttgcaggcatattttgacttgacaaagtaaatccggacccttacctgtcaaggccataagaagatagttaggacgatcatatgtccgtcatagatgactttcaggctaaatgatagtagtgtttaaaaacaatgggcctataggccaaagcaagaacatgtaagccttgaggtcggatatgaaatcagttcacatgcatgaggccaaggccctgtaagaactatataaccaaaaaaaaacctgacagagctcttataggggccatgtaccaggctacagctaaggcagagttccttacaggttgcaagccatgttgagtcttaagttgaacatttgactataattgactcatcattaagtttcatacaaagtttccaaggaaaccacgtacgaaacaaaggttgcatatgcctagagagccatattcttgctgaagtcaaaagaggacagaaaactggctatccacttggaaccaaggcccacgctagcctatgttctcaagccaagaaagggtcggccagggtcatgtgactcaaccaagaactggccagcttcactgaacccaggcatggacaggctagctttatagggtaaaaccctaaagttggccaactcccatgatcaagccttagggccgaccaggtctcaagcaagacctcccatttggccagggtaagttttaaatcctaatgtgtgtttttctttcaaaactcaaatatgtgcctcgtaacctttatgaatcaaagggttagggattacaatgaaggcaaaaattgaatcgtttccattaaaaagtcacacattatgtattacaaaaccatcatgaggatcaatatacccaagggattacaaacaaacatgagaatcaaaaagtttctgaaagcttaaaaagattgaaacttattaatgggaggcataaacaagagatacccaagaagtaaaaatgagacgtacatagagaaagaagatcaaaggtccaaaagcatgccatgcaaaatgccaatacttggctagacaaggttgctcaatagagactactacagacaatataagagctagaaagtccctatctaaccagatgttcgaatagggacttagggtgcaaatgctatcccacattttgttcaacctagcatggcatgtccacataagccaaagatagagtacaggtggaatataaccttacagtagcaagctagggtctctatacaaggtacaacaaaactctcaagcagtaaccgaaaggagtgaagtgagctctcaaagggttgtacttaaatccctgacacgccaatagaagcctataggccagctagggtgagcctataggccggtcaggatctatgcataagctggccaaccaaaaagttacttccagagtaatggatctttcgtttgaccaacctctacgaggaaacggtgtataaagatgtcctcaacttgtgaaaggctcgcctccacatccaaaggctaacttgctcttggtagggcaatagtgacctgtaggatcctggcaaacacatgacccgcaaggtcttggcaggaccatggctgg

SEQ ID NO: 29274 - DNA, 2913 bp, Cannabis sativa
  modified_base (2864)..(2869): a, c, t, g, unknown or other
cttgttcacaagtaactttttgttgtgattaaaagtcacatttagtcacaaaatttttttgttgtgtctgtaaggttgtcactaaaagtggtctttctttagtagagaatattaaaatttctcttttattatttgttattggatcaaaatatggtaacaattattttaaataatttttaacatacacttataacttttaaaatactttatttaaaaagtaaataaattaatatagttttgtgtgtgcggtagacaactacatatataaaacacactaataattcttcaagaattagattattttgtttctaactacttatcctatggtgacttaagacacaactacatacaattcatgaataattacttacaaatatataaattaatgtgttgaaggaattatctttgtttttcaattattattagtgaaacattataggaaatacgacgtgattatttatctttttttatatgggtgatacttactataattaattactattgtttttttattaataagataaaatgagaagaataaaatctaataactataaaaaatcatacatgaattcaatttttcaaaataaatttacacagattttctattagaagaaataaacattgagagatttaccttttgtaactacatcgacaatgataaatatttgtagtaatcaaacttcatcatcaaatggaaaactattttttatgtgcgacatcttttaacattaaattatataatatctttaataaaattaaataaaaaaaagtaatactgaaatgctaatccagaagaactttgttgattgagagagcttgaacaattgtggaagcatctaatagtacaactaaattatccactctaataactcttgaaactttgactggtttcatataatgattaacaatatctcgaaccttgatagcagaaagaccaactacaccatctttctacaaagcgttaattcctacgtagcaatggaacatacacatgaattaaaatgaggaaatatagtagtaaagatataataaaagttttcataaaaaaaaaaaatataataaaagttttcataaaaaaaaaatataataaaagtggatatatatatgtatgttaaagtcaaaagcttgaatatatacactataatactaactctgtatttttaaatattatacatatttatataccgactctttgttcttgatcaatggctagtgataatgttaattttccttaatttggttgagatgacgatgattatgatttcttcttcgcaactattgcatttaatttttttgtgattgtcttgaaaataaaaacagtcgacaataaaaagtagggagagagaggttatgaagagatgaaatagatatgggattatatttatagaaaattttttgcatgagttaatttgggatgttaattaaaaaaaattggaagtttagaagttgaaaagacaaaaattatttaacgtttggaattaattggatatacacgtttaaataatttagacaaatagattaaagaagtcatctaattaatagtataaattaaaatatattgattgtcaattatatgttaatatattcattaatgtcattatatgttaatttaaaatacataataaatcacaaaaattaagaaaaatgagaaaaattaagaaaaaagagattagaaaagaatctcaattaggctgccacatggacagtttgaaaccttcctttatatatattgtgaacgcaaattttcgttaactaaatttgagcctcacaataatgattccacacaggaaaaataaaagctatataaataaaagtttgaacacaggatttttttacgtagttttgtagttaaaattctgcatagtccacggatcaatcttcttcaaatttctgatagttttctcaaggcctcttttgtatgagtttttccgtcccttttttgatctcacttgccactatttataattacaaagtgggcagttaattacaaagttcactgtattctttttacaacaatcatcccctaaaatcatggggtttgattacatatatcacgcagtgtaaatgcggttattattttaaaatcatatagctttcaaattttcccgcttttattgggtcaaaatgatcgtgtattaaaacccgtctttaattgtcgtatctgaggatgtcttggcagaagcttggttctagtgatcataatagcgaggtggggccattttttccttctgaggttgacgatacacatattgtcatgagcgttgttcttatttacaatggattattcgaggctcattttgactgttggcttctgacttattaggattgtaagtctcactgataaaatgtctgaagtcaactcgatgaagttataggaagccttcccatagcgagataagcacctcgcttattaggttttgagccagcttgactatcacacatagtttgtacattatccattaagtgcttccgcagttgatatgggtcgcttttgtcttcctagaagtaatgtacttgatgcctcgctattcagactcagcgacatatggtttctcgctaatatactaagcaacatttgtatattaactcctcgcataagaccttacagtcagtaggttacaaatatactctgatacctatgtaattaataagttattctataaaaagagattgcatcgatccatatttcctttatcatgacacgtgtcttccactgagacggcagccgaatttcgggtataacaattgccccttaaaaagttatgttttagtaaaaaagtgttttttaataattacaaagggcattttcgttataatccctttttggtaagacgcgtcccttgtttcattaacatcctaatatnnnnnntaaaacaatgaaataaacagatataaagtttaggaaaccttaca

SEQ ID NO: 29275 - DNA, 3106 bp, Cannabis sativa
gattgaatcttgatttgtattttgacactttgaactttgaggttcaaagaacacggagaactaagcttcgaatgtgtaaattgggttgtttaatttgactagggacccttcccggtactttgggtctattagagatcctattcggttgtttagatccatatcaaaactctgtccagtcctcattgaaccattttcaagttggccagttcctcgggaaccaattttaagctggtcggttgatggcctatcaaattaaggcttcctggttaatgatccattgtcttaggttgcccagttaatactcttaggttctagctagttaacctatattattctccaggtttatttcatgatctccaattgttcacctccctctgcctttctgaatagatgaacccgcgtgactattggggaggtgacagtagaatcgatgaggatttacttagtcttctgtatgaagactatcactcagccatttcctccactaaaagctcatctggaaactctttgagtgattttgatgtgagcaattgttttctagaacctgagatccaacatcaccactattctgagcgaataggtggtgaaatctacggaaggttcatttgggaattgaaccaagggtggaggtagttccttcccaagtcttggacttatatcttccgacagggtgtgcttaacacatttcccgttggacagacatcttttgtgtttagagatcttcctgtagcagaggctactatgattgtcacccagtactctgagaaacatccaacaattgctaggactaagtagtcatattgccaggctccccaactaatcctcttattaccaagatcatggcatgaggaagagtccgccaggttgagcaagctgaaccacctaaggccagcctagctgaggagcctatggctggtggggacactatctactgccaagcttcacaacattattgttaggggacttgtcggtcaggtctgatgcatcaagccctctccaagccatctggctcaccatcccttactaaactagaagcatggtctggtccccatgccgagcaaggggaggttcttcctttgcatccatactttagggacatagctaattcttcaagctatgtctaactcagatcacaccaaagggcataaaatacctctaagcactcttcttcccatacgccgaactaggttagtcgaagcctttgccttttgaggtgatttattattttgagctaaaatccagtccaggccaggactgaataattctattttagctagcagggctaccaatggttgggtggaaccaatgatgcccatgtcaaagattgggggttacaccaaaggttacttcatagcttatgagataaaaggtgtttgccagctcttttgtcaagtccttacttacagttgaccgatccccacactgaagataagggattgggccaaccacatcttgtctcttcctgctactcagtgtaacatctataagttggcctatgaagagaactttaagaagtacaacatgtaccctcctggtcagggtgttgagaccctagaaaatccccttgaggatccaggcaatgctcttattgagaaggagaaagccaaggaaaagaggcctatagtcgagaaggagaagagtaaatctgatgatgagatctccttggctgagattgcttggacaaaggctaggagggaccaagctctttgatgacatcttacacgtgggggcactattggtgatgtcgtagttttgattaggcctgagggacaagggttggtgagacttgctcgggctgcaccaacagactaaggcaaaggcaaggttgttgtgactaaggaaaactctagtgagttttcttcagaagacaaaaggccttaggaaggttttcctagggtagaccatcttgaggaatttgatggtagtaactcttttactcttacttgaattttgtgtttattacttgtattctgaccttgttgcttttctcttgcagacatggctttcaggataaggaatctattgaagcgactgtcaagcagcccatctgatgggcaaacctagtcctaaactacccagacaaaggttgcctcgaatgttacccaggccagtctgcctccaccttcttctagtccacctctggttaaccaacccgtgattgttgatcctttattgagatctacttctcctccaaaggtacccaggaaaggccaccaaagaaagggtcaaacaacttcatccagcacggtagacagggctaaggaagttttctagagctatcttgagagatgtcttcctactgttggtgatcaacttcgtgaagtggacaatacttccttggactatttgacgcccagtgcattgaaagatgctacctcaatgagtcttcctatacttgcccaacttatgttttctgtgcaaccctttccgttcattgttgatcctttattgagatctacttctcctccaaaggtacccaggaaaggccaccaaagacagggccaaacaacttcatccagcacggtagatagagctaaggaagttttctagagctatcttgagagatgtcttcctactgttggtgaccaacttcgtgagttggacaataattccttggactatctgacacccagtgcattgaaagttgctacctcaatgagtcttccaatacttgcccaacttatgttttctgtgcaaccatttccattcaacttttccatgcaactttttattaacttccctactatctttatttcagacttttcaaaaacatggtcaagcccatgcttgctgagaaagatgctcaacttactgagaaggatgcctaagttcctacgaaggacactaagcttgatgaggtaaacaaacatctataggaggcggataagaaggtgaggtagatgagctttgatagatttctccttgatctacactatctgctgccaagcttgacaacattatcgttaggggacttgtcggtcaatttcgatgtatcaggccctccctaagccatctggctcaccatcccttaccaaactagatatcattgtctggtccccatgcggagcgaccaattaagctctgtactgttggaatttattttacc

SEQ ID NO: 29276 - DNA, 4777 bp, Cannabis sativa
tcctggtaaaatattccaaacaggccagccccaagtgtcaacctgggcactggccctgtttttggtacccaggaaatgttttttctttcgcaaaaggacctattttcttatttttgatgaagacgaattgtcaacctgggcgctaggtgctcggggcccccggtgctcaaaaatgaacttgctctgattactattctgatacctcaaatatgtccgtcgtatgtctagttgatgtttcaatacaagtttttacccttttgcactaagacggtcccgaaaactgaaaccctagttagatatgtcaacttgggcacagagtgaaaccttaggtgcccatgttggcttccgagttgcaggttcatgtcattttagctcctcgaacttggattaggttactccatgtcttcatggtactaaatactgaaagatagtagattggattcaagttattaaagtctgaacttccatcccggagatcccaagtcaacctagacacagggctagggtccccttccagatcaactattatgactcaggtttattcaactctgcgacgtcatccttcatgccacgtgtcaaacattgatgtccacgtcaccaaggaaagttttcggattaacaccgtgcttaaaaaaaacgggtcgtgtcgtgctgtgccacagaaaaatatgggtcgtgccaacattttcaaagggtaggctcgacactgcccataggctcggtagttttcgtgtcgtgcttggattcgtgtcatgcttttcttgtgttggcccgtatttctaaaataaataggccagctcgtttttttcatatccgagcttaaattcgtactttactttttcatatatttttttacaattactaaagtatatgtaaattttatagctttagttgtatttatataacttcttaacaatattttacaaataatcatataaaaaattattagtattattaaaaattaaatatttacttataaatattcaattttttatatcacactctataaataaatcaatatataatcttagtttgtcgtgctttaatagttttatttatagaactataatattcatttttatatttaaattttattattattttaacatatttttaattgataaattcatatctagaatttgatctgtttctaccaagaaaaaaaaaacctacttattttctcccttttaaagataaatactatcttattcttttgtaactgttagttaattagcaaaggtctccacacgtaattaattaagcaaagaccaaaactgccattctatagctcaaatagtgacaactttggtaatgatgccattctctactcatacttaccgtttcatgcaactctccaaacaaagccatgagagggtctttcctcatgacccctactcccaccattactcccataaataggtatagccattgccatactatttcacatttcacacacttattcacttctctatctattttgcagatcccatttctgaatttctctttctgcctccctaaaaaaatggtggcctttaaccattctcaacagctcgtttacttctatcgctccaagcaagagcaggtcgctcctcatatttattacaagataatgtgttaatgtgtattttgttattacaagatttaagaataaataacttatattggtgttgtgtggcagggtatattggattccgactttgatcttcttgaaacttgtcgagttgaaggaaatcctctttttctttcagaaattattgattttttcataaaggatactgatgaaaagatggaagaacttaccacatttatgtatattttatatatctttttcactaaaaatttatattttatacttaatctttggttaatacctctatgatgatgattacttttatattatagagctcattaatttgtggtcaggtccgtggaaaatgatgatttcaactttagcaaaattgatcaagttgctcacaacatcaagggatgttctgctaggtaatttaaacttttgactattgttatatatctttcttctctatacttttagttatcaccccaaatgtagctatatattgttgatgtgcttggttacaaagtaatatagtatacataaatatatatatatatatatgtttaaaaagacactgttaatttgttcatatgagttatgataattcctttatatattaagtaattaattttatgagggattttcttgtacccacgtagctaacaaaataatgatcatacaactaaaataattgtaatttttttcgaaaataaacatatgtaatttatcggatatagatacatttaatcgtgtttattaatgaagttatatccaaatcatatgcaactataactataataattgaaaagtagcaacgaactaatatatttttcaaaataaatatatgtaatttgtcgcatacgaacgtacgtaccttaatcgtatttattagtcatgaaattatatctaaattaaatgcaactataataattggaaagtagccatgaattaatatatttttcgaaaataaacatatgtaatttgtcgcttacgaacgtaccgttaatcgtatttattagtgaagttatatccaaattaattgtaaccataataattgggcaccgaactaatattatacttaatttatgtcctatataagcgcgtgatgaataatgatttttaattttactattaatatatgaaaaattcacatacgtgtagtaattaatttatttctaattaatattagatatctcatactgaatagtgtacgtagaaatattatactatttaaaacaatatttattgtcaataattagtttttacgtaaaaattaatcatttttaatcttgatctttctctatcacaaccaaaatttttatcatatacttttattagtttaatatggtatcagagccaacaaatttaaaaagtatattaaatcataaactgttcataaattttaccttcatactcaaaatgtaatttatatattcggtattatgaacgcttttattttcaaaatgtaatctatagcttggagttaggcttcatttgtttgcacttattaacccactggatctaattcgctcagatttatgatcattaagactatttgtttttttctctcctctacctcttattacctcttaatgcatcggagcgaataagacatgtagtgatgtctgaaattttttaatacatatgtatattacgttttcatctctttttctattatttattacacttctatcttattattatccttctcttttttatttattgtcttttatattatcatctctatgttttacttttgttacatatgtatattattttttcatttctttttattattttttatccatctctcaaacaacacctcaagtcaaataattactactttttttatttattacacttctattttattattacctttatttattttcttttatattatcatctctacattttactcttttttttttttttttacttttgttacatattatgacttttaatattataatgtatgtgtaaatttatagaattataagaatgtctttttttttctaacttttttatttattaatttaatagctataatagtaataaaatgataatagtcatcttttaaataaaaaaaaaaaaaactaataatttcatactatcacatattattagttttaaatttaaataaattatattctatactttaataattgaaaatattttaaaataatatatactttaataaatttattaatattatacaattaaaaatattattaaaacacactaaaaaatacattcagaggtaagaaaacaaatagtttaaatattttaatattcagatttagaagtgatatcttattattcagacgtgcatccagattcaagggtctgaatgttaaaaaaaaaacaaatgcacccttagtgtaccaaaacttctccatcctctttctataattgatggtatttattataatataatagattatatttactaatttttaactgttttggaactgtagcattggaggttgccgtgttgcccttgcttgtcaggagttccaccaagcttgtaatcataaaagcaaagaagagtaaatattaaccttctcttattactaatattttccaaatttatatagtaacgaatatattgaattccttcataatatatactgtcaaatattgaaagttttataaataaattttctaataactaatgattttactgttattaggtgtctctcaatctttctaaaggtcaaacaagagtacaagatcttgcatgacacactgactcaaatgcgccaggtgataatacttattcaaacttcattctattatagaatttatttattttgtatgaattttctcattttgactttgattttgtgaaactttttcgtagatggataaggccaaacatggtggcgggtctagtagcagtgagaactgattaaagatcacttggctacatttctgctggttcaagtcctcttgatgaagttgttgtgtcgtttgttttgagtagtttgaagtcaaacgatgtttgtttatgatgtttttttttcagttaatttgtgttgttttgaattttgttgcaattattgttaatgcactataaatggtggacacatatagtatgtgttccaatggtaattttttttaatggtatctaagaaccttttttattttatatgttctatttttattattgcttactattgagtgcttttatattgtttatca

SEQ ID NO: 29277 - DNA, 2980 bp, Cannabis sativa
tattacatatgtatatatatatctcacacttatgaaagactatagaccaagatatttctatattttaaaattgactttcaatcagttcaagaatgtccttaatatattatggtacataaaagactaatttatagtttctattgacatttggatatttggaagaaactcaaatttagtacagtatagtctatttcaattcaagaaggagatcaaataaattgttgtacataataatttaaataaataaacaattggcaccaaatatgtggtggtcttctttttctaatataagaatccaacataccaaatccaacataccagcaacatttagtaatcaatcttttgatgttggagttaaagatcagcatataaagcttaatcacgtaagaaaaagtaagtccctcttttaaaattgtataaaaagataaaaaaaattatcttgaatagattaccaagattgaattttggctttggtatactgtgtttctgacattagaatttactaatggatagaagttttttttttatctaatagcaatctcatcaaatagacacatacaaaaattgatgcaaacaatacattgtatatctcagataccataacaaagattcaactattgcctcaaatttatcaaaatcaaccaaatacgatcgtaactgttatggtagaaattaaaatctgatcagaaaatttacacatggaagttatttacagttcacacatatatacattaccatatacagttcacacatacatgacttcaatttaattgtttctatgacagagcacctacaaggatatatacaagctcatttggattaatcaggattcaagaccaccaaatccttaattatccacattatctacatctaaagccaccaaattttttagagagaaaaaccatataaatgattctgagagaaagaaggaaaagctaagtggaaatagagaatgaaacagataatatgtttgtagctattttcactccctctcactaaaatgccttctataagctcagaaatggaacttccccaactcattccttcaccttcctcttcttcttttacccactacaaacccaccttaaaccccaatgctcttctttcattttccttaaaccccactacaaacacacacacagacatatatatatatatatcacaaattggttaaagagaaatggtcaataattttttcagagaacttgctctgtaccaagaatatcatagtctcatttctggaaaattttacaaagtaaatcattcttgcttgattgtttctcctcattcaaaaaaaaaaaaataaataacttactaaataaatcatgcataaatcactatcaaaacaaaaagaataaaataaatcaaagaaaagcaaagaatatccttactgaaagaagctaaaatattcaaaacaaaatttcaataatcggtaatggaagcaatttttgatcgatcgaataggactatagaaagcgttggtctcgttaatgttttgtaacgaaactcgagggttatccgaaaataaaattccaagaagatgaagtgagttgcggctaaggcttcaccagaaatgaaatgaaagtatttcaaagtgaagggtgaattttccaggaaaatgaaactctactgtttgaagaggtggacattaccttcatataaagccaaggagaacccatagtaaaatgaactccccaactaaaaaaattaaaaatgcaatactaatcacaggctagacttcaaatccccattcctgagtaaagaaaacggtataccaaacaaccccttatggtcttctgattactgggcttataaagagtgggagagttgagcatgcttgctttttcttcaaggaaatggtttcaaaggaattgattcccctggtgagcacgtatgatttattgacaaatgaacttggggctatgaatatggttgtagaaaaagataagatttgacaagttgatgatgaaggcaaagaagacattaaaaatttcttaagtctgcatctttttttgtgcttaatttacccttatttattatctacgctagttgctaaaacaagggtgcttgctgaatatgttgttagccaagtttgcttgagtggagggtggagcacatgatgcttaccagtgatatacaaattaataatactttgagcaactttaattataatctcttattataattttttagttaatttctatgcttgaaattatatgccagaatcattgtagtcataatatcatttttgtaaattttaaaaaaattctaaatagtttatagtatcaaaaacaaagttcttaatattccaatttaccacttgtttttaaaaaacttaaaaattatttttagatttgtaaattattcaaaatatttctaaaatttacaagaatgatgttataattataacgaacactattattaaaagaattagaaaaaaaaaatattacgacatatattttcaaatacaaatatttagtaaaagattataacaaaaaattgatagtagaactactctcaaattgtcaaattgttgtgttgtatttgacaattttattgtattatggtatctagtcagttagacttcatttattctttttttatttgttttaaggttgatgagaacactgtggacagctaagctaacacaataaaacaaaggaaaaatatttctttttctctaaattaaaaattagagcattgctattagacaccagtagtgcttagcatttctagatatattaccttgtaattgactagcaatactctttaaaaattattatattaaactatatgatactcgatacttaattgtaccaataataatattgacacataaaaaaataaaaaagtgataaacacatgcccattaccatttctctaaaaataaaaaacactatcttttatgagagaagcaacttttgttctgacataagagaaaacaaagaaagagagtctgctttcgttttgataaaaatgt

SEQ ID NO: 29278 - DNA, 2341 bp, Cannabis sativa
  modified_base (383)..(385): a, c, t, g, unknown or other
  modified_base (517)..(520): a, c, t, g, unknown or other
  modified_base (663)..(673): a, c, t, g, unknown or other
  modified_base (2252)..(2258): a, c, t, g, unknown or other
taatattaataattaaaaaattaatttttaatttgatttattatttttttttttaattaatttgaattattttttatagttatttatttttctagaaaaaataattttacttacaaattttgcgatcaattttttatactaatagtaatagttaactatacaaaattgattacttaagtacttttgccactaatttatttacatatatagttctaccataattatcttttaaattgattttctttattaattttttttaccaagaaagataatttatattaatcaaaccgagtctattaaaagagaaacttacaactcttttacatttttaagaataattttaagaataattacatctggtaccattttttgtaaaaaaaaannnattacatttttacatttatagaattttttttacacttttacggtttttcatagaaataacacgatcaaaaagaacaagaaaacttcataaaaataacatgaaaataacatttaaataacatcaaaataacannnnaaaataacatacagataacaaaatatcaacaacaaattaacaagagtacagtataaaaaaaccatattttctgtaaataaaataaaaaaaaaaacgtaaaaatgtttaaaatttcgtgaaatcatatttttataatttttttnnnnnnnnnnngtatttgtgaaataatcccataattttatctatgctaaacaacttcctttcttgtacaagattaaatctacttttgagactctctttaatgctactatctatacaatttggattcatacattttttcttatttatacataaattttagtttagccaaatgtcataaattacacatgctaacacatttttatgaacataatataatttttatgacacattctaattttgtttattatttttaaaattatatgttttttttaacatatatatttttttaataacaaaaaaaaaatattaaaataacaaagttaaagcagccctctaatctattttttttaaataatttcttttataaagcgaccacttttttaaccaaataaaaaatcacaagtgtacttacacactactatacaatgtaatctttaattgacttaatcttattggccaaaaaaattacactatgccatgaggtacaaactaagggttttacagtagaattacccattatatattttttatttgttatttttacgtgcttgcagttgcagtagtgtatatattagacctatgtttgtatgtgttttttataattttttatgataatttttttgttgcaatgtaaaaataattttgattcaaaacttttgtaaaatgataataataaaactttgaatgtaattgtgcaataaatattagtagtttatttatttttttaaataaaagagtgataaatatttttaaaatatgtgtagtaaaattattttatttttaattaaaatttaaaaactgtcaatattattttaagttttgtggtttataaaaattaccaatcaatttatttattttgttaaataataattgttgaccgagatttttgatacttaattaaataaatgaaaatttagagttagaaaagaaaagagagtatggagattatgaattttacgtggttgtgacgttaataaatattagttcacgaactaaagatagagaagatgaaattctttatctaaaaagacagtatttttattaaaaaaaaaaaaaaaaaaaaagcagtatctttataaaaagttctgtaaaagtaaagtggtaaaattttacccaaaatttagtattttttgtaaaaactataaaaataaaattacccaaagcccatgaaaactctacacgtcacttctgcattgattcgtgggccccatttattgtgctttgtgtgaatgaggctgctctcctcatctaattgcatacaaaattaaaaaaaaaaaaataagtgaacaaaaaaaaattattacatgcatgtactccatcatatatatgatggaattcattttctttatcagataaatggtgtgattactaccctatactatacggacaaaagaggatgtattactatagatattccctatatatagggaaaatctaatgtaggactctttagttcttccttatagtatggggaaggttatttgaccaataaaaattaaagtattttagttgtacacgttatgttggtgtattggtatacatctgagttttttttaaaaaaattaaatattatggtgccgtttggtaacannnnnnntttttaattttttaatcacaaaaagaaagtaaaatttttgtttttaaaaaatttattttttaaaaacaaaaatgcgttttgta

SEQ ID NO: 29279 - DNA, 4684 bp, Cannabis sativa
attagttacagttgagaacaaacagtaaaaactgaattaactaattaattggagaaggtagttggttaacatcccccctcaagtgaaatggtgtggtgcacacttgaagcttggttttgaggtagctgaatctttctttagtgaggggcttcgtgagaatatcagctgtttgctctattgaaggaacaaaccgaactttaagctgcttggccaatatctgatctcgcacaaagtgcagatcgatttcaatgtgcttcgaccttgcgtgaaacactggattagcaaccagagatgttgcaccttgattatcgacctagattataggtgcagcaggtagggtgaagtgtaactcagagagaacatagcacatccatttcacttcagctgcagtgttggccaatgctctaacatctcactctctgtactgctgcgggcaacgacattttgtttcttggcggaccacgaaattaagttgcctcctaaaaacactgcatagccaccagttgaacgcctgtcatctggagagcttgcccaatcggcatccgaataggggtggagagacaagtataaggctgtattgatatgaattccttcatgaacagtacctttaaggtatcgaaacaaccttttgcatgcttcccagtgcacaatagttggtgcatgaatgaactgactaagtttgttcacaatgaacgtgatgtcaggtcgagttaaggtcaaatactgcagtgcacctactgtgcttcgaaacagagtgtgatcttcaaagggttcaccactgtcaagtgtgagtacatgtgtagaactggttggattggcagccggtttagccccttccatgttgagtttagtgagaagatctgtgatatatttcgactgagataagtacatgccagtggaattgcgaagtacttcaattcctaaaaaatagtggagagatcccaggtctttgagagagaattctttgtgtaattcttgtatgaggcacttgatgcaagacaagttgggacccgtgattagtatatcgtccacatatactaaaaggatgatgagatgaggtcctgagccaaagataaacatggatgaatcagctctggaggctttgaatcccttgctgagaagggtgttttttagtttctcgttccaggctctaggtgcctgttttaagccataaatggctttgttcggcttacaaacatgagtcggcttttgcttatcttcgaaccctgggggttgaaccatgaacaccgtctctgttaatgtgccattgagaaaggcatttgacacatctaactgagttactttccattggtatgacactgcaatggtaagaattattcgaatggtggctggttttacagcgtggctaaacgtttctgaataatctataccaggggtttgatgatatccttttgcaactaaacgtgatttgcacttggctagagtgccatcagcattcaatttgaccctatgaacccacttgtttcctacaacatgcatgccattttgatatgggactagagtccaggtcccatttcgaactaaagccacaaactcatcagtcatagcaccattccacttagggtcggctaatgcttgtttaagtgaggttggttctttgggtagaagggattcgggtagaggatatttggtagctagataggctttgggtttgtggatgcctgatttggccctggtttgcatagaatgtaagttggttgttggtgtaggtggaagtggtggattaggataggtgggacatatttctggggaggtgtttggttctgaaacaggtgctgagactggtgctgagacagatggcaagatggttgtaggagcaggtatagattgagagctggaggttgattgatgtcgtggctcttcagataacacgacagcaggttgttcctcagtgacacaatgagacaaaggattaggtgctgtgttaaatgttgcagtagcataaatttgagatggttgagaatttaccttgtgtgtagtggataggagtagtgcaggaaattcttcctcattaaacacgacatttcgagtgacatacactctgcctgttggtgattcacacatgtaacccttgtgctgaaacgagtatcccacgaaaatgcatttttctgatttcatggccattttgtgttgttgaaagggtctgagataagggaaacaggtgcaaccaaacaccttgagaaactcatagtcaggttgtttgtgaaaaagacactcgtagggtgatatgttgtctaaaacaggtgttggaagcatgtttatgacaaacgttgcatgctgagacgagtaccaccaataggacagatctaacccagcttgtgcaagcaatgtcatgcctgtctcatatatatgacgatgcttgcgttctgccctgccattttgctcatgatcgtggggacatgagtgctgaaattgaacaccattggctgctagaaaagaggcaaaactcctatactctccccccagtcagattgaacctttttgattggaagagagaactgtttttcaacaagagttttgaattgtagaaaggtggaataagcctgagactttaatgtaatggaaagatccagataaactggctaaagtcatctaaaaaatgaatataatatctataaccttctttggctgggatgtgggagggtccctagagatctgtatggaccaattctaagggaatcgaggctctactagttgaaacagggtatggtaatttgtggcttttccctattttgcaggcatcacaaaatttaagttgtttgaaggtgcctttgtagttaattttagacattattttggctaatgtgttggcacccggatgacacaacttggaatgacatatattaatatcccgagaactagtagcagtaaaggcagtaagggaaacatcaagattatgaaaactagaatctttattgatgtttgaatcagtacacaacttggagactacaggagtagtctcagtattacagacattattacattgagaatttgaaagacatttgggtcccttagtagctaactggcaaaggatctggattggtgttcttgtggtaggttgagtgagcaggtacaaaccatttttgactcttcctttaagtaagaccctccctgttttcttgtccttcacaaaacagcaagttgagtgaaattcaagaaatacactattatctttggttagtttccagacactgactaggttcttagtaatttgaggaacttttaaaactgaatttaattgtaaagaagacctagtagtggggagggaaatgttacctaggtgggagattgggagttgtttgccatttccaaatgctaaagaatcagaccccaagtatggagtttcattgtcaaggtgttccattccagtcgcaacatgcatgttagcccttgtatcagcataccactcttgatcttgagcaaactctggaaaagaattggtgaagtaggcgtgaggatcatcatcctcaaattctgtaagaaaggcctgatggtcactggttttgggaggttgaaagttcttatcgaatcgatagtggcaaactgaggcagtgtgaccaagtttgtgacaaagttggcacactaacctgtttgaggaatatccacgaccataaggtttggggttgctacgattgaaagaacttggagtagtgcctctgctattgtaattactggttcttgtaccagtattgaatcttgaattactgacagaaagattggtagagggcttcgatgaatgatctccaatagtgtaatgtctttccaaccgaatttcgtgagtaaaaagaagagactgaatagattcaaacgatagatcgtcaatgaggcttgtgacatgaacgacaacgggatcatattcaggacctaatccattgagaagatgcatgatgaggtcactgtcatcaattggatggccagccgtggacagtgtatctccaagaaccttaaccttgtcgaagtaatctgcaatggataaatttcctttctgaatcaacgagagttgagatttgatttgtagaagccgtgctttggactgagaagcaaactgttgttccaaggttctccagagtgtatgaaaagtaagatgattagccagagatccaagaatggattctgccattgatgatcgaagccagctgagaagtagctgatcctttcttttccaggcaatgaattcttgattgagagcaccagtgaccaatctttcaggaggagcaacgccggtgaataacagatcgtcaaggccatggccaattacagtgggaaccacctgagatttccaggcgaggaagttggtgcgatcgagtttgactgtgagagaggagtttagagaattctggaaaggattccagtgttgttgggggaggacattgccggagctttgtccctgagtttgagtagcagaacgtggtgggttttcatgaattgaaggatccatatgagacttgcatcaatggcttcctgataccatgtatgaacctatcaatactaagcacacaacagaaaacaatgaatacaaagtctctaaggcttgtaaaggttaaaaccaaagagaggaaccatttcactatttatagagagtatgatacagagggaatgaaataacaaactaaagaaaacagaacaagagtgtaacagaattagttacagttgagaacaaaca

SEQ ID NO: 29280 - DNA, 1741 bp, Cannabis sativa
  modified_base (1695)..(1695): a, c, t, g, unknown or other
tgtatagaccggaacacatttgacttcctgccttcaactgcagagtttctcaatacaattaagaaattgttccacatggattgaggtgcatctttcaatgcagctgccactgtaataatggcaatcggaactcccccacattccttaaccaattccctcgagcaatcaagattttcatcaagtattttgcccacaactttcctaaataactttgttgattcatcctcatctaaagaatggacagcgaactcaactgcaggactgtataaaccctgacgtcttgaagtaaatagaatcttacttccttttggattatcgctaaagtgtattccaacatcaaacagatcaatttcctcccgaatatcatctagaataatcagaaccttcacttttttacccaactcttttcgaagttttgttgatcttgttaatatggtctcatcattaccaaattcaacaccaagatcttttccaatttcaacttgaatatctgcaaaaattggagtttgagataaagcactacacatgatcaccttatcaaacaaatttgcttccttcttgacttgtcgagctatttcttttgcaagcgttgtcttgcccatgccgcccattccatgcagcccaatcatcttcacattgggatctttcagtgctttcatgactccttccaaagctcgttctcttgtctcaaaattcatgtaatccttatcgtaataacgagaataataagaaatccgatcacgaaacttcccacaatgttcgattaattcatttatcgattttgataaagaatccacatcgatcattgcttgtggatggacacgaaatcattaaagttttggctggaactttttaccttctcacgataactagataaagcaatttgagttttttcgatccattctaaaacttcaggatgaacatccttgtccatttgtttggctgactcaaccatagttatcacttctttatggcatttctccaagatatctagctgttcactgagtatcttcacgtccctttgataagtttcatagtgacacattcgattcgcatgttctttgccaaaaataattgtgtttttaagcaagtcgtacacaccattcgacaaaataggaaaaacaaagtcttccattagtattcttgtttgcttcttcctctagcttctccctttcaagatataagagataaaatataattagctaaatgtattatttttggtcaattacttttatgtacaaaaataaataagtgaaataaaaagttatcatcaaataaaatcaagactaatatacaagaaataagaaaacacatacaacaaagccttgttctttcaaagatccatgtccaattggttaacttgagggaaatccaatataaatggttaagaatacaaccagatataaagagttactgttatgcaaagtattgaattcgatctcttactcaatcttaagatcagctcccttgaacaatggctctcgagccttagaactcttatcttagtcaaatactcaacacaaagagttaaacgttaagtgtgttcttacaagattaattgtaaatgaatgagttagatgcatatttataggcattggtcctaactcaactaaaggtagctgttataattaagacacattgtgaatctttggactaccacatcatcaacttatctaactgttgggttttatgccntaaataaaactctttacaatctgactagttatcaatataagaaatt

SEQ ID NO: 29281 - DNA, 1672 bp, Cannabis sativa
  modified_base (693)..(696): a, c, t, g, unknown or other
tttttttttttttttctatttcttgattttcataaacataagataatgataacaattgtctattttaaattaattaataataaacaactaaataattaatattaagccacttaaaatcaaatactaaaaatctaaggtaaaatgacaatttaccccttcctttaatatgaagtaatttaaataatctggaaaacatagtccaaaaccacaatcccgaataatcttgacattccaaatgtctaagtatattttcttgctatttctaaggttcaaaacaatatataagtgactatataggccaaatgtcgtatttcactgttatcgggtataaaatataaaaatcataaaattttatctttgacataattaatacacctaaaattcaaataaatctccataactgcaaaaataatattaaaacctacttcgataataagccttaaatatctgttaattctcaaaataaggttaagtggtcattactaggggtgtatgtcggtcggtttgatcgatttacgttacattttatttaatccaatataaacatcgggttacaaaaatctaagtgcaacccatccaattaagaaaaaaaaagtttcaacctgcccaatgaattcgtcggtttagtcgggttagcactaatatttatttctttttcacattcaattgttatattttagttattgtgataannnnataaatataaagattgaatttaaaattcaaatcatccgtcataaaaaaatatagtagtttgaactttttattttaaaaatatgtatataaattatataatatatacattatatataataaaaacatatgtataaaacactgtcttaatcgggttggtcgggttagtttggattgattgggcggattgatattattttcaacccgtccaatataaagattgagctggttatattttcgtcggatttttcggtttgcatttttcatcgggttatctcagtttggtttgggtgggttgttcagattgggcgatttacaaaaaattatgtacaacccttacaatatcttttctcttctcctttttaagctaatttcaaaattcctatgcaaataggaatagaaatgtagcatgaaattctaatggtattaaaattaatgaaaaattaaagaattaaaagaaaaagataaatgataagcaaaaggctaacaatattttctcttcttcttttctctctctaatttctaatggcagttactaataagattaagattccaatctaattaatcctaatgccatgacaaaaataagcaaatttcaaaattttcaaagaaaaaggtaaaagataagtgaaaaaaaataagtttttcctttttttcattgttaattaattttcaaaattctcaaggactaagcaaaagtgctcaaagtcctaattcaattgagaatgcttgaagaacatatacaaatgcctaagaattttaaaattggtgcccatctggtagtttcaagcaaacaagctcagttcacatcatcaagtcaacttcacaaatgtgtaaagttgacttggaggacaaatgctaacccaaaaacattccatggtgatgtagacatcaatgtttgacacttggaatgaaggatgacgtaacaaagttgagtagacctgagtcatagtagttgacctgggagggggccctagcc

SEQ ID NO: 29282 - DNA, 2320 bp, Cannabis sativa
aataaatttacgtaaaaattaatcaaagataataatattaatatggtctttagattgtgtgccacatataaaatattaatatgattttttaaggggaaaaaattagttcttatgtttattattaaaattaattactagtgacaaattatatttctcacgagaagagaaattagagctctaagaagatgagaaaatttattagaggaccattatgaatttgttataactaaatttgtgcacattaatggaagatgatgattcacacaaaatcacatatatatcaacaccactatgaaatatgaatgaagaggaattaattaattgattcaactttgtctttttcatcaacctaaattaaagcatcaaattaaatttgctacaaaaacaaagtttattccttattttgctttctttcttcatcttcttcttttcttttcccattctttgtgggaaattttttgaatcaaaactttaattcaattacaaatatttggggaaaaaagaaacaaaaaataatccattttcactatatggataaagtgttgctattgttagttatccaagtaaagttattacatgttgaaactcaaagtatttgaaattgtgatatagtacttctctttatgaccttttgtaaaagttagggaatatttttacttaatatgaaaaaacccatttaaagaaatgaaaattcaataataataattataacaataataatgataatgatgatgatgaagtgatattataagttggaaaccattataaagtttttaaatcatgatcaccatgacttttggaagtaataagtaacctaggctaacttaaaaactaaagtaccattagaaacttccaataataaataaataaaaactcaacccaaaaaatgaaaaagaattcacatggggatacttgaattgctaagaagaaaaagtttggtattttgacataaaaaggtggtcaaatttagaaagttgaattcttaaagtaaaaaaaaaaatagagaatttatattatttttattttgattcatatatacatgaattaaatgtaaagttaaccaaattggatttgtggttttgaaatgagaagagaaagttaaagcaatattcaacacaatatcaatcaatgtgaaaaaggcatgatatataatagtagaagagaagagaatgtcaaacatttttagggttgaataaatagtgttttattttaagaagggtatgaatgaatgaagtaattaatatgatataaatgatgaagtgtttttatgaggagagaaagccattttcattcctttatgggtcaacattccgtgcttcacttgtgttctaattgattaagacctttcctacaacttaaaagaaaacaatggagtgaaattcaaaacaaaaagaaaatttcaaaatactaatataaatattattaattgtaaattttagctgcatatagtaatatgtgaatgtaaattatttaaaataaaatagtttacaaaatatcgagtctgtatatatatttcacaccagtttcgattctaaaatttaatgagttataggaaaaaaatatttttaaacccttatttaaaactaaatgtgatattttttaaaattagtaaaaaaatatatatgtaattttagaaaaggagaaatttttttgatctttagactaagtaggccctaagtacaggcctaacctacttatgtttaatgtaaacctcacgtaaattacacacaaatttaacacttttatgtgataagtaatttatccccatttaagatgatcttatttatcaaaaatgatttaatatattatttatgtgtacaaatactattactcatatttcattcggtactcttatgttatgtttacaataataccgattggtgctatgtaatttgaaactcttattggtcaataaattaattttataaataaaactaatttctctataatatgtacaaaggttatatacaatattatttagaagtacaaaccacaaaaattaataatatttgaatttagggctatgcttttcaatataatatttactagaaaatataaatttttatttattgtgttattttttttaaacaatttattgtgttgaatttggttataaagtgtggaattatttaatatattagggtatattatgtaaaatgttgttagacattattaatactccttaacaatataaaattggtacaactatatactacaaaatattacaaatatatatctttatatattaaaagtgtctatttaacggcaattcttggtttaacgattcttggtttaacgattttttttttttttatttagc

SEQ ID NO: 29283 - DNA, 3750 bp, Cannabis sativa
aattcctaaatcccattcctcccttatccttatgaccacaaagtcgtttccaagatatccaatgaatacttaaagatgagttatttgaggattgccaccaatacttagccatcatactctccatatctctagtaatctcagtaggtaacaaaaacacactcatggcataaacttggaagagcttgtgccacagtttttattaggatctccttgcccgcccgagagagaaactttttaccccaagcttgaagacgctttcttaatttttctttcagataacccaacgccgcagtcttattaagccccatggaacttgggagacccaggtataagctaccctccagagctatattcatgcctaacaacgccgcaaggttgtctctaatgtcctcgccagaattggcactaaagaaaattgatgagttggcaaaattcactttctgaccggacgccaattcaaacttttgaagtacctctttgattcggagtgcttcctcataggtagccttgcaatacaagtaactatcatctgcaaaaagtatgtgtgagatgcggggagccccattagccactttgcaactatgcaaccaacctcgattttcatacttacgaaggagggccatgaggccttcagcacacagaataaataagtatggtgacagaggatctccgtggcgaatacctctagtttgaacaatatgaccgatctcgtgggtaccatggatgacattgtaactagccgatgacacacaactaagaatcagttgaacccaatagcttgcaaagcccagtttcctaagcatagcatcctaaaaactccactccacacggtcatacgctttactcatatccaacttaagagccatgtagccttctttgccttttcttttcctttttagatagtgcaatatttcaaaggagaccaaaatattgtcagaaattaaatgacccagaatgaaggcgctttgattagccgagatgatagtgtccatgaaaggcttcattctattcaccatgaccttggtaataattttatacaccacactacacaaggctatataggtcagagatcagacatcctttccgcattcttcttcttcgggatcaaaataatattagcctcaccacaaccattctcgaagcttccactcacaaagaatttacgaacacagttaataacatcaccacccacaatgttccaacacttttgataaaatgctggggtcatttcgtcaaggcctagactcttgtcggggtgcatttgaaataacactttcttcacctcctcatctgtaattggctggcataactctaaattaacatagtctggtacaatcggttccacacagtcaacaacttcactacatgatgcgcctgcggtctaaaagatctcttgaaaataatgaaacaccacctctggaagaccagagtcccacgaacaccactgatccgcctcattacgcaattggataatctgattgttcctttttctggttgtagcagctttatggaaatagctactattcgaatcaccctcttttaaccagtgttgtttttcttgttgtttccaatagctttcccgcctatcaagagcttcgtaaagcttcttttttgtttcagagtatcgttggaccgaatcactatcccgacgaggatgcagaattttcaattcagacttgtaacatttaatctgatggttcaaagttcccgtaatctccttcccccaaagagccaatttttcagcacacaaagaaatattggcagggaaatcacaaaactgggtttgatcccaacagtcattcacaatctcaaaacaaataggatcttttttcaaaacggaaacgggcactaggagaaaaattattaagtaccttcggctccagaaagattggagaaacgatctcgagtggagtattccatgttggtaagagtggcttccagaaaagctaaccgctaggactgagtaaccaacgctctatcaagccgcacttccacccaatggttagaaccgcagcctttctcccaggtgaaggggtgtccatgaagctccaaatcagtgaggttacattgacgaagagtcgagttgaaaccggttagcaaccattgcagataacgtctaccaccccgtttatcttcttgtcggacaatattgttgacatccccaataacacaccaaggtaactcagattggttagacaatgtgctaagaagattccaagtttgttggcgtctattacgatcaggttccccataaagcccaatgagtctccaatttcttgcatgaggggaagaaaccacaatatcaatatggttatttgagtaacccaacaaagtcccctcttctttattcttccacaataaggctaatccacctgctgggcccaaggcttccaccacaaaaacaccttcaaactttaataatctagccaagctctcaacccttgctttaagacatttggtttcacataaaaaaatgcaattgggtctcttttgagaaataatttctctaaggaattgaacactctgttggttcccaagcctcggcaattccaactaagaacattcatgattcttggcgggcttggaaaccagcacccgccccacacaagttttttgtaccctccgaagtctcaccattcaccacatattcattctccataatttccatgtttttaagaaaagtggaatttttgtcattagaatccacattaattcccagcccactatcactctctcggcccattctcctttttttaacttcaagaaaagacaacccaatatttgactctccctccacacttttcatatttatttttccaaaaaaatcgtccctcatatcaggggattgattttgattattatcaatcacatagtcagccctcccttgattgcatcccataatacatgatcccatatttttctccacttgactactgcctccagctaccaccgtaacagaaggagtaacactcggagcactcacaaagttaacagcgaaactttgtgaagacgaccgctgtttggtcaccagacccgatcgcagccacctcgaaccatcagcgcagttacgttgtctaggagccgccttaatttccaaactataattcttcacaatctgatccttcgaagtgtcgaacaacttctcacaatacctctctgagtggcctaaaacaccacagataaagcaaaaatttgggaggtctcaatatttaaaaacaatatgacatactcggccaccttggatctcaagctttttcttctttttcaatggcatattggctggtattttcacttgaatacgtaagtaatcacgccaaactctaaaaaaattattcaaatgcgacttaacgaagctaccgagataattaccaattccgctaatgattctttcagacataaatctaatagacatgttatgtaattgaactcataattctaaccttgttaatggaacaagtcgaggattagtacccggtttcacacgttcaaaaatcagacgagcccggtcgaacgtccatggactaccctcaaccacccgttcgatgtcgacttcatggtagaactgaaacagatataagttcagataaagttccttgacataaaggccacgacctggctgccataaagtggccattttattctgcattgcctggaaatcaatagatcgattcgtcaaaaactgacccactaacagccacctaacgtcaatctcggagagttcatctgtaacgtccccgcttcaagcctcca

SEQ ID NO: 29284 - DNA, 3260 bp, Cannabis sativa
gatcatacacatttgtacattcgtgtagctcaatacaaaacccttcccctttgtgctgttaaatccatacttgtccttgggctcggaggtggtggttgagttggaacacaagttattcaactacaattaatgcattgcattattaagtgtacaatttaaatgtgtaagccatcctagtttcaacaaacaatttgttaccacatttgttttttaataaaataaattaaaggttaatacatataagatcggtaaggaatccacataaactaaccttctaaaaaaattaatagtaacaaatttaacagatttagccttcctaattaaaatatgattttttttttcttttttaacaatataatataatatgaaatatctattttactcaaaacagaattttagattttttttttttaaaatatggttgatatataaaatataaccaaacagaaatcttttgcatttttataaatgaaaaatgaaattaaattttaaattatggttacacaaccaaacagaatagctacacgtctatataaatataatgtatgaaatagagaaggaataattaatttattaatgatggtacgccttcgtgatacagaagcagcagcactgaaattgaaattcgaatatgaatttgatgaaaataataagggtagtgatgatgaaccaatggtagtgactattcatcttcacgaagtaaatatatggaataataataataatcagcagcagcaacaacaaagtaacgagtgttgttacggcgtcgtttttggtttgaacactggagaagagttgatgagtgagactattagtgctgatccatccaaaccaataatttgggatcgtaacagagattatgtgattttggcaaaggataatccaagtgatttggattacgtggatttggacgtcatgcaatttgattactttcctgaatatgaaaccggaacatccacgggtgatagattggtgggtcgggttcggtttcggttacccatttggcctggtcaaaaggaagttctaatggccatacgagaagaagaagatggtgtcctcctttataaatctactggttctatcaaattttgtatcaaaattgaacccaaatctgtctttattatgaacaggaggagacaattacaacgttataattcttatccttattcttacttttaattaattgttttgttagttgtgttctttttagattgttttttttacccttattcttacttttaattaattgttttgttagttgtgttatttttagattgttttttgtttgttttaataataataatgagcttatattatacttgattatatatataattttgttttgatatatgttttcatcaaagatagtgtcaatttcattacttcatttcatgtttgggtgtttgcgacgcggacaatgtaaattttggtcattttttcaaattgtaattgcaccacaagcataaatgcaaaaatgagaatttatgtggtttttactatcgttataatcaaacattacaataaaaatataacgttaaaagcattagtgttacctaacaccaatctatgtgtcaatattgttattgatgtaactaattatattcaaaatcattacagtgtttggcgaaaacgcaaacaacaccacaaaaaatttaaaattgcttttctatgtggtgtgggcttgtgcactgtttggtgtgcttctctttggataatgaacaagtttattttaatgaaagctttcttattaagaaaaaaaaagtaccaatttgttacaacaaaatataactaaagaaattattgctactaaaagaaaatggaatttatcattatctccatccaatcaaattatataatatatattaatctaatttaattgaatttgcttatacatcggatgaatattctgatctggtgttaactacaaagcaaagattttagccgctcttaacggggatcataggatttccaacgtggcaatttagtctttccaaattaacttgttttttttacagaaaaatcaattataaaaaataaaataaaatagatgttatattagcaaggataaataaatataataataatcctcgtacggtttgaccgggcctattaatattgctcatattatgatgtcttacaccttgacattttgtttttatatttcattaactgaaatgaaatctatgattttaatataccttaataaaaataaccataaaaataaatgttagattggaataagttatgttatgaggtttgcatcttaagacttttttgttaattaagttatttttcatcaagaagtttgattattgcaacaagtctaaatataatttttggatatttgtgtttttgttaagtataatagatactctcataactttgtaagcacttagaaccagcttataatatgtacatttcttcatttcggaccaagtcatgaacaattctttactccaaaaaaaaaagagtttcacaccatgatggagaaaatttgtataaacaactattattacacccaacttaaagccaaatgtatctcctaaaaaaaaatcctataaatttgccataataactaaaagctattgtgtgtgtaaattgtagtactaaattaactatgggtgatttcataccaagtgtaaataagggttgggtttatagtgaatatgggaaatcttgccatgtattaaagcttgactcagacgtaggtgttcctgaagtgagagaagaccaagttctaatcaaagtggttgttgcttctattaatccagttgattatcaaaggatgcttggctttttcaaaaccattgattctccaccaccagtataactccttttcactctatttcttttatattaataatgaaatatttccttgtgtgttcattgaaaaattaccattttacattttgtgttttgtaaaaattattgattggagtttctcttatttgttaaataacaaattaatccctatatctttcaaaataatataattagtttaattttttgacaattttcttttaaatataatcaatcaagtcaatttctagcacaaactgactagaagcaaaagaattgcaaccagtctcgtcatgacaagctattattatgttattttgaggaatattgaactgaataatgttttgtactattttaagaaataataaagagttcaaattatcatttaacatgtaagtctaaaatgagttatgactcaaaatcatttggtaataaaggaaggcattgttccaactttctta

SEQ ID NO: 29285 - DNA, 1789 bp, Cannabis sativa
  modified_base (466)..(467): a, c, t, g, unknown or other
  modified_base (1757)..(1757): a, c, t, g, unknown or other
tttgcaggatgttttaaataactataatgtatataactatgagaaaaaaatttaactaaaaattattatgtatctattttaaaggtttattgtaaaattttccaaaaataaatatatatttaaagtcattaatttaaaagtgatttgtcttgctaattatataaaaagagaaaaatcaaaaattgaaaatgacgtgaagagttaatggcggaggaccacacggatcaaaatacaaagcctataaataactattcaaaggtctaaaatagaatgttcaaacttcgtgttcaattttgcatacgttggaaaatttccttaaacttataaaacggcataaggaataatattatttggaaaattttatttggcaggataatctaaagacactttattttaaaaaaatttattttatataaaatttatttttttaattgtactaaattttttaaacttttttcttccaatnnacattcttaaaaaatatacctatcaaataaaataaattatatttttaaatattatgaaaaaaaaaattatatgaaattttcttgaaaaaaaaaataaaaaaatatatatgtacatgagttacaaaaaattatgaaaataaaattaaaataagtattgaaattaacataatgtgagtttttaaaaattatttaagtttacattttttaataatagggtgtatttattattttaaggggtacaaatagaacttcccttgtaaaaatttttgattggatcaatctgtattaaatcacaatttagatttaatattttttaaaaaatattataaaataaactctaaatttagttttcgtcaaattaaaacttaataataatttgatttggaattgttaagacgaaactaattatattttttgcttctattcttgttagaaattgaattcaagttagttacattaataaaattaattgaaaaaaattgaactccgaatctattttatactattttaaaaaatataaaatttaaattattatttaataaaatagaaagatcaatcaataacttttgcaaagcttaagttccaaaattatatttattctgttggaactttgtgaaatctcacaaaaataaataatgaagtgtgtgagtaaatagaatctcacatgggataaaaatacttcattagaaagtgtatattacgacggtgctctatcgtccaatagagttccgatacagtgtgttcgactggactattttatcctggggacaacgaggctgatactctggttacacatatctgggcagtactgcgaacgtcttaaagagagtgacctagtccgcgactcaacccaaaattctacttcagtaaattcgttccttttattttctacagcaactatttttgtcaataattttaagacaattttgtttctcgttttgagggaaactatcttaaaaaatagaaacagaaaatgttatttttcctcactatgaaaaaggttgcttatgttctgacgactgataaacctgttatttctgatactgcaaaggatgatgagaagcagaagcaaactgctgactagcaagctgggtcgagaatgattttttatgcaaaaattatattctcaatggtttatctgacaacttatatgactactataactctaacaaaactgttaaggaaatctgggatgcactttaaatgaaatacgacactgaggaggctggtactaagaagtacgctgtcaaccgctacctcaaattccagatgactgacgataagtcagtngaggctcagtctcatgaacttcagaaaattgc

SEQ ID NO: 29286 - DNA, 2248 bp, Cannabis sativa
  modified_base (44)..(51): a, c, t, g, unknown or other
ttcatatttaggatgttaacaaacatacttgtgagtagatctannnnnnnngtaaaataatttccaacaatgatagcatcaatagcacccgaaagtacaattggcgaccatgatattactcttaaccagtactatgcttatattaccgaacccacacaatggttgtgccgctatgatagtgccaattaatactttttagaatgaatatcactcttaaccagtacggtgcctgtactaccgaaccgacacaatggttatgccactatgatatcacccaaaacatataaaattacaaacacaacatgcatatataatatgttctacgctagtcttacctcgtttccaaattcaagtgaattgccgacctgaacggagaacctcatgttggatggatgccctaagtcacatttacataaacgggtaaataatgcgtcaaaaccctaatccgagaaacccaaactcactactaagggttctactattggtatttgttataacgatacccttaatatcacaaaaatgcactactagaaaaagaacctatttgcatcggtcaacgcgtctcaccaaaatagttgactgatgtaaaaaataagcagagattttatgcttcagaggataactgaagctaaaagaaaccaattagcgtcagctgttactccgaagctaaaagaggaactgagaaaaaaagttaaaatttgaaaaattgtcttttatattttgcttcagtggaaaatagactccaatttctttggcttcggttaggaacagaggttaaaaaatttgcgactgttatccattgaagcaaaaagattgaagcaaaaagatttaatttttgtaataaccctaatttttatccacgttgaaacttatttcgagttttcaaattaacttgcgaaaccctagcacagcccaaccctcacttcttccccattttgaaagaccatcgcccaccgtccctctctctttctctctgttgtgctgtccactgcccaaccctccctctctctttctctcaattactctctcctctctctctctctctatgtgttcgagctccgccctcatcgtcgactgtttagtaaagataaatccctatgaaaatgggcatgagaaggctacgaagggacagcagacagaaaatagaatcctccttctatattatcagtccacacaatttgttcatcgagtaatcatttcccatttttcttttgggtaagtcactttattcttcttgttcttcctttttatatttttctctttcatttcttggttttgatctagatattgtaattgttggttctcgcatgtatggactagcgaggtgatagatttgcagaaaccaagttcactaagaagcaagtcatggagcaccatgattgcattgtttgatctgggtatattgagtatttatgattttattttttatttgagtttctaatttagatatttagttgtcgtacggattaactttgaaataattctaagggtatcatgcttaaaaaattactaatatgtattttgtatactctcatatattatttgatgtgtgttcatatatatcttaaatatattatattattttttccctcatttctttacaatcactaaaccctttctttttatctattttatggattttattattgtattatttgattttaaattttgattaccaattgtatctcattttcacatgctcgatccttgttgtttcacctgcttgagctccattttctctagaaggaagtaccaaatccaaatctcaaacgaggggaccgtcaaaactagttatctcaagaacgtatggtacgtcatttatgttgttgtatttcttcttctacagaaaaataaaggatcataatacaatttcggaatatggcttttattcaattctcttggtattgatttgaatttatctatcaagtgtagcaaaagaatttttattgctttgtatctttgaaattggcagaaaattaacttaaacatgtgatttctttaaataattacaagagcaaatcaatgtttaaaattgtatttttattgcgcacctcagtttaaggaggaaaaaaaatacactattgcatgcgcctcagtatttaggggagaggcgtacgcctcaaacttgtgaggcggtagaaaatcgcttgaggcgtaaaaacatgtgaggcgcaagtctcaaaaggaaaaccaatactatagggtgttttcagctcatttttatttaataacttaaaaaaaaaaaaaa

SEQ ID NO: 29287 - DNA, 1782 bp, Cannabis sativa
tttttttttttgaaatggaattcattcattcaaacaaacattacacaggattaggcgaatcgagctggactgctcgtctcgcacaagggggaacaaccccaacccacatggcactagctttgttaatcaaagcatcattggctaatacatgagcaacttgatttgcttccctatacacaaaagatatcccatagaccctgacatcttgcaataaatctctaatatgagcaataagtccatcaacatctcgacaacccccatcatccttcagcaccagattcacagcctgaagacaatcagtttccaccatgaaagaagacagtttctgctgcaacccaaccgtgagcccatctgctatcgcaagaagctcagcatgcagtggagatagtgcttgtcccactatcctgacagccgccctgctaatacacccatcgtgatcacgcacaaccgaactaacacttgctaatccttccttctctttcacgcccgcatcaacattaattttaaatgatccccgaactggtgcaacccaacaagcagctgccctcgctgctccattctgctgcgaagccgtagcccctcgaaattcagcaaggagtttgctgcaccattcaatcattgcagcagccgtgggtttgtgtcccccatggttaaccgagtttcggatataccaaatattccaggacagaactagaaagaactcaaaatcttccttcggcaaactccctgacaatctcatcaaaaaagcaagaacatcctccttaccttgtctcttaattttaccataaaacccagtcagttccacacatcacaattcactctacatccccataaagcatgaaagacattttcataagcaccactagaacaccgattgcaataaggctcaacctgaattttccgatgagcaagagccgaattggttggtatccatgaatgggccgtcttccatacaaaatgtttcacttttggcgggattttgaacttccaaagttgtctccaccatctctcagtagcctcggtattagactgaatttctctaacctgcagagccgccgccatacgatagccactccgaactgaatactctccatctttactataatgccaacagatcttgtcctcaatatcatattccgaagtagccatttgaagaattaattccgcatccgttggattgaagacagctctaacaaactcctcatcccattccccattccctttcttcaaatcaatgacatgtagttgatccggcaacgagggcttgtcataaactttaaaagtaaccggcctaggtaaccacgggtcttcaagtacccgcaccgagtttccattcccaatcctccatcgatacccagcttgaataatctttttcccccacaccaaactcctccaaacaaaagacgcatagttcccacatttagcctccaacactcctacattcgggtaataactagccttcaagactttgctacacaaggaattcggatatcgaatacatctccaaatttgctttgcgagcaaagcttgattaaacaaacccaaatccctgaacccaaggccaccttgctccttatgtttacacaaaacagaccacttacaccaatgaatcttggcctctttttccgatgatccccaccaaaaccgggctgccatactatgaatactattaattgtcttctttggtaagcggaaacaactcatagtatacgtaggtatagcttgaacaatcgccttaattaacacctctttcccagcagccgaaaagaatgaccctttcca

SEQ ID NO: 29288 - DNA, 3418 bp, Cannabis sativa
agttcttgaatttggtgatgatgcgagatagtatgtggatacaggtatcaaacatcacattgcttttagttaggccaatcttgatcctgctactccatacaatggacaagaaactgttgttgtaggtaatgataagaagcctctatatctcatcttggtcatgccacctttccttctaattgtactaactctttgaagttaaaagttgtttttgcaagtgctctcaattatcaagaactttattagtgtctctaagttaattaaggataatgatgttttcttgaaatttcacaaatctcattgttttattaaggacaagcaaacgggtattgttctaatcacatgaaagactaaggatggtctatatcttctaggtgatgatagcttgagtctctctccaacatttcttgattgcaatcttgtttcttctagtgttgtatctaagtttaaaactaattgtaattctcattgtactcacattgctattgcagatgtttcatgtaccaactttccaataaataaagactcttttcttgttcctatatcacttagtgttcatttatctactgttacttgtgatataaatttgtggcataataaattaggccatctaacacctgccatattaactaaaatgttatctagtgctaatattcctcattcacttaaaaatcttagcttttgtaatgcttgtcaacttggtaaaagtcatagacttccttactctttatcctttaagtagagcatcataacctctagaacttattcatacagacctatggggccctactcatgatgtctctaaagaaagttacaaatacaatatagtagttgtcgattattatattcgttttttttattttcccccttatattcaagtctcaagcttttgaactttgtccaattcaaatgcttggttgaaaaatagtttaatcttcctataaagggtgtccaagctgatggtggtggtgagtataggccatttgagagatttttaagtgatcaaggtattaaatttcaaaagccttgtccacattctcatgagcaaaatgaaggggtgcaatgcaagcatcgacacattagtgaaactggtttaactttgcttgccaaatcttgtttagatatgccataatagtggtatgcatttcaataatggatccatttggatgcttgcttccttataatcatcataagatggagttcaggtcagaagaatgtatcttcctgggatattcttctaagatcaaaaggtacctgtgtgagaatgcaacatgccaagtttttatggctcgcaatgttatttgtaatgagtcatattatcccgtttctgtcacttcatcaacttctacatctcaggtaccttctctttttactccttgtcctactgctacatttcatacaatcctgtaattttggcacaaatttatcttcttcatcttctcatgctgattctgctcatgatgatgtatccctgagtctcactctaatgctggtcatgctgccaattcaaatattgttgttgctatcaatttgagtgttgttgccgttgtcttgaacattgatgataccgctccttctaattcagtttctggttctgaggtagttcatcttgaagctcttgtcttgagttcaattcaggccacttcaaccagctcacctgcaatcccaattcacgagtcagaagccattggtgatcaaaaaattcttctactgaacctcactcagcctcttttgcctcatatgagcatgttgctcctcagagagtgcatcttatgcgcacaagaactccaaatgggattcataaaccaaaaacgtatctttccacaaaacacaaacttgaatccttcctgcccactaaaccaaaatccaccattgcatctctcaaagatcctactttgtttgctgttatgagtcatgaattttgtgccttaattgctaatcatactcagacattagtaccttatgaatctcatatgcaactcatccacaacaaatgggttcatcaaataaaattaaatgttgatggatttgttgatcagttcaaatctagacttgtggcaagaggatatctagaacagtctagtattgattatgaagatactttcagtctagtttttaaaccagttactgttcgaacagttttaactcttgcggtatcttttaattgggaaatttgacaacttgatgtctctaatgtttttctaaatggcactttacaagagaccgtttacactactcagccccaaggccttgcatatccctcaaaatctcatcatgtttgtcatcttcacaaagttttacatggtctcaaacaagctcctcaagcttggaatgataagctaaagcagactttgctaagatggggtttcaaagcttctaaggctgacacttctttgttcatttttgggactgctaccactatggtcattctactagtttatgtagatgacatcactggaccaaattctcagttgattctcaagcttataactaatttcaacaactcttttgccttaaaagacttgggacaggttcactattttcttggtatggaaattcatagagatttgaatggcatgtatctctcccaaacttattatattattgaatttcttgtaagagctcatttggaaggggctaaaagttgttctagtcatactagtagtgctcacaagctttaacttaatgaaggatctacctttgaagacaaaaatctttgtcaaagtactttaggaggcttacaatatttgactctcactcaaccagatttggctttcattatcaataaacttactcaagttattcatgcacctatttctgtccattgggaagcatgtaaatatttactgagatacttgaaaggtactttaactgaaggtattcttcttaaaccatttctcgaatgtttgttgaagcttatttggataccgattgggcaagttgtcttgatgataggcgttctactagtggatatactatcttttttggtccaaatctcatttcgcggtctgttaggaagcaatatgttgttgcacgctcttctatagaataacaattttgatccttattaacaaatactggtgctgaaatcatgtggttacaatccttgctttttgaacttaagtccctcttgttgatgttcctatgatctaggtcgacaaccaaagagctgctgccttaggtgctaactcgatatgccatgcaaggtgtaaacacatcgagattgatcaacattttgttcgtgatcaaattctgaataatacactttcagtacgatttgtgctatcaatcgaccaagtggcccatattctcactaaatgcttacttaaagatcgatctttgtatcttaaatccaaactcaaagttgtcaatattgttggaatttattttaccaggatattagatctactcacaagta

SEQ ID NO: 29289 - DNA, 2465 bp, Cannabis sativa
tactctacttgacatgtttaactttcgattcttttttactatccttaagaacaattacagagccaacaaacctcccattgtcttctaatgcttcttttacttgtaaatttcaggtgtcagtacttaagtaatgcagttttacaagctaagaatgctagcaccagtaatggcttggtgagttctacaaagggtgctgctgacaatggtctactagatttactggaagggaaacttgctgttcttcggtttcagattaagatcaaagaagaactggaagctatagcttccaggctagaagcttcatcaaataatgagtctgtccaaaatggagctgaaagcacatcaactgaggacgctaatcttgcaaataatgcacgacaaaaggccaaagagctatcattagatatgaagagtattactcagctatataatgactatgctgttccatttgagctttgggaggtaatacttaatattcttatcaaatgagttattaactgaatactcttagtggcattatgttaatatatatagctataataacagtattactctaattgttaacgcttccgtagcttgagcttgctacaagcttccaagttaacttacatttcatggtcctggttttcctttgctgcaatcagatttgcctcgaaatgttatactttgcaagctattctggcgatgctgacagtagtattataagagaaacatgtggtagacttattgatcaagctctttcaaggggtggcattgccgaagcctgtgcagtactcaagcgggttggttcccacatttatcctggagatggagctggtttacctttagactctttgtgtcttcatctggaaaaggctgcactggtactttttgcacacatgagcaattttatgtgattaaagcttttttagggaatgatttatccgtagatgattaatttattgcctgattttgttggtgctatactttttcataggagagattggagtcgggggttgaatcagttggggacgaagatgtttcaagggctcttcttgcggcttgcaaaggtgcaactgagcctgttttgaacacttacgatcaattgctatcaagtggagctattttgccatcttccaagctgagattgcgtcttctcagatcagtactagcactacttagagagtgggcaatgtctgtatttgcacagagaatgggaacaagcgcaactggagcctcgttaattttaggtggaacattctcaatggatcaaacggcagttatgaatcaagggattcgggataagattactagtgcagcaaacaggtcagttgatttctactttatgctgcatgtttctgaataggcggggtttcaccatacattagtgactgaaaaatattgaaattccttcaatttttcgtgtttaccataggcaaagtgttaggttaggtactactaattaaaagcaaaataaccaccgtgcaatttttagttgtctttccctaatttcgattcttataatttagtgtttccttaacccggtccttggtctgagctttcaccggttgaatgtggcaggtacatgactgaggtgcggagattgccccttccacaaagtcagactgaggctgtttacagaggtttccgtgaactcgaagagtcgctaattagtccataccctactgaccgatactgagttattcaatatctaatgtatcatcatgtattgatttttttttccttttctaatgtaaatttttctaataaaattttccataattttatcattgagcatgattttttttcctttcaatcccatgatttgttttggaatgtaaaagctaaagaatgatacataatattttgaactgtcagctcatccattcaactactagagataagtttagtctaatgtcttaggtctccattaaatgaatttcattggccttttgagggttcaaaatgagtaaaatgtttagtcacttgtcttttacttctgatctcttaagagagagagagagagagagagagagagggtttttgttgtaattgaattgggtttttggggtttgtgttttacttttgttctaaagtcttttgtcttggtagtttttgttgttgtaattttcatgtagtttgtatcttatgattcttataaattttgctgtaaacaaaaattcagaggacatgtgtattcagttattttctgttgcatattagtaatttctggatcttgatttcttcttagaataatgtgtttcatgtacaaagaaatgattataatattaggggtaattaggaatttcgtaacttttaaatgtataaaattgtgttcctgaattattgagatagttagatttaaaggtttttgttaaatttaattttactaactggcacacaatgtggacaaaagtttgagtgatacgatttgttatatttaaagtttgggagcacaattcgatatatgataaagaatttgacac

SEQ ID NO: 29290 - DNA, 1842 bp, Cannabis sativa
ttcattcttaggccaatggcgagtttgagaggaaaatacaaataatgaaggatatgttacaagcctgtgttatagactttgagggttcatggaataagtacataccattaatagagttcttctacaataaaagttatgagactagaatagggatgactgcctattagatgttgtatggtagaaatgttattctctaattcattgggatgaaatcaaggaaaagaaatatctgcatcctgaggcagtatagaggaccaatgatgatattgaaaaaattagggtttgaatgttggcttcaaatagcaggcaaaagatctatgtacatccaaagcgcaaaaatatagaatctcatgtatgtataagattatgtgtttctacgggtttcacccatgaagggtgtgatacgctttggcgagaagggaaagttgagccctatgtttacaggaccgtttgagatactcgaaagggttagacatgtaacatactgtttatacctacctccaacattgtctatagttcatcatatatttcatgttttgatgctaaggaggtacatatcagatccaacctatgtcatgggtaacgaagtcttagagctacaactagatctatcctacaaggaacaaccaaattagattcttgaccggaaggataaagttctgaagagcaagaccatagcattagtcaatgtattctaaagaaacattgaggtggagaaagccacatgggtgttagagtttaatatgaggacataatattcagagttattcaggttagatttcgaagataaatttgaagaataattgtaatgactgcatgcttagacatagaaattaataattaatcagtatattatagttaattatgatataatatgtgcaatttagaaaaagtctatatcatcggccaatgtgagactctaatacactttaatattatttggttttttatgtaatataatttgttagatcgctctctaaattaatgaacttaaactccagctatatagcaagtatattgtaatctggtaagtgaaaaacttataaaacattttgaaaagtgaaaattattgtaaaagttaaatgaccatatgatgagatcaatacgtcatatgtacaaaaggaggataaaatagctgcaaaattcaaataaagctaatcgagtggcagagatcaatagaactcatcccttacctataatgcaaggcacccaagtgataatccaatatgctgtaaagggttacaaaagacaaatgctaaagggtactattggtgtctagtaccctcctacgggtcaatattactattagtgtaattaagtattgggtcctatatagtttaatataatttttataatgtatcgctaaccaattgtaggtgacacatctagaaagtactatggtacccaataataatgctctttacaaaaagattgaaattaatgaatatatatttaatatttaaaatagaattttatgaattgaagtgtattgaatggagcgtgggagacagcaaaggagattccaataccaatttacctttttctttgggcaaagtccataccaatttacttttgttttcaatcatcacttctttctttatatataatctacttatatataaatataatgtaaattaaatactaaaatatttttaaattttatacatttatatatttaatgtttattttttgaggtaaaaatacttaatgttacaattctcttccaccattactaccacttccgttaaatgtggagggttcaaatagattacattgatttctttttattttaaaactttatattcttaatatcaaaaattaaatgctacttgtttaaaaaaa

SEQ ID NO: 29291 - DNA, 6309 bp, Cannabis sativa
  modified_base (187)..(189): a, c, t, g, unknown or other
  modified_base (1067)..(1067): a, c, t, g, unknown or other
caacaacaagtgagatacaatgagacaacaagtgagatataatagtaattatagttttaaaaaatcgagatatgaaaataatgtattatgggaaacaccgtagttttttttctacactattttatttatttatttttacaaaattaattttttttaacacaacaatttaaaatactacatataatannntttaaacttcttaataaataattttaaataataattaataaaattgtgcattcaatttttaataaataaatcattaataatatgaaataagataatatatttataattttactatatagaattatatttttaagtaactatttattataatactaaaaaaattaaattaggccgcgcgaagagcggctatattgtctagtttatatataaatgtagaaaaattccttattcatacatgaggctatgacttgtactatacagagaattaatgtcacttaaccatgaataaaacagtcagtaacatattaaagtttaggaatctttaatcaatggtcgctagtacggttcactaattcctgttattcggtgtaagtaatctcgatttagattaccgtttaccataaagatttaattcatatcataataatgatcaatagtagatcaacttgaatcatgagtaatcatgaactcatgttcatgctattagtttctttgattcactcgttaaagtttctaagagaagaggattcttacaacttttattttgagaatctaataatgtggatgactgagaacatgatcaacaatgatgaaatcttgactttcttaacggatcaaatgttggttctctttatgtgttaattcttaaactaaaaaattacgcgcgaatttagattagatctaaattatactttcactagagaattaacggtgctaaaagataaaaaagtaattaggagggtaaaacggtagattgaccaaaactaattacaaaccaacactaggagggttaatcactgattgattatatcaatggacactgcagtaaaactcagtaaatataattctataattactaatagttcaatttcatattnatagtggagtaatcatggaattaataaataagattatttgattgatgagattcaataaataaatctagtttatttgagcttaggattataggttcatggtcctcggatcgccactatcaaacactataatgaagaacaatagatgtgtgagagagtttggaaaaatctattttgaattgtcaaaatagtgattattaataaataatttatttttcaaaataattaaattaaataaattaggaaaagacaaaagttgtcaggataaaagacacatgcaccatctacattgtgtttagacacagtgtaggcgccacctacatagggtgtccccacgaattgtcttcttaggttaattatttatttaattaattctaaagataaatatttatttaaatgtgaatttgtaaagtaattacagatatttccttatagttgagatattatctcaatgcaattgagatatttcctaaattggttatagaaaataaatatctacaatcatattaattattcaaataattaaatataatttaataataaatttaaatttaaaataaaatatttattagtttttattttatatataccgtatataaactaaattcaagttatatgaattattatgtataatttttgagaagcctaaaaaggctaaattaattactttttctctctatcactaaaaagaaatatttttgctcatgtgtcgagataaactcaagaactctatacactctattatcctactagcctacattagtttttgtctgtgttagaagatttggaaggctactggtaagctttataatcaatcaaaaaatgatacaacttgcaaaaagaattaaggatatcctgataggcttctagaggtaaaaattattttagtctatttaactttagtttaatatatacatatgattatcttggacatatggtacaatgataattagaataactatttagttgcgtacctaatttggtactataaaactaacaattggtaccaaaacaactctattatgtatgtatatttaatattgtgtgagttttatgtatttatatatatgcgtgatatatatatgtatgtgttgaactgatcgttaattttatggtaaaattaggtgtaggtttcgttattatttttttagaaaataatgtaagccaatataggggtataagattttttgtgtaattttaattttttgattttttatgtaaattatttactgatgtaatgctcattgcatgtgagctcgaattcaaaactagaatcctgaccatgcacgacgactaacctgtctcaaattctgtgcccacataaatacatacatgcgagcatgcatgggacgtcagtacttacgtgaaggagaacgagacctgcttgggtctttgaaccatgtaaacacagtggtgtaaccaacacatggactacctcaaaaaggactgtgaaggtctggctaggcccatgacttacttgaagcagcgcctggaggaccgatcgatcctcccttgggtgctgccagagtcactgctcctcacgaggcatttttacaaggattcaaatatctccacccatgcccgggccattttgcataagggtcaacaagacccaaatggtgctcctcgtccatttcgtgaccaaggaagatagacccgtatatggtctgggtctccccgacctgcctggttcgaatagaccttgctcccatttttcttaccttgagcagccatggccaccgtggccatggtggctcttagagccaccaaccatgaatggaccatggtacccgaactcaaaacccgaccataatttatgtatgtatatacatttcaatatatattagtatataaagtatatattatattatatattatgtataatatatagtatacatataatgcataatataaagtgtatatatatatatattataaattattaaaataattaaaatatttgagatatttattttttaaattaattttgaattcaaatggtataaatttgaaattcaaatttcagttataactaatttaattatttaagacaataattgttttaaagataattaaataataaaaatgttttattattcaattaaagacaattaaaaagacaaaataattatgataattgtgtcttaaataaaaatattttatttaagaataaatagattaaaatcattttaattaatttaaagggtttaagagatgtcttaaataaaagtttatttaagaataattagttaaaacatattttaattaattttgaggcttacgacgatcttataaaattacaaaaatgccattgcaacaatagagagaagattttgtaatttatttttctaatttttccaagtgttgtaaaattaaaaatacctaaattttatctagttcattatcattatttatttattacttttaaataaatattcattaatagttaattaataatatgatcatgcattagtgaataatatgtcatacatagaaatctcacacaatttatattatcatgcatctcatagtagaaacatgatatattaggattgtccaatgtgtttatgtgtttataattttttgaaactgaaagcatgtaatctgattaagactaatttagaattaaacttgataacttaaaattaacctatcaatgtaaaatgattttaaattatgaattaaaagagttttaatttagatttaataattgtgatgagaaatttatttataatttgagagttttattgttaataaattaatcataattattaaagtggttaatatgtattaattctgagaattaataaaataaatacattaacttaaaatagtgagtgggagaaggagtacatgttaatgtaacctacagtctccattattggttaacatcgaaggagtataaactagcctcgagatgattttattttagtctccctaaggaaggtttgtctatagtgttgttcaaggttgatctcttgactaagataagaggaaatagtgtattttagtgtgatatcgaccctaagatagcattactaagtcaattcatggaatttgaaataataggttatactcacaaagtgcaactaagcttccatgtaattagttgttaacttgatcgaaaagaggtactatatattttgaaaggaaatatgggatatttaagtttcaaaatataaagatgagaattgtctcataggcttaatgaaattgactcgataccaaccctaccctatggtagtgatcgattatcaaagagttttatagtagaataagtaactctccaagcttaagaaagataaatacaatttatttgttcttgaagctaacttagtggaagatgataaatatttttggattattgattctagagccacttatcatatttgttcttttatgcaaatacttgattcaccatgggagttggctgatagagagttgaccatatgggttgggaatagagcacaagtatcgactaaaagtgttggccaagtccggttgaactttaaaaataagtttttattgttgaacaatatttttttcattcctaattgtaccaagaatattattatttatcgtttttacatgaacaatcttttaacattgaatttattaataatgagattattatttctaagtttagaatggcaatttattcttcaaaataaagaaatggactttatgtgctcagatcaagtgagcaattaattttgaataatgaattatttagagtagctttgcctcaacaaaataggaggcaaaatgttccaaatggtgatgaaacgtatctatgacatctacgtttaggccacattggctagacacaattaactggttaataaatgatggtcctttgagagaactaaaagttagaactcttccggtatgcaaaaggcaatagagccaaataacgacttgagcttattcacaccgatgtgtgcaaaccaattaatattcaaacttgaggtggttacgaatattttgtcacttttattgacaattattctagatacgatcatactttcctaatggttaagaggtctgaaacttttgaaaagttcgaagatttcaaagccatgggccatgactgaaaagcaatgaggtaagtcattaaagaaacttcgatcagattgtggtggcaagtatttagattccaaattcaaagactatttgcttgaagaagggatcttatcccaacttacaacaccaagaacactagcagagcgatgtaaagagaagaaactggatctttagacatggtcagatcaatgatgagttactcaacactaccactaagcttttagtgatatgcacttctaacaactacttatattttacatgtagtaccctcaaagagtataagcaacactccaatagaattatagcatgggacaaaacccagtttgaaacatttttatatttgggattgtcctactcatgttcttaaaccaaagactgggaaacttgctccatgaagtatgtttgttggatattcagtagaaactcgaggtagatacttctataggctttaagacaataaatatttgtaccaataaatgctatttttcttgaacatgactatatgaaaagtcataaaccacgtagtcaagtggtcatcgagaaaatcagaaactaatagatttttgagccatcaacttcagtatcatcaattgaacgaccaataacggtcaccactattcttgaaaaggaaaccccgatacattgtcgtagtgagaggtttgtgaggcaacctatcttttatgaacacgaaaaacatgttcttgtctctacacagagaaggacgatccattgacttactagcaaacaatggaagaccctgactcagacaagtggaacaatgccatggatcaagaaatggattccatgagcaccaacaaaggctgagtatataaaactccacctaaggacattacacccatagtgtgtaaatagattttcaagaataaaagaaatgttaaagggaaggtagagacttttaaagctatgcttgtagccaaaggctacacatagtgagaaggcatcgattataacaaaactttctctcttgtggcaatgctgaaatccattcaaattcttctttccatagctgccccttatgattatgagatatgccaaatagacgtgaagattgcttttctaaatggcaatcttgatgaaatcatttatatggaacaactagaagggtatgtgcaactagggaaagatcgaaaggtatgaaaat

SEQ ID NO: 29292 - DNA, 5955 bp, Cannabis sativa
agccagcttcttgtagaaacaagcatcccaaagacaaggctagtccctttctctgtgatgccaagaaacatttttcttaaaataatcaactagagcggagattgcaactccgtataatctacatgcttgctatctggcttcaaactaagtgattgctactaccacgaggttaccgaggtatatatttattagcttacatatcaataagaacctgaagtgatgagaaaagagaagaaaaaatggtttcaacatgaatagactgatcatgcaacatgtctgtactaactcaaattatcagctactaagacaatgccatcagatttcaacactaaataaggaacatctactattaggttttgtgaagattccagataatacaacgttgaatgaaattttctttctaaaatcaacttgaaagtaatcgaaaactttttaacagtctaaacagcattaacgtatgtgctgaaaaatttcgataatttcaaatgcaataagaatgataatatattagagccatcaaatctgaacaagtagcaaaaaacagcaaaggcatattacctctggacccaatccaaggtgccgactgacacctttttgttgtcaatggtcgcaacagcaccagaccccggctcttccatgaaagttccatcagctacctataacacagacaagaaagttccatgaaagtctgagatgtagagattggtaattatacatgtaatgtgctaatttttagcctgcttatttctttttgttttctcctaatctgctggttgtacctatacgagatgagtaaagatgtaattttgtttttaaaaaaataagaaaagaaagaaggatgagaagtctgatcataactgtatcaaataaagttataaacttgtagctgtatgaaccagacaaactttaggggatgtctagctagcaatgttggttatatatttgattagacaaaaaatacacaaataaggaagtaaatgaaccctgaagaagtatctgtcaaatgaatttgtgaaaaggtaccttcacattttgggcatttatagcccgagcagcatccacaattgctttaccaacaggatgaactgtatttgcttccacggcggcagctaacttcaaaatctctgcttctgacaaaaaatggtccgactgttgtacactgaaagggaaagagggaatggtgtggtttattatcgtctcaaaactaaacgcgagtgaccttcagacttaatttaagcctcaacaatgcatctcctaccagactttatagcctaacaaggaggcacaccttgaaactatttttgaaacaactgttgtgaatcttgatataaatttcagaggagaaaaaatatggaaataatttaaccaatcctaataactttgggcttcactttgagcatctaagcaccttaaaaatataaaatatattgatataacaagatggacgaacaagaagtcaacacaaacacacaagcaaaggcttgtttgtgtaactgatttaaagatgtctcttatttttgtttgttgtggtgcattcattttcctccaactctttcttgatgaagttttctaggtttttttaaaatataatatattcttttgtttctcctagaaaataaatttttctaaaccaattctgcaatgatctatactggtaaaggagaatttctacagtgctaatgtgcagtgccattttaaaaatgttgagttctgcctagtgtgacttctacagtgtcatgttgcatatttttctttccccttctaagatgggtattcccttgttcttgtatagaagaaattatgtttccaagtgatgagcaaaaacagaaaattttcggcttgattagaattttcacatacctgggtgtcaaaacctttgtaactacaggtcttccaactgtcaaagtccccgttttgtcaaacacaatagagttgaccattgaaaacttttctagaatattcccaccacgcagaagcagtcctcttgttgctcctaatgaagttcctacctgaaaaatacaacgccaaaagttgatgttacaagtgtgatgtaagttcgtatgaatattatttatatatagacaagagagccaattgagctagactcaagtgtgtgtgcgtgtgtgtgggagagtaaggtcttgaaaccctttaaaaagaatgaaaacgtttatgacaaataatacccttttgcatatggattagatattaagtcaatacaaatcatttattcacagttggtattgttccctaattttcttcataagactatcaaaaaaaaaaaaaaaaaatcttcataagaagaaatagtttgtcaatgcattcattatgcatgacaccatgaccccaatctgccaaatcacagagacagttgcctactggggccactgtttcacttaagagaggcaagataatttattatatattgagactaaatttagacattccatacaggtttgttctttgcttaaaaagtagcaaaacataaaataaaattaccagcatagctgttggcgtggctaagcctagagcacatggacaagcaaccacctgcaaagaacaaaaataaaagatactatagtttaaaaagcctttatttcattaacacacatttgttggggttatatatagattaaaacttcagagttgatatgaattaaatatcataccagaacactgcaagaaagctgcaacgctaatgaaaccggacttccttgaaatattgtaggaggtagagtacgtgcaccaaataaactccagaataagaaggtagcagtagagagagccattactccatatgtaaagtgtcctgaaacctggtgaaactaaaaccatcaaaggatatacagccactataatactaccaccaaaacaatttttctttcatgttctccattttagaagattagaagaagcaaactttctataccaaaaaaaaggtagctgagaaaaaaagaattttgcagaataaaaagacggttagacacaaaaaatttaaataaattgctttccaaaccaaaatcacacacacaaagaaataaacatcaaatcatcttcaaatgcagatattattatgcatagacattacacagcatttagttagttcaagacatttagtttgtttcatattatcctcctcggctaagagaacatcttcatgctttgtacacctttagtagtctttatattccaagtcataaggtaaaaggaaaaaaatggtgcaacatgtaatagaaatttaccataacttgaattcatataatttttttttactgtaactaaagcatcaagtgtccatctaagaaatctaaggaagaatctaacaccttgtcagccaagcgttgtacaggagcttccctactttgggcttcttccaccaaacgaacaatgtctcccatggcagtttcaccaccaggtctttgcacttcaacagtaagagtcccattcagattaatgcttccagctgcaacttggctctagagataaaatcccaataatgttagagcttgcagttgtacatttcttgcagtgaaagaaaaatatatagaagaggataaaatgcatattaaaaaaaaaaggaatactttaaaaaacgaggcaaacataaaaatcaataacctccctttctatgaacgagaacaatacaattagatgcctattcagttttaaggaaaaataaagatagcatataaccatatttgagagtataccccagttagtttggtcacaggtaagggttcccctgtaaaacttgattcatcaatggtacttcttccagctctcacaattccatccacaggaacacggtcctataacaatgaaaaaaaacatatcttaaaagagtaacatatgaaatgatgaatcaaaatatatatatgtatctatataaatccacatctgtaaactttcggttgtatatcattgaacagaatgagaataaggtattcacttacaccaggtaatacaacaatcaggtctccaactgagagactgttacacggtacatcaactgttgaacctgattctatatcatcattatttagcaagaggcgagcttttgatggtaaaacactgaggagcccagtcatgtcacttgttgctttaattttagctctctgttcaagattccttcccaacaaaacaaatgctattagcataattggttcctcaaaaaatgtcttccaaccctgcacgcaaattatccacagataagttctaccagtgtttcatttcatttagatgctgagtttcttggttttttgttaacaagtactcacatcgtttcaagaaaagaaaagaaacaaaagagagtccttgttcgtcaaacatgactggtaatgaatatgtttttaattaaagtcacatgaataaaaaatttaatattttattaagattgattttgttttctattttttttttttttttgatattgggagagggttccccttggtaacttattttatatttatgaacaaaataattattttagattagtagtcttctgcaattgacactacaactcagaattaacactcaggattcaacgataaaagcgttccaaccaaacaaaatatttaagactaaaaaaattaaagaatatgaaataaaagtacatatataaaatagagaacaacaattaccagttttggtatgaaggcagctaatgtgctgaccgtaaacgatgacaaagctccaagaccgaccaaagtgttcatgtttggagcccctctaaatagactcttcatgccatcaagaataagtttccggccaggaccaagcagtgtaaacaatgacaatgacagatgaaatccagtagaatgaaatgcatggatccatgcagccttagctccaaataaatgagacatatgaccgaaaaggcaaacagcacataaggcccaagagaatgcaagctcacgacctataagattaacataacagactcaatttccagtagacaaatcatcagaaactgcagcttcgaagcagttataataggagctgaaatatcttttcaagataacaagaaaatgaaggagacaacaaagtttacaatctgaaattaaaacataaacaaataaaagaaatgatctataccactttctttaaggcgttgttgtttttcttccattttctttccaaaaactttaagaaaattatatgctcctgaatctgcatgtaaaagaatgatgaattagtctagccactctgcatatttatttgtatggttacaaattgttgatgtgaagtgatctagcttttaagatctttatgcaaataagaattagaactctaaaaatgaaataacttgtaagccaaggaaatagacatttcatgggaaagtaggccacaaatccattgcaaataattgatggaagtaaaggattaagaatagcacacaaaatacgagattgagaaggttataaatttaaatcattttaagagaagcacaacaaggaacggttaccaatcttatgaggagtgaagcatacacaaaatcatatctctggataatgcttctagataagcatcaaaaaagaagtccaaatcaatgtgattatgataaagtactattacaagtgttttattcaatatatccatgtcaataatgctcatggaatacaggatcagtcaaaatagtgtaagtcaaatgtctaacacttaaacaaatgaaatacagccatttttcttttctattttcttggatagggtacaagaattttttaagagacaaattaataactaggaaattgctaggcttggaatgtggaacagctcattctccaaagaaatagattccccacaacagaaatgccactccaaccaatccataagctgcatagacttacctattggaagaagtagcaataaatcaataattagccttaagcctatttgttcacttctaatacaatgcagttgaggtgtatagattcttggggacataccataacattt

SEQ ID NO: 29293 - DNA, 2741 bp, Cannabis sativa
atgcttaaacaaaataaaatacatttgggataaatactattttgaaccctttattacctcatacagtcaatttcaatgcttaaacaaaataaaatatatattggataaatactattttgaaccctttatttttataaaaattaccgactgaactctatattttgttaaataataaaataaaccctatattttttaatatgataaaaataaaacccttaatttaattttggacaactttttttaatacaatcaacttgaatatttaaatgtgaatctagtcctaatcttcatattgtaaagatgttaacactcctttctacatcaataaaaaaaaaaagattattgacataattagtagatacattgaaaacaaatatttattattggtaatgagtcatttgtaatagatttttttttttacaaagtttggcaagttttcatttttgtaaatgcaccatttacataccatttttccttttcataattacccacatttaaatacaatttatgtaacaacaaccccattccaacacactcatcttcttccattataaagttattattataattattacttcttcaaactacttcaactattccattgggagtgaattatgagaccaagtagcaaatccaccagctatgtcagtaatgtaagtatagccctgaccaaaaaaaaagagcataaatgagatactaaaaatgttaggtttgatgatattgatattcaaccaaccaaaccatattttgcttacagaagctaaaagatcagttgcagccatcatagacctttttccactttgacatccctgtaataatgattaaacaaagatcaaaactgggttctttagtttattagataatcataagtcaatacaagacagaataaatggaaattaactcacaacaatgatttcatcttgctttctgaaatgtgatgatacttctgctacaaagtgagggttccttgtcatccctgcattgaatcaatttttttagtttttaaaaatatattattacacaattttgctatctgaaatgtgttaactcaaaatcaatcaataatagtcttggataaatttgcagtacaccccctaaaagaatgttcaatacattcttattatttttattggcatcaagtagggctttttagtgtaatttttttttatgatcatgtgcaacaaaatatttgaacgttagtgtaaattattaacaaaattgagctaaaaactctatatttaggagaacgtattatagagttatccaatagtgttataaatgtatatttggaaatatttgactctaattctaactcaaatccaattgacattacaatagctcataacagactctaaccaataatcactatccaatacaagaaaaagaaaatgtgatgtgattcttatgatttacctgaaccaactctgtacatgtaagggatgttaacagcaccaggggcatgtccagcactgaattcttcaggagtcctaaaacaatcgaaaatcccatttttctatcaatcaaacagaaaaatttacagataattctctcctcatttggaataaagcaacaaaaatttcacacctaacatctaagtagcggtggccagcttgtaaaagctcatgagcaactctaactgggacagaaattggcactctggttgcttctaaattccttctcagagttgtagccttaggactttttcccaccatccaaacaacaagttagaaaaaaaactagactcataacatatcagagtaaaaacaagcttaaatcttttaccagaagtttggagctttgttgggtttgactcttgaatgagaaaagtgttgacttggtgtcctgaacaagatcaaaaaatgaataaagggtcaatagagaagaagaagttgaacatgaaagcacaagacccagatcaaaaaacaaacctttgagtgagaatctgaggcctaattgatggaactagaagagacccatttaagtaagaggaggatacaagtgatgaagccatgatttccttcataaagttttgagcttttttatgttatatatatgggaaagaaagaaagaaagaaagaagaggcaatggagaagtttgattttgatatagtagtttcgttttgaaatttatacaaacacaaggcatgcaggcaagcaagtaaagtgcgtaactttattaatccgtgatggtttggttaatgagatatgaatcatgatagtgaagggtttatatagttgttgtgatggaacaaggcatggctgacacgacatcgttttggagttttttgaactgtttcagataacccaaaagcaagagaactaaattgataagcaaagtaggcaatgcataggcattgcattggataagatcgagtgtggagaagtgagtacaatcgtgtggcacagtcttccatgaccaaattaagtctctttgtacacgtagactttttatccaaactccaaactccaaactccaaaccaatctaatctattattattgctaatggctatataatttttgtgttaatgataagtgcatatttattaagatatgatccactgttcaaacaaatagtatgatattattaggttaacttatcatattactctttaattaattaaaatatgatatggccgatatttattgttagaaaattaataatcccaatatataaaatttttatataaaataaaatattataatatatgggcctgtttggtacgcaggactggattggatt

SEQ ID NO: 29294 - DNA, 1692 bp, Cannabis sativa
  modified_base (28)..(32): a, c, t, g, unknown or other
attgcataaaatacaattcaatataatnnnnnacaatacgacctaatacggcattccaaacgagccctaaattattattttgcgattaattagcaatattttttaaaggttattacattttttggagcagttttgtctcatgtgactcgcgattagatttttgtagttcatagttttggtaaaacatgctcttcggttagacaatgagctatcctggtttaaaaaggttccaccgtcgattgtaatttactacattgttaatcatgtgtgactctattcaccacgttcaaaaaaattatataagacttgatatttaattgaatcaatagcaatattaaaaaaaaatactaaacatcactatatagtcttttagcattactgttgtttaattgaattgatattgagaagcatgtgtcattatgaatatcaattaatacattttttttattaaaatcaattaacacatcacttgcattatattttaatatttgtgataatgaatgcaagtggtactatgtcaagtgcttttagcattttaaagtgaaaatatgttcttaaagtaaagcaccccatttcattccttttatccaaaaatgaattaattctaaacggaaaattaataataaaataagaattaagaccaagttgatatccaataataatatatattaacaaataaaaaataataatataaagagtgagtgagtgagaaaatgtgagcattacttattactttttctccctattacagattcaatttttatttggtttggttagattctgttttattttgcttaaaaagaatagataaagggttaaagggcatgcataaggccataataatatgccatgatgttatagcagttgaacatgttcttgcggtgctattaaagataacgacacaggaatggtcactgatacaacccatgtggtcctcttgttttatttttttttttttaaaaaaaaataatgaaaaaaaaagcatctctcatctttattttcttttctttttctatccaactcataatattgtgcaataatttgacctacccattttccatctggggaaaattactcacttgcaatgctatggtacaaccaaacaacctttgcgtaaagttaccttttgttccctaaaaaatctcttgttttttcaagctcatggaccccaaaaatgggcttattttatcatcactttggagagttattagagagcacaccgcaccacaatctaattttagagtgaaagttcttatttttaaatttgatcctcaattgagattatacccaatacaaaagtgattgcctcctagctgtgtacatcgaataaatatgctattttttttatttaatgaaaaaaaagaaaaagaaaaaaaagactgatgggggcatctatccagctcattcaattgggtccccaacccaactactcaagtacattactattctaattgctttagattctgcttcttcttcttcttcttctctttgtctcaatttttgcacaagaagaagtagaagacaatggtggattggatgaagatggcataatttctcagcttcttcaactcgttcatagctccaagtgtgcctgcaaaagtctgttcttattccaactttgttttctttcttttttatttttggttaagaagcttttatgctctgattaaaaaaaggttgatgaaacagaat

SEQ ID NO: 29295 - DNA, 1841 bp, Cannabis sativa
atatatataataagaggttgataatattggttgttattcagcctattctctcttttgttaagcccttttcataacttaatagttagcatgtttggacgcattaaaattaagaatggtgctatagagagggttatataattcaaaatatcattcatgttgttgagaataattagggatatatcctttcttagatcttggggatataatatatcaaacgattatatgatcatgattgtttgggcttttaaaaattatttttggctactaaagctctaaaattacatctttatttattggttggttgggtaattaataaatttcggtttttagctctaaaaaattcttttaacaataactagttttagtagcttgcttagagaacttaccaagaagctcaatcaaacagatcatgtatcattttgtcaaattaattttgattacacatttttaatatttacgggattaaataagttgactcatactttgtcataaataagtctacgagatgatttcaatagcttattttacgatgaagaaaaaataattgtttgctaaattgataagggctattaatttgataaagtaattagagttgaaaaaacgaaagtagtaatattgtagggccccaagtttaccggagctcttatgttgtccgttgtggacatagctgctcgaatttatttttggacatttttccaaataatctcatactaatcgtgtaggtaaatactataaattcaagataattcttgtacattcttctaatatggtatttaaataaataaaaatcccaattaatgatttcatatcttattaaaaaaaaaaaatccagaataactcaataatttattttcataattaactatgttaagacaagtcattttattttattattaatttatttatgaatccttaaaaaaatcccaaattaagattatttagatccatccaaaaaaatcatcaccactccaacgttaacggatgaaaatcaacaatcataaaaaaatgtaatcctacagaaatataaaacctataaaaataaggtgacaaaaagataaaactgtatctatctatatatcaatctccttataaagttaaacagcattaatttcattattaaatattgattaattatggcgttatcaacaatttcaattttttttttccttctcaatattttcttcttcatttgaccaaaataaccctcaacttttagtcttaaagttacactctctagtctctcccaaggtcattttagtcaaaataacaactactactgaattggtctgaatgcaaatatggacacaatcaaagtcaaaaaaaatccatgattggatattacattcatgctattcacaccaccctcaaaattaaaaaaatctcattaaataccaaatatcaagtgaatataaatatacatacaaaaccagagaagaacccaagtcttagatatggagaattggtgggttaaattgtgtttagtgtctttgcttattatgtttccagcccttattcatggttggggaaatgatggtcattatacagtttgccggattgctcaggtaactagtaactagtaactagtaactctttctcattttcttttttttttcatttcaatgtaataattaatttaaaagaaaaagaaaataatgaacagggtcggttgagcaaagaagctgaaaatggtgtgaaggaattggtatcaggaagtggagagagtgaattgggttggttatgtacatgggcagatcatgttaagtttaggtatcattggtcttctgctcttcattttattgacactcctgactctctttgttcatacgattacaacagtaagt

SEQ ID NO: 29296 - DNA, 2139 bp, Cannabis sativa
aacataaataacttctaatcttctattgataacaaatcaaattgtattgaaatgagttttatttagggtataaaatcccaacactaagaaagttacgtctaaaagatattgagtagtataattgtttgtaatagcaaaattgtattgtacatattagaccattatagccttcattgaaggtgcctataatttgtaattgatgttggagcaataaatagaactgccaaaaataaatagaccaccaaaactaccttaaatatgtacaaatatagtaaaagtaattctacttgcattttatatctaaaacaatttttttatacatattaatattgatggtgcaattcatctcggaagatcttttcctcttgatcaacttcatcatgtgaagtgtcccattcattgtggctttagcagtcaaagtcaaatatctagattccatgtcatcaacataaatagaatttgttgcccccatttcagctaagaaactaatcttcttggttgaccgagctttgacttttcctttctcgaccaaggcatcgccattaactagggcaacatgagttcccctgttgaaaaagctaactgaggtcctttcgaaatcgaaatcgccaaagttggaactctttatgctaatttcagctttgaatttcatatcaatggtgttgtttaagctattcatactgagctcatcaataatgattgatcgaatccgaaactttggactgttgatatgaaatattgctactgaaaacaccaaaatcgccacagttaggataaatacgattactgccaccaaatacaattgtctcatgtttttcttgtattccaactccttagaataatcacgatcggactctatcgaagttgtgtcttcatcaaattcatcatcatcatcttgggaatgaacttgttgatttttggcagccatatttgcatgcatggatatggatttaactataacactctttgattttgagtatagaattagtataaagtactctatatggcgtttatatagagagaagatttcacgtaaagaaaaagtattaaggtttaattatcacagtagagatggcccgttactatttataggctaattaatggaacgcgcattataatatttataaatataatattaagccaaatttgagatggaaagtaaaatattaattactagattgtgcaagtgcatgcataagggggtttcaaccaacgactagtcaagtgtatatcttcaatgagcattaggtaattgtacgtgtagatttagtcaaatgaaaatcatatgtataatacaatcattatatttaatgtagctgaaaagtaatggaagcttgacctagtaatttctcatgtaaaaaaaaaaaagaagatcatatttgaggaacacgtaaatgaatttattgtaataatactcattgtaataaccttcaaaaatatttttaattatgttataacaaataatcactacaaaaactattacttttagtgataactttttaatcgtaacatatattttttgtgactaaatataacttttagtcacaacacaaacttagttgtgactaaaacataatatatagttacaagttgtcactaatttagttttagtcacaacaagtgttgtgattaaaaatacatttagttacaacaaattgtaatttttgtgactaatacctttaatcaaaatttttgttgtggctaaaagtaaatttttttgaagtgatcattaatcgatattcatataaaaataatttaaatttataaaaaaatatgtttatttataatataaatagtaatttaaagtaatttatctcgatcggtaataataaaattgctactagagaaatgaatacattatatttgttcggttaggctgaataatagaacaaatttttttaaaaaagttatttttactcgttgaatttttttatttacaacaataattttcagtaaaaaaaaaaaataaactgttttttttttttagttattttatagtttatttatatgtattatagttatcaattgttatgattgattttattttactagttattttttattgttttatagttaatttatagttatcgtgacttcgtgaggttgatttctatttattctttagtttttttttttttt

SEQ ID NO: 29297 - DNA, 4768 bp, Cannabis sativa
aaatagataagaggtcggttgaaatacccaaactataaacttactcatcaaatttattagagcattgttgtgggacaccaaggtgtcgtagcagcaccactataaggtgatatcctataattagttagcgatttgttataatgtttattaaatgagtattattattggacaccaacagtacctttctatataagttgcatctcacgattaattaacgatatttcttaaaaattattttttaaattacattgactcaatacttaactagcattataataccatatgattaatagcttttagcaaataaaaaacaaaataggtatatcatttctcaattaattaatgtataaaggataagaaagtaagtaaataaagaaataaatatagtaagtaacaacatccaaaccgaattgtgatgtcaacccatagccatagttatactcacgtactctatccactcccatggctacccatctctagttctacgcaaacacctccaaaacgagctcgtatactaaaccactccaccgctactaaacccataattcactcaccctcttcctcttcccaaccatggatcgagtcactgagatttcaggtccgttccaatcttttccgggaagccatttcgacttacattcacatcacaagcactggcactcctccggacaatttcgctttccccgcaattctaaaggctgctacggctcttcacgacttggatttggggaagcagattcattcccacgtagtgaaattcggctaccaatcgtcttcggtcgccgtggctaatacccttgtcaacgtgtatggaaaatgcggtgatattgacgatgcatgtaaggtgtttgagagaattactgaaagagaccaagtttcttggaactcgatgattgcggctttctgtcgttttcaagagtgggaacttgctttggaggcgtttcggtctatgctaagggaagaaaacgtggtgcctagctcttttactctggtgagcgtggcacatgcttgttcgaatttggacaagcatcgtggtttgtggcttggtaagcaagttcatggatatagtcttaggaatggagataggaagacttttacaatcaatgctttgattgctatgtatgctaagcttagacgagttgatgattccatagctttatttcagttatttgaggaccgtgatttggtttcgtggaacaccatgataagttctttatcacaaaatgaccggtttgtagaagccttagtgttcttgcacaagatggttcttgcaggatttaaactagatggtgtcacgattgcaagtgttcttcctgcctgctctcatcttgagatgctagacttggggaaggaaattcatgcttatgcaatgcgcaatgataatttggtaagaaattcttatgtgggaagtgctttagttgacatgtactgcaattgtagattagtagagagtggtcgacgagttttcgattctatcttggagcgaaggattgctctctggaatgctatgattactggttatgcacaaaatgagcatgatgaggaggcattgagcttgtttcttgaaatgtatgctgtttctgggatctctcccaatgctaccactatgtcaagtattgttcctgcttgtgttcgctatgaagatttctctgataaagaaagtatccatggctatgtagtaaaaatgggttttgcaagtgaccgttatgtgcaaaacgcgttaatggacatgtactccaggatggggaagatagaaatatctaagaaaatatttgaaagcatgaaagaaagagatatagtatcttggaacactatgattactggttatgttatttgtggataccatgatgaagcacttaatttgctacatgagatgcaactgggctctggtgaactgaaagatgagaaaggaattcgtctcaaaccgaattcagtaacgctcatgacaatccttcctggttgtgctgcattgtcagcacttgctaagggtaaagaaattcatgcttatgctattagacatttgttagcatctgatgtggcagttggtagtgcactagttgatatgtatgcaaaatgtggttccttgaatgtagctagtgctgtatttaatgaaatgcccattcgaaatgtgatcacatggaatgtactcattatggcctatggaatgcatgggagagctaaagaagccttggaactatttgacaacatgatggttgaaagagtcaataataaagaagtgaggcctagtgaagttacatttatagcagtttttgcagcatgtagtcactctgggatggtttctgaaggattgaaattgttccatagaatgaaagaggactacggggtcgagcctataccagatcattatgcgtgtgttgtagatttgcttggccgagctggtaaggtggaggaggcatttcaactcatcaacacaatgccttctaactttgacaaagcaggtgcttggagtagccttcttggtgcttgtcgaattcatcagaatgtagagatcggggagattgcagctgagaatctcttgcagttggagcccaatgtagctagccactatgttcttctctctaacatctacgcatctgctgggctttgggacaaggcaatgaatattcggagaatgatgaaggaaatgggggtaaaaaaagaacctggctgtagctggatcgaattcggtgacaaagtgcataagtttttggctggagatggatcccatccacaaagtgagcaactccatgaatttcttgagaccctttctgttaggatgaaaaaggaaggatatgtgcctgatacttcttgtgtgcttcatgatgttgaagaagaagcaaaagaaactttgctttgtgggcacagtgagaaactagcgatagctttcgggattctgaatactcctcctggaactaccattagagttaccaagaaccttagagtttgtaatgactgccatgctgcaagtaaggtcatctctaagatagttaacagggaaatcattttaagggatgtaaggagattccatcatttcaagaatggaacttgttcttgtggggattattggtaaatattatataaaggtgggaagaggtgattgataacctcatttttttctaacgattttgcttagcttgctttgtcattcttggatttgttgtttatggttgtacaactaaattgaaaagagaaaaaagaaaataggactatatcaaaaaaaaaagatcacaatctaaagcagtaatattctcctaaatttcttttatattaagttcctgaataaaactataacgttataaaaaaaaaaaaaaaggattgatttgtataaagcctcattatattatatctctatataatatgaattaaagtctacatatagatcatgtacaaatgattacttttcccttacatatatatatatatttatatataaatgtgtgaataggctagctacacttttcagaactaacacttaatagctggctgttttctccagtttcaattcttaatagctggctattgtcttcagtttcaatgtacaaagagctagaactatcactacaagggccataagttgacatgcttagggaagggcttgggttctgccagaaatgattcccagagcttctttgcttggagttcgtggaagaaaacccgggatcagacagtagctcttgcaccgctgttcggccttcaagaatgcttaccacttgtgacattgttggtcgaagagttggggaggcattggtgcacaagagagcaacattaagcattagaattgcttcctctgatgagaattctgatcccaaagatggatcaaccatttccaatagattccctctctcttgcaacacataggcctaacatgaaaaaagaaaacattggttatgtcaatgtcatgatgagcatacttcatcaacaatacttaattgaatttgtgaaacaatttgctgattattacccagtcaagaaggtaaacgaagtcatctggtcggtagttcgaattgctctttccactgactatctccaatgccacaactccgaagctataaacatcagctttgtcggtcaagtagcctcgcattgcatactctggagccatataaccgctgcaggatcaacagtcgaaaaagaggttttagtatgattaaatataaactaattttgcacagttggttctttttatgtagagaaaaacatacatagtcccagcaatccgagtgctgatgtgggtgttgtcatcttcattgagctttgccaagccgaaatcagaaattttagcattgaaatccttgtcgagtaacacattgcttgtcttgatgtccctatgcacaatttttattgtagattcttcatggagatataccaaacctctagcaatacccatgcaaattttcttcctggtagaccagtctaatttcaatctatgagatgggtccttccctgcatatgattagaaaaagttcatcattaaactttctattataaattgtttctatttaaacagcaatacagctaaagaacttaccgaaaagtgctcgggatagacaattgttttccatatactcataaatcagcatcagctggtttccttcaacacagcagccatgtagcttcacaagattttgatgttgcagggcggaaatcatccctatctcattcacaaattcgcgatttccttgctttgattttgatgagagctgctttactgcaattatggtgccatctgataattcaccctgcattgaaaaaatagagttcacattga

SEQ ID NO: 29298 - DNA, 1267 bp, Cannabis sativa
  modified_base (1086)..(1093): a, c, t, g, unknown or other
ccatccaccatccgatccgatccaattagatattcaaaaataacatccattctgatccgattacaattggatattcaatatttggaagtcggttgttattgaatttgatgatttatgcacacccctagtttaatatacacatattataaattattaattaaatttaatttaattaaaaaaataaaaaagaaaagagaaaaaatatttatggatagagaatttagttattaattatatattattaattcttttgaaatttttattagatttagttagagatatttgttcagttagtacgatttttaaatatttttatataaattgatttattattattacttagaaagataactttagttatataatatatgtatacagggtttatctagtgtacgcctatgtgtttttacctcatcacatggagaagttttttaggccaatgaaaatgaaatgagtgaatggtacatgttatagtagtatatctatatacatgtgattattttcagtttttttttttcttgagtgaagtgatttttttttagttcaaataaaaaaaaaattacaatttattttactgggtcccagacgtgaattgggggctggctattatatggggtttgattgttgttgttgtggtttgttatttaaaaaaataatatattttttaataagaagatgtgatttacaataaaatatttttaaataaaaatattaatacataaattttataaatattaaagcatattaatttgaaagataattatgacaaaattaattgtctagttttatttgttacgattaactatttatgtaaataaattagtgaggaaggtacttaaatgatcaattttgttgtagtttactactagtataagaaaattaaaaaaaagttcctaagtaaatatttttttggagcttttttattttcacacttcaaaacagtttttttcttatatttttacgaaattctacatagaaattcttattgaaactaccggagcaacctaaatcgtaacaaaaaaatcgtataacaacccatatagaaactaccgaagaaattactttaaaaactcaaaccgtaaattnnnnnnnnaaaattaaaaaaatagtatatagagtaattccccatattttttttacaattaaatacctatataaaaataatttaaattaattttgaaaaagaataaaatttattttaattaaaaattaataaatgcctaatactatgactatttgtaaatttaaaaaatatttgtatatataa

SEQ ID NO: 29299 - DNA, 5402 bp, Cannabis sativa
  modified_base (4939)..(4942): a, c, t, g, unknown or other
cttggagtttcaaaaagcaaaagacaatatctcgatccaatactgaacttgagtattgaattcttgcaaatgccactgttaaacttgtttggcttcaatcttcactgtttgaagctggtttatcaaagcttccaatccctactatctggtgtgataatcaattcactgtccttttgcatgtctacaaatacaatgttacactccaaaaaaaaaagaaagcacattaaactagacttttactttgtcaaaagaaaatgattttgaacagccaactctatgtaaaacacacgccaacttaagacgaagttgcttaacatccttaccaaggctttatctacacctagatttgttttgttgagagacaaactgagtctggtatctttatcttagttcagttcgtggggatattagatacggttgttaggtagtcataattaattatttattttctgttatctaactcattaactaacctgttcaacttgtatttatagagcacttttgctcaaattcatcaatcattaaaattcatttcaattactttttcttttctcttcgttcttattctcaaaagtttatagtattggaaaaattgaaaatttttaaacatgtattgtaaattgaaatatcaaaaatttattgtgaatattaatactattccaaaaaaaaataaaaaatttataaatttaatagtataactataaaaaatattcctataaaaaaataagttaataaaaaatgtgtttcaatataagtttttggacacacaaattatgaaagatattgtaatgagtaaaaagaattaccctatatactgttgtttttatttttttatttttttaaatttacagtttggatttttaaagtgattttttcgaaagtttactgtaggttgttatacgattttttgttgcgatttagattaaaataagaatttctatgtaaaaattcgtaaaaatgcaaaatatatatattttttaaagtataaaaataaaaaagtctttttttttattggacaattagctaattttatcttcccactctcattgacacatgggtttagtccttatttcaaatgtaaacaggtaccccaatttacatttgttctgatttgttcactgattataaaaacgcaagtatttctactggccacatgatatacaaacaatttagattaaattatcatttcctgatatatatttgatgaattatttgggaaaataataaagaaaaatactaataggggacaaagtcatttgtaagaaccagcacaaggtaaaataaccttcaaagtaagtgtatttatttataaataatgattcacacattcttaggttacacagtaatgtgtaattatttgaagctacatatataattttatttttgaaagatgcaagtaaaatattaaatagttcatgatatcacatttaaatagtttgtgacattgcttttttatatttatttatttcattttgaagaaatcaataatagacctttcatttttttccttttttttattgtactatgattaaaacaggtgtacaaacggctagctccacccgtatccacaaaatctcattttataatagaaacccaatccgatccgttgacatgttaatatacaaataaaatttactaaaatatgaaaataattttacacatttggtatgtatagagacctaatataatatagtttatgtttcaaaaaaaaatataatatagtttaaataaagattattagaaaattatacaatgcacccttggtacacgggtgtatatccatatattcttataattattgtgatatttggaagaatttttcagtccattttttttatagttatgtacggttgtagttttttaagccatctagaaaaattttgaaaaaatttaaaaaaatttaacacgttaaaaatagggttcgaagagtctattgcacgcctgactcttttattttatacgcgtgtgaaataaactttttaaatacaatttttatattataaattatactaaatttctcaaaattttatagaatatcataaataaatataacgtacacgactataaaaaaaattagattaaaattttttcctagatactaaaacaaataaaaagtgcattgtcctattcaaaaaaaaagtgcatttttttttcaggggtgcattatagaatcacctaaaaaattgactttataaataataaaatttgtaattatatgctaaggtacaccttaagatattaagcatgtaatatattattattaatggattttaatattaaatcttatttaattttatttaataaataatataaaaaaaattactaattaattataaaatatcacatattaaacatcttaaaatatcaaataatgatactcaccataaatctcaactaaaaaaccatcatgatatgatatgatatgatatagactagtatataatagtatgatatgatatatgtaaattatatgcatattcgtttaacttatatagataatattaataaaaattaattaagatatgtacatgtttaaataattgaaagatatattcttttcaaaataaataaataattaaaagatatgcatgtggttatattagtaatatataaagatgatttaaaaaaatatttcctgcatagagacctaaagaatatagtttaaagtttatacatgtgtataatacattaattattaacttagaaatgacaaaagttgtcaccaatcaataaatgtcaactaaaaataaaaaacacgtgtgggattaaaataaaaacatcatgcatttctattaattaataaggatataatcacgagtcgagatgcttctgcaataaccccgaagcgagtcgagagtatcgagagtcaagaagcttctaagataacgacgagtcgtcttccgttcgtttcatgtcggttggcgtcatcaatcaacaatggccaccgcctgagattggttctgcgatagcttctgaaactcttgtcttttgtgacatggtgtgattgttttctggactgagattggttcttgtttattggtttgagattgttatagtttttgccattgttttctggcataagagtctaagttttctggtttgagattgtttatggttttctggtttgagagtctaagttttctagtttgagattgagttgggtttgctggttttagtttcttgtttttcgtttgttttgggatggcttctagcagtaatcagaggatgaatgaagatgatatggctgatgttatcattgaggaagaggatgcggtcatattatcctatgatgcgagtgtcactaatggtaataattatgatgatcgatggtgtattgttggtagattcttgactgagagatccatagattttgacgcaatgcaacatatgatggcttctctttggaaaaaatggccattttgcaaaataatacccaaaaagtaaaactgccaaaatgataacacacatagaggacgccactggggcatcactctctgataacgatattgagtcagtcttttcaatcgaagacgaatcttatgatgattaataatttcttggaatctccttttctcttgctcttcaatgtgtttctctaacctaaaagtcatctaaaattgaagctataagtaactatttatagttccttgaaaatgacatttaaaatttcaatcaattaaaaatcttcgtaacaggcgcaatagtgcctaccatcaagcgtcgtagcgtctaatgaagtgttttctaactctcccacaagtttgtctgcccttcgtctattgctttgatctagcattatggcacctcaagaaaagcttcttgaaatagcttgattcgtgacctcatttacttctcggttatggaactttgcttcattagcattgtcatgcttcatatttaatataaaatcatcattaaagctcaaatttacacaactacataaaacacattacttctataaaaaatttaagaaaaatacaataattcataaagttaataatcaagaataaatgtagaaatctcaaagttggaatgcaagataataagtttctaatgaaaacactcaaaagaacattccattaagagtaaaaatagggtggagaccaaatcaacttcgctttaaatgttacaataataaccttagataggtaacttagtaaagactcacactaagcgcctgagcttcatagagaagctcaaaagcacgtattagtcttttacttttctacagtacgatacgatacaaaaaatatggacttaagcacaacacaacacgataagcccgaaaatatgacacttaagcatgatttgatttgttcgaaagcatacacgatacaataaacaaaatttgataatttgatcataataatattaacaattataaatatttatttattaattaaaataataataatattaaaattctaattattattattatttattatatgattgtgtgtaagtactattgttgaaaaagaatttaaaagtaattaaaactataaatatacacatgtattttagtaattaactcatcaattttaataaaaatataaaggacggatatgagcctatataagaaaatagattggtctatttaaagcatgaaatgaattcgagcacaatatgcttgcagggcatgtcgagcctatacactacaaaaagaccatctttagtgacaactttttagttacaacaaaaaatatttgttattaaatgtgacttttaatcagaacaaaaaagttacttgtgactaaacatagtatttcgttacaagttgtcactaatttagttttagtcacaacaagtaacttaaaacacatttagtcactacaaattgtgatttttgtgactaatacttttagccacatgatttttagtcacaacgtaatttataattagtcataattttttcttttaatcacaagttttgttgtgnnnnaaagtaagattttttgtagtactatcctataaaactatatcacggtatggcacaacttatatttttttcatggcatgacccatttatagctcgttacggcacaacccgtattttaaaaagcccaaaaaaaaaatcagttgagctagtactgtacaacatacgtatttacacccgtattttaagtatcttttataagtaaaaagaaaactacgcccacacttactcatgaatccgctattgtttatgcaaccaatattctaaaaatttacttatcgggttataaattttggaaagaaagtaagagcatcttcaatggagatgtaaataagtggtggaaagttaaaatatagttcatttaacaaaaagtgtgctccaatagtgtgccagtgatgtaaatttgacacataaacaaattttgtgccaaatttggcacatttgctatgatgtaaaatttatacca

SEQ ID NO: 29300 - DNA, 1921 bp, Cannabis sativa
  modified_base (617)..(621): a, c, t, g, unknown or other
  modified_base (1247)..(1248): a, c, t, g, unknown or other
tttaaattttatttcattccattcttattcttattctcattctcattcctattcctatatttttattcttcccaaccaaacgccacctacagttacataagaaacgtgggtgtggccatgcattgacctctatttacgatgttaaaatcataaagaaagtagaaactccaatcgatgactccgacaacaatcgagaacagcagttgaaactcaaagacttaaattataatcgaatcataatcaggatcgattctctatccaaaggactcgatttctacgccaacttgagcgaaatctaattataattaatatttagaagaatggaatgtggattagtaggtgggatgcgattctctagcttatcattcgcttttatggttaacataataaatatctattgttattaacattatttatttaaagatattaatgaaaacgaactgattaattcaagtagacaatgaaatgatattaatgatttacactaacaactctattaatctctgttaaagttaacacccaaaatattaaaatattattaaaccaataattatcgttataatcgaattataatcaggatcgattctctatgcaaaggactcgatttctacgccaannnnntctaattataattaatatttagaaaaattgatctagattttgcatgtgggatgcgattctctaacttatcgtttatttttatagttaaaataacaaatatttactgttattaatattatttatttaaaaatattaatgaaaattaattgattaattcaagtaaacagtaaaataatattaatacactaacaattttgttaatctctgttaaagttaacacctaaaatattaagacatcgttaaattaaaaattattgttaaatagcaacttttaatatataaaaatatatttgaatgatgttaagaatgtgtggtaatgttgagatgaaatacataaaaagtaaatttagtaaagtattttaaaatgaagaaaaaaacatactaaaaactcttaaaaaatacttactctaaatttcccaaagtaatatatccacttcacaatgtctttacgtggagtaaggagatatattacagctttgatatatatagagtaatttacagcgtaaatattcaagtttaatttttgacggtaattatacacatgctatatttatagaactttcgtaagtacttgatcattaagtgtcgagtcattatccacgtgttattttttattggtatatttnnattaatttttaaataaaaaataagtaacctggacagggactaccattgtaatatcccgataaacctaatggtaattagggttgatatatattgggctaatcaagtaaaagtgggattctgatcctactaatctacttcaacataaattttaatttttttataagtggataaataagcataatttattaattacggagatttatataacatgtgtgaatatatataatacgagttattggtggaataaaaatattttcaggcttgacgatcttgggaactcgatcgggggccaaaaatatcataacagtttaattagtgacgttgatgggaatattatgataagttaatagtgtaagtatcagggtcattaaaagtacttgagatttgacctagtgccctagagatagagattttttaatggttaaaaaatgataagataactattatttatagaatttttattaatattaataatattattattctataaaaactgataaattatgacttatcagtttatatatatatatatatatatattaagttttaaaaataataacatataaacgtaacgaacgaaattctctcttctgtgcgacgaaatcttttttcttcttaatttattttctttgattttcaacccaaaacctagtgattcaagcacctgtagtag

SEQ ID NO: 29301 - DNA, 2633 bp, Cannabis sativa
  modified_base (2606)..(2607): a, c, t, g, unknown or other
tataaatataagtctacaaatctgttaaagtaaataataaatcaagtactcagtatcaactcatcaatttgcaatgcaaaacacataatagagagaatggaataaactactaaagtcatgaattggtggcatccacgtcatcatgcctcatcttttaatcgtttactccactaaaggggtccttaaaaacttaaaagaagccaatgccatatttcctctacattcttcttcgttgcttatatcacctattgcctttgccaccacaaattataaaatatgttatttttaaaaatattagtgtattagattagtagacgcatgacgtcatattccactttaaatatctctccctcgattgatatgatatataatatatgaatatgtggtcctcaaatttgtgtgaattatataatatggggataattatagtggcaaaacttttaaaatttataacttaaaacaaaaataaaataaaattttcattttaaaaatcaagagaatttttacaaaattattaaaaaataagtaatttacataattatagacataaaatttattgcaaacaatgttaaaaattcataaacaaaaaccaaattcattcaataagcttaagacttcgatcttatttagcaatagtaagagtgaaagtatgaagagaggcattaagcaatgtcttagactcaacattgcttctcgcaaaattaattacctagggtttcccttgttcagatctcgtctgaaggatacagatttcaacttcattgtagaaaatcttctcccgaaacttcatggatggaatatgaagtctctttccaaagtaagatgggcaactttgatcaaatcggttggccttactttgcccatttagaccatgcagactatgaagttgtcaaagaaacttgcctctaaaattgatggtatggtgaggaatttttagtggggatgtgaacagagcaatcatggaatttattttaaggcttgggatcatctctctctgcccaaatctcggggtggccttggctttagaaatacttttgaaatgaatcaagccttgttggcttaatggggttgggctcttcttaatgaggaccaaacactgtgttgtaaagtgcttagggccaagtatttgagaaataaaccatttttgcagtgttccttcaagaactcggactcttggttctagaagaacatggtgagaataaaagccatccttgttaaaggtgcttgcaagcttattgttgatggtcaaaggacacatatttggaactagttgtgggttatcaaatgtcaagacttctaccctaagcctaactcttgtaggattgatggtgtggaaaaagtagcagacctcttggagagtggggattagaacattcctaggcttcactccctgtttgacccccaaacgactaggaacattttgaaaggcaggaagcccagtggttagggttctgatagatgggtgtggacaaaagaactaaggggtctgttctattctaaatccgcctatttggttcaaaatttggatcgtgctcctcttggcaatgttaccccaactttatggaacaatctttagaactaaaaagtcctggagtggcataagattctttggtggatcattctctctaatgctcagtctgttcatgccctcattgcaaaaaggatacatattgacgtggtcacttgcacaatttatggagagaatgaggaatccatggagcatttacttttcaagcttaagcattttggcgacacacatcctataagaatggtggtccttaattgtccagatactttaactcacaataacaaatccttccaaggggcccaataatcagctctctttgcatgtattttaccctattagtgggctttttacaaaaaccctaggtgggtcataggcatgtccatacaagccttatagcctacaaatacctttctatttccatatgaagaggggattacgaaactagatagatgaaaatcaactaaaattactctaagctttcttattcttcaagagaaaccaagagtgcagagttaaggtttcttacataaacactataaaaacatcaaatacgcctttaatggctaatagactaactcgtggactaaggcttgttaacttgtggactaactcatttattattgcattttactatctcttaagctcttattatattagtctctaaaattctcaaaaacacccacatatcaacatgtacatattccaatggtctttaagactcatgtactacagtcgcaaatttcagcctatggtgcttccccaatatgcatgcttcatataatgggagtgaacttgatttgaattttcataacaaacgttgtttgttcacttccttgattccttgctcacacatgtgtctgattctcttatgccaaacctccatttctaatttttggtgtctcattgtgacaacttttaagaacaaaacggtctacgttgcaggatgtacaatccattcctctttccacctttcatcattgtaagtgatccttttgagatcttcatgtgagcatttgtagatttataactaaagcctgttggaaatttattttacagggatcttagatctactcacaannatgtttattaacaccctaaatataaa

SEQ ID NO: 29302 - DNA, 2707 bp, Cannabis sativa
ttttccaattcacccccctcttggaaatatatattgggctaacaaaggaggccttgatgtcgtcatggaagatgtaaaccctctctgttcagagcacgcccaaccgagcaatgttaggaaaggggatacagttgaagatgacaatcgagagtgtaacttttataagcatcataaagaaggtgaagaaatccatgatgctaaagatgaagaggaggatgatgatggatatgtcaaggagttattatgagcaagacccataagtagttcgagtgtccaaagagctacatgagacctaggtacagttagtctgtcaagagagattttctcaaaagatcgagaggatgatggcctacctccaagtaaagctcggagatctggaagaggattctaaagaggaatcctcagtggaacttgttcacagaaacaacggggaaaaccctaccaatgttgaacctcagctcctgtgaaggacaacaggaagacgaaggtaggcaatcctcaaaactcaatgactcctatacctcctataaaaagcatgaatccaaccaacagacctatgtaggcgtagaagggcactaatgcctccgaacttggatgcccttttactttgaaatgtcctattatgcaaaaaaggactcatgcgaaagtacccaagcccacaggaaggaaaaactgcccaagtgattccattaaccaggagagtgggaccagggaacaatattcttatgtcaatttttgcaccttggaccttcgaaggcatctcgagtctaagtaccaaaacgctaaaggagaaaagccaaggccacgtggaaatgaccttggaaaccatttgaacgataaggttcgcagacgtgaccttccaaattgtgacacaaacaagttggaggagcagatcactgccttaaccaaactcgtactaaaatagagtggggccctctcagatttagaagatgaggatctaaaagcgtgtgttaggcgaatcgcagaagctccactactgaggaactttaagatgccccaaatttagttgtaggatggccgtacaaactgaagaactcacctgtcaaagtataacaagatgatgaggtggcaagaataagtgatgatgctaagttcttgtgcttctcactaacacttacaaaatccataggggattggtggaagaggttggctcccagatctattcatagatggaaagatttataataatcctaaagaacttcattcagcgaatgatggaggcatcaacaaagacaaaggtgagcgctgacatgaaacttgtagccctacaatcgggacttaggttggctccctactatggggtaagatgtagagaaagagggctgagaccttgtccaagtttctgtccagagcacaaggtatcatcaacctggaagatgcatatttgtaagcttttggaatccctctagctctggtaccttctactaccttacaaagctttgtcccgtaagttctagtccttggaacataatatactctggttgtctatggaccttctatgtctaggaaggcacctaccaaaactcattttctgggtatggagcgacacaaactggatgcaacattgctcctagacaattgagcccacaagaagaagcttcaaaacagaaggtgagccattcccagagcaataggagcaggaggaaccaaagttgaagtgaaacttcaaagaaacctagttaagagtttaaatcaaagttcaccgattacactagcttaggggtactcaggaaaatgtatacaaagtaacgtgcaatatgtccactatcggatgcctcaggagggaaaacatatgagatatcaaaataaatggtgcaaatatcaccggaagttagggcacaccactaatcagtgtcactacttaaaggatgaaattgagactctgatcaaagctggacacctaggctagtggatctggatctcaattatctatcttggacaaggggttactcaaggatggttgctcgttcaaggacaatagtgagctattaattctacctaaggagtaagccgacctcaagctcttagatcataacttctcaccctaccttctttgctacctcagactatgatgatagtgctagctctaagactagagaatccatatcctctgggtctagctccacatcctattatttgtcatgtggccacaatcttagcaggcccccatattacaggaagcatgagaaattctcaaaagagatgtctgaaggaattagacagtgaaggggagatgtgcgccttagtacagtcaccaatgcaatgtctgtgaacatgaacttgcccattactttcacagaagacgatgccaggcacgttcatttcccccacaatgatccttttgtcataaaagcccaaattgcaaacaaaagggtttttcaggtcttggaagacaatgggagctcagtgaatatattgttcaaatttacatttcaagaaacagggttaacagaagctaatttgtcaccttatgccatctagctgcaaggattcaatggagacgtgcttatcccgatgggaaagatccaactcccagtcacactaaaaagggagaataatacatgcaccttcaagcatgcaccttcattgtaatgccctaatgctaaggcacgctacagtgatttttcaattacagtgctatctttgctaatcaaagaacttactcaaaaatcgtgtcaaattaaaa

SEQ ID NO: 29303 - DNA, 2905 bp, Cannabis sativa
tttttatacacaaaataaataattaaatatatacttttttttatattaacccgtgactttttttatgtctcttttagcaaaattttagaccaatgtcgacccacacttttttattaatctttcatctaagtacagctagcaatcacatgtaatatagtggctaaattttgtctactaagaaatttattttataaatattcgaattaatagttgggttgatcggatattaatgtattttataaatattcggattaatagctgggttaatgggatattaatgtaatttataaatatttggattaatagttgtgttgatcaaatattaatgtattttataaatacttggattaatagttagtttgattggacatttgttaattgttatgtgataatttacttattccaattaaatttagaatatttttaataaaattatgattttgtccatgttaagtattataaatattttttgaatttaaattgaagtttaatatacgttatatatatacttaatttttgatgattaataatcaatttatccaacaattagtgtctaacaattttattattactcttgatgaccatgtttaggttttttttttttttttttggtatttttataaataagaattacatcttttttttttaataaatcatgaaattttctaaatgacgataaattaaaataatatcatgcaattcaaaaccagaattataattaaaaaaaacaaacttaataataaaatcagatgaaaaaaattacatcattataaatattaactttaagaacacctatatgtttcatttaccgctcagaaaacacaacaatagaaattattataacaggttcattcattcaacctcataatttgagcactcaactattgtgtaaattacgtaattgcgctactaacaacatttatatccttaatttactaaaaaaaattaaagatggataagatattttactcattctcaatattactattcaagttttaaataaattaaccaaacatcataatacaattactattatttaattacaataaaccaaacaccatattattattattattattatgtgtggaagggaaaagaaaccttaccatccaagattttcaaaaacagtacaacaagatcttgtttggcatataattttgatgtagacaattaactcactttaaagtgacatctaatttctttttatgaagaaaattgttttttcattattattttattttatttatttttgcatatgagtagacaaattggattaccattccaattaaaaataactcaattttcagttaatcacggctttaataacagtacaaattattctactccatccatgtgtctctctctctacatgtcttattttaatatcttcaattattttcattttgtaatttaataatattaacaatcaaacaaataataattgcacccaaaaactagcaaactacatgacaatgacccttaatttcctgcaattaattcaacccaaaagttttcaattaaaataaattagagtgtaaatatttaaatttaatttttcaatttttaataaatatttaaatttatttttttacgataataatatttatgttatatttttagaattttattagataactagttgttaaaaatgtcaagttattttttaagtgtcatttttttattggtatatatttaaattaattaataaataaaaatttaataatttgaaccaatcaaaaactgccacgtggtcattgacttaacacataaatattttgggaagttttagatatataacttaagtattattactaccgtaaaaaattatattagatatttatgtgtaaccgaaattaaacttaaatatttatatcataaattattactaccacgtagtcattgacttgacacatgaatacttaaggaagttttacatatgtaactttaagtattattatcagtaaaaattaaatttaaatatttacatgtaattaaaaattaaatttaaatatttaaataataaattacttaaatattttttttccaaaataataataataataaatttaatttaaggacattttagccgacatatagtcacaacttcacttcacattaattattacaaaccgacgacggtgattgaattaataaatcaataatgtcataatcataattattttatctgttttttttttccatacaatattatgaaaataatatcttaaaaaaaaataaaaactataagaccttgacgattttttttatcttctctagttttattccttttattttttatttttctatatatatgtaatttgattttgattgaaggtgatatgagtgtatttttcttatagatataataaatatatcatattattcccacttgttataaaaaaaaaaaaaaaaaaagtaaaaacattaaaaatcttatggtgtaaaaactcttttatttaatatatgaccttttattattattacgtgttatgtttttgtttagagtcaaatatatggaagggatcgatgagccaacttttctaaccagaaaaatattgccttacttatttaaaactcttattatgatctctataactgtttaaataatgtagatgtagttgagtcaaaacatttatagatgttgcactaaaaaaacagatcttattttataaatttgttaaaaagaatcatattaatgaaatttaagttatatatatttatgtaaactgaacttaattataacatacttgacattattgtagaggagaacataatcttcttgacagaggcatgaacagcaattcttaaattttttaggtctcctttattaagcaactccacagctccatgtcttcttcccatatcatcgaaaatcgaaccagattgtttagctccaaccttatgt

SEQ ID NO: 29304 - DNA, 5128 bp, Cannabis sativa
aataaaggtgccaaaaatgatgtagaaaaaaaataaaataaaatattatattttgaatgatgtgaagatgtagagtattttcaaataatgctaccattggacatgctattatagaattttcaaataacttttattaggggtatattgatatgataaatgataatcattcaaattcctccaccaaaataatgaaaaatgtgcaccaaaatagtgattagaaatgcttaaaaaaaaaagtgattctaacttgtaagtgtaaattgcggtcattttggaaatttgtaagggagtagtgatgaattggataacttactgatgcgagcaacggaactcgattcgacgccggtgcgagttcggatcagactgaaaagggaaggtaaagtcttttactttatttattttgggttcccatcccatatgccttttcatcaaattgagaatagtgtttctatctgacacaccctgattcatacccaatcaccgcacccgagaattcttcattctccactcaaatggccggctaatttttggtgctcctttctgtttaggctctcttatgaatttgtcaatggccgacaacttaggtttctcttataaaaggcatttcatttctgggttttctttaaaaatcaatgctttgtattttattaaattggcaatttaacactgactcaaacaaaagattacttgtttaccttgttgctttatcacttatttcagcacatttgacattgttaccttctgctggctttaagaacacacatcatgaatgaccaacaagctctccatcttttaaatgaattggaacttattctggaatccgatcctttgatgtaagcacaagattcatctacacagaattatatataatgttgtatgataaaattggagtgtttgaggcaatttttagggaatgttttcttgggtttcattggaattcaaagcactctttacttctcaatatgtttttatgtaaatattgttttgcttttttgaaactcagagatgaagtggggtttattcatccatcccaatttgatatgctgaatgaagaagcatgtcatcttctcccatcctcagatgacacgttgagctctaaggtgtcagacattgatgatgcttctaagcatattggtgctgctagtttttggaataaagatcacaagctgggaatctcaacggaggttctttttccactataccagacaaccaaacatgcattcatggctgcaatcaaacaatacaaggcacttgttgacaactcttgtattgaggattcttcaagttactctgcatcttctcatgacaatgtggaaaatgaagttatgaaacttagcagggctcttttgctgttaagctgcgattttggcaccgcatggcattccaggttttacttgttttcattttgggctgttaattgcctttgattcatgaattcagttctggtttgtatggtgccactacaatctttaaatgcttgtatatttttcttgttttaatttgttattgttattattaacataattggagtaccaagaactattgggcctagtttacatttgttatttgttgattgattgtaatcccacttaaaaagcactttaatagtatcagattatggtatacttgctgctattatgatttatgacaattgacaactcatttcattcaggaaactagctgtgtcgaagaaacatcgtctctctatgctgatgtatgaacttcagttgtcagcacttgttctatcatatgcacctaagtgtgaacatgcttggagtcacaggtatgccattattgtcagtatcagtaccatagaattgatgttggctagagaaactaataattgtaggattttttttccttctttcgtttcagacttctagtatttggtgttattgggtctacttgttttgcttgaattattttataccgggagctagtttaggccttttttgtccctgttcttttttctcttctaattggacccctatgtacagattctgattctcagaggtcaattttgttatgtagccatttctcttgcaatggctttgaatagaaatcttactacatatcaatcataataggcggtgggtgatcaaatcaattgctggaagatgttcaactctacaaaatattttggaaaaagaatctgagctggttgagaaaatagctgaggtttaattcaattcataaactgcttacttttagaatttaaaggttcacataaacatttataaggaagtgtagaatagcatatgggatcattttgtttgtctctttgtctaaacttcgtactcttctattttacatcgcctattttgcactctgtaacatgcacatttaaattgaattaaccgctgtgttgcataagtttaaaatattatatggaatcattttgtttatcactttgtctaaacttcgtacccttctattttacattgcctattttgcgctgagttaacagccacatttaaattgaactaaccactatgttgcataaaatgtgtaatgctatagtctgcctgtgttaattgacgccttcaatttctcgattgcacttaaaatttctaatttacatagctgattacgagtggtgtttcaaattacttgctttaatttttccttcccctcacagaaaaaattggaattaccatgattttattcattgcattgcttatacctgtagttggtcatttcatattactagctgttcttctttacagagatcaaaaatgaattaccgtgcatggaatcatcgaaactggttggtttcttatatgtcaggagaacaggttagatacgttattttgtctttttcgttgttttatttatcattcattccttccctccaagtcctatgtgcttagatattagtctttgtttcacattgcttaaacctatctgcttagaaagtccgggtttgctgaacttcccgaattgtgaaagtgcaggcaaaggcagttgcagtaattttaacagtccatacattagtaatgatatgcgcactcaaaatatatactataatattacacctagtaacgtgataatatattttaaagtagtggatcccatctgaaataatttttactggttattataaccataatgtacctcatccctgtgatgattatgagggtaacagcatgaatgtgtccttgcaggtacttcatgagctaaagaaaactcgaagctgggcaggcttgcatgttgctgataatagttgctttcattatcgcagagtgagtaaatatatcatttgttttcctcaatgttgcagggttgatgcttgggaaattatgatgtgttataactcagttcctcattattcatgttttcaatgtgcagcggttaatgcttagaattttagaggactccaaaattgggcctgtccagaactatgttgatataaatcaattgtgggaggtagaactcttcttatatgtacatgtacatttgacttcgtcttttcaatttccttcaacctttttatatgaaaatggtgttgtccacttttttaaaactactggcttaaatttgtttaccccctttctaattttgggtacatgacaggaggagcttgaatggaatgaaatgttgataaagctgtatgttggaagagaggtatataatgttctaaaactgcattattttcatatttttggagcatagtttctttattttgcatctatataccatacatggaaagtaacagtctactcttaaatttggatactaattgtaaaacttcataatgtcttgctgatgcactttttatttgttattacaaacagaaactaggaatttattgcaaaagcacactcaagtcatttatttttcatctgtatttactctaaacaggctctatggcttcatcgccgcttccttgctccaattctgttaaaaggttttttaattgatcacaccgacaccaccgggaccagcatttacaaggactttgataagtttgtggataatgagtttaaacttcatagcttctgctcaactgttccagaaagcagctttgaggaccaccatgcacaagcgttgcattgtgctacatacatgtcatggttgattaaggtaacaaataaaggtttttctttattaaattttcttcataacctttgtatgggtttctttaaattgaaattgttgattgttgttttaattttcctcagtttattggcattgaattccaagagaagctgagagtagagaatttgaagtctcttttgaagaagatatgcccagagaagcccttcctttgggatcatttaacgaataataaaagttgacactctttcagcaaatataaagttgacactcaattgtttgttatgtaatcactttttttttattggtgaatcaacttatcaacatttgataagttaaatgtattatcatgtaataatcatggttgatgtggataatgattttttttttcttttttttttgctaagaaataataggaataccattaaaataatctgaatttgacattttggattccatttacgaccaaacttgtgttgtgcgttgtttgtagcatatcgcttatgcttaccaagcttgtgttgtgcatttgatatggtgttttcaattttttatttttatgttttatgttttatcatttattctattttatttagaaacatgagttaaatattctggtatatattaatttactacattatttctaatttcctatatataaaattgaacaaatggaagttaactttgtcataaattatcattttattacaataaatcgtaataataatatataaataaactactatttttattaaaaacaccataaaatgaagattgtatatttcaataaatattttatcaattcagtgaaattgaatgtagatttatttatcggtttgatcaagacttgtataaaattaattaaatcaacaattcttaaaaaacttctgtgatagtttatttactctatagttatttaacgggtcaatttttaaattatagacaaatagtgattaaaatttaagaagagatattactagttgctgacaaaaaaattcttaaatttagtgttcttgtttttctaaaaaatgctaaattatttcactactctgcattaaatttatttgtacta

SEQ ID NO: 29305 - DNA, 1537 bp, Cannabis sativa
aggaggacgaacaacgtgatgaatccgataagggtgaagcaacggcggtttcaaatctgagaagcgccctgcaaacgcttctagctaaacaccacaagatggctcttcgagagacgtcgtcgaagtcgaaccgcagctcaccggagctaaaggagatgataggcgctcaactagaggatactacacatcggtatattctttgtcctacccgatttatgttggtcggaggttcttagttggatgggtcagacacgatatcgcttaacggtggaggagcagcgtggtcgactgtcgacgtcaagctcatgggagttgtgctgccgaccggtgccggagaggttaaagaaaccaccaaatctgtatgattgcgattttggtcgcaatagggaggtcctggtctctattgaaggatttcagctcaatactttccttaactggttagggccatcccaagttttaggcccaatggccaatttaggtcacagattgcaaaagaggtggaatccagataaggtttccacaatttcttcttcttcttctaatcgcacgaagcttcttctggggctgagacttgtcgattgtgattcacaaccaccagtgactgagcaaagtgtggggatcgctgtgagggtggaggaaggggcgcgtacttggccggaattaattgacgaagagttggggaagccattttctcgctggatttttgacaaagggaaactaatcactttcaaagaagaacatggttgtttatactaaggatggcttgcatggctccttgacaatgagggaaatatcaccaggagcgaaattgagaagtatgaattgatactgccaggtgctcttcctacactgatggggatttatggcaaatattactggtttgcccacaagaattatcctgtagaacaagccataattgcatatatacatagtaattttgtagttctcaattagagggtcatcaagactgctgaatattattttcaggaatgggataagcttaacttggcttatgaagattttattaaaaagggcagggagacatttcctattgcagtaaacttctgcaacaaaacaacaaaaggtttagttcgtttagtgagggagcaaagtggagttcagcttgatgtattctatttggaaggaagccactacaacccacttactccaacaagcacgatcttcaacattcaggggcatgataagaaattgttgtgcaaattgcatttactagactggttctttgatagggttcgataggataattggtttgggaacacgagatcgaacgggtggaggcgagttgctaaaacttggcgttttttctcacaatgtcaacaatacgcattgctggcttggtatgtgacagaggacgagcaaggttggcagttgaagcttcatgttcttcaccttgaggacaaggtgaatttcgggtggtcagtattgttaggccttagggtattaaataataagggtatatgggtcattgtaatgggagtatggagatggtattaataggagagtaatagaagggttt

SEQ ID NO: 29306 - DNA, 1291 bp, Cannabis sativa
atatcataaaaaaaaaaaaaacaactcacactgaaaatgaaaataagtcaaattaaaaatagaaacaatttaacctcaaaatagaaacaagtagtattaaacggcatatatatgaaaatagaaacaaatgtcttaaaaaatggaaacaactaaaatttaacctcatatatatgtgaaatgaaaataaaaattataaaaaaacgagaacaaatcacataaaaaatataattcaaaattaaaattgatataccaaataatatatgaaaaaaaaatactttttaaaaccaaatactctctaagaccctcgtatcaaaaatcttttaaaaccaaatatatactatatagaacaaaaaccttttaggagcatattgaaaccaaaaaacaatatcgaacccttttcctcaaaaaaaaaaaaaaaaaaacaatatccaatcccaaacgttctcattctcgctctcaggttgggaagaaagtaaaaatgaatataataatggtaataatgatttttttttgtttggaaattgttttttgtataagtgcaaaacaaaaaattagaacgtaaaaacaaaaaaaaaaaaagtaaaaaaagtgccttatattaggtaatttctcaaaatataacttaaatttattattacatatttatttaaaaaaatatgtgataatgtatttttataatttttattagttaatttattatatttgattattttcttaatttttaaaaaaaatgacatttactaattttatttctaaatttatgaccattttgcatgttttagttctaaagtaatttgaaaattaaactaggaaatagcaataattgaaagaaatgaaatgacagggtgtaccttttcagtcaacgtatggtgaagctcctccatcacacttcctccttctacatactttaacatgctacagctatcaacagttaaaacttttaaattgtgcatgtaagatacttcttgaatttcacctgccaaaatcatctctacagaatcaagtgaactcaaatctaagctctccaacataggaaatgatacctacaaaagagaaaaaatatatgtgtgaaatttttgcatatatattcagcaaacaatattatattttaaattaagtagaggatatataccctgaagtattaaaaaaaaatcaatatcaaacttcaacttatatttcttactcttagtatatatattagtgaaaagagtggaattatataaaaactaataatgatattatataaaaattaatttatgtttagtgatgattctttccctttaaaattatt

SEQ ID NO: 29307 - DNA, 4497 bp, Cannabis sativa
  modified_base (4280)..(4289): a, c, t, g, unknown or other
ggttatgccgtttggactcactaatgtgcaagcaaccttccaagccaacatgaatgagatctttaagcctaattttcgtcgttttgcgcccgttttcttcgacaacgtactagtttacagccccactatggaagcccatctatctcatctgcaagtggtcttggagactttagaacaacaccaattttatgccaatacaaagaagtgttgttttgcttaacggtgattagagtacttggctcacattatttcaggcaaaggggtgtgtgttgactccagcaagatacaagcaatgctaacttggcccctgccgaaaactttgaaggagctttggggctttttgggtctcacaggatattacaggaagttcgtgcaagggtatgggtccattgctcgcccccttacgaagcaattaaagaaagatcaattcagttggaatgacgaagctacaactgcctttgaagccctcaaacgagctttggttaccgttccgttattggctcttcctaatttttctaagtcgttcgtgatcgaagcaaatgcttccggctacgatctaggggttgttctaatgcaagaaggtaggccactcgcctacttcagccaagtgctaaaatctcgcgcccaattgaagtctatctacgagaaagagctcatggccatagtgctcggtatccttaaatagcagaattacttgttgggtcaaaaaattttggttcgaaccgaccaacagagcttgaaatttcttttggagtagcgtttagtatccacattgcatcagaaatggctagtaaagttgttgggttatgactttgagatccattatcaacccaggatagctaataaggccactgctgcattgtcgcgcgtcctaccagcagtatctgccatgcttaccacttcttcttggctggattgggacttcgtccaatgtgaagtcaaggctgatcctttcttggccaagatgtgcacggatttaaaacaacttaagaaagtacccgagttctccctcgagcatgggcaactcaggtataacagaagggtggttcttactgccaattcatctctcttgccctattttttgaaggaatatcacgtgaccccagttgggggcattctggagagtctcgcacttaccagtggctacacgttgatgtgttttggactgaaatgaagcagcaggtggtgaattttataaggagttgtgaggattgtcaacgcaataaaaccatggctatgtctcccgtcgatttactgcagcctttaccgccgcccgagcaagcttaggacgatatcaccatggattttattgaaggattgccttgctcggaaggggtggacactatgcttgtggtggtggaccgtttgagtaagtatggccatttcattcctctctatccgttttctgccaagacagaggctgaagcatttattacacatgttgttaagctccatggtatcccttgctccatcgttttcgacagagctcgagttttccttagccacttctgggctgaattgtttcgagaacaagggactttactgaagcatagtacagcatttcaccatcaaacggatagacaaactgaggtcgttaattgctgccttgagacttatttacgttcttttgcttttgaaaagccacgagtgtgagctaaatggctcttttgggtggaatattagtataacaccaacttccactcatctttgggttgcacaccattcaaggtcctatatggacgagaccctccaaccttagagcgtcaccgtttgggcgggtcggtgatcacggcagtggaccagttgttggaagaacgagatgccttccttgatgatctaaaaatgcatctcctccgtgctcaacacaagatgaagacagctgctgacctacaccgtcgggaggttcatttcgaggttggtgacttagtttttgtcaaactccgtccttaccaacaaaaaacattggctcctcgtttttatgggccatttcgggtcttgagtcgtgttgggattgtggcttacaaacttgatttacctcctactgctgcagttcatcccgtcttccatgtctctcaactctaagctgtggtgggcgttgcctcttcatctcctactttccctcctcaactcacccctgaattggagcttcaagtggagccagagactgtgctgaatgtgtgccatggtcccaacggtccaggtgatgaagttgaagtcttaattcagtggaaacactgtttgaagcatcttgggagaaattcgagaccatccgtaaccaatttcctactttcaaccttgaggacaaggttcgagctataaggggggtaatgttaggaccaaggtccgttttacttatgttaggagaggtacgaatgctactgctcaaggatagtgtgttttcttttactttaagagagtattattgtaattgtggagtgagagtgcaagatattatattgttgtttgagaggtttatggggtttatgcatgtattgaggacttctctttacaacaggggtcctatagggctctaagcttgtaaccattgtcttttaattcaataacactcaacagggatattatctcaattcttcattgttctactgttacttcaatttcttgctattgaattgtcatatgagggcttatcaacttctaccaaaacaaaaagtacctttatgtttcgaatgctttcatgaagatcttcaacttccctttctgcctgccttttcctccccatgcattcctgagctattttttgtacatctaatgcattgctttgaaaatttttaatctgctcatcataggaactacaaagacgtggaggtctagttgacttgttgggaggaagaattgtctcaacagaagcacgagaaaacctagaaaaagagaatttttcaaagtaagcaaatatgaaagaaatctaagcaatcaaaaaataaacacccaaacagttaaaacaaaaagcttagtggtgctgtaatactactcaagggccacactacgtttcatcagttgcggatgcaaagcaaatcaaaatagacaaataaataaatgtatttgtgcccaacttggcaacgatgaagcaccaacagaatagtgttaaaagaatgaactttccatttgatagagaagaaaaagaagtcgctgctaacattttatagccatctaatgtgtagacctccttcaaatttgagttccttgaatcaaaagcaacaacttttccaatgtcataatcttgaaccaatacttgccgctccgcattaccctggaaacataattatgaagtgaaaatcgcaaacagttttatgttcttttgtagcaggcaggggaaaattccaaagaacaaaagaaagaagcaggaaaaaatatatccaccaaacttcacagaggtgaataacaagagcatgatttgctcgttctttatataaataaatgcacgtttgaaagaagaagaaaaaaatagtagtgaataacatcaaaatgtaaatggataaattatgtaccaatccataagccacataaaactagtaaaattaccacatcaactaaaacatttaaaacagtatgactttcagaatgaagacatgaaagagtggttgggtgacttgttcgaggaagcatgtgctgaggaatatccagcctgcaacaaaaaataatacacaccatcagttataattataagttcaataaccttagatgaactgaaaaagagtaaataaataagaataatcaagataccttggtcgtgaaaaatcatatattataatctgaacatagttatagtttgcttcctttgcacatgacctcaaaagaagacagtctttatgatctgttactatgaaagcactgagcaaccttccaagggcttgttcgacagcaggagcccacttatcacctttaaccaaagtctaccaaatcaaaacttaagttatgattcgcgcaagttgttaaaaaaagcattcatttagagcaaacaacagcaacataatgatggagtctgaatcccaaagagcattagaagtaattgatcaagtttaagctcttcaatggagaaagattaacaaacaattcccatcaaaaatagtttcacagggtgtataatatacaaaatgaccgaagagaacattaccagtaaagacatgttaaataaggttttcaagcaaaaaaatggaaagacgtaaaaaaaatggccctaaataagaataaaagaaagttttcaggtaaacccaccacactcgtctgttttcactttttttattaagagagagagagagagnnnnnnnnnnagagagagagagagagataacttgtattaaaatggggaagtagaactgtagaagggaaaatatttggtggaagccacaaaacaaaaatactaatatttttaaatagacaagcccagtctattgtaatattcactcgtgtgtgattattgctaattgtcataaaccaatgttttccagtgaaatgttgaacacaggtcagttgtgagtt

SEQ ID NO: 29308 - DNA, 4499 bp, Cannabis sativa
  modified_base (4202)..(4218): a, c, t, g, unknown or other
  modified_base (4265)..(4265): a, c, t, g, unknown or other
  modified_base (4332)..(4343): a, c, t, g, unknown or other
cattcccttgcctattattgttgttggaccgtttacaacccgagcttgaatttcttgggtaatgggggagctttacgaatgtcccagtagaaggagcttttgactggctaggtttttgttcaccctctgctctctggatggcttcttcaagcttaataaaaccttctgcacgatcaagaaagtcactcattgagtctactggtccattcttccttaattccttccaaagtttgccaaggacttcaatgcccccagtatcgcagaaaactttccgtcctcagttacccgtgcaaccttagtcgcctttgtcacgaatctggtgatgtaggctcggagaggctcccttggtctttgctttactttgaccagatctcttaggtgtaatgaaatttggcgagaggaggagaattgtgcatggaactccgaggacaaagccttccatgagttgaactttctgggtgccaacttgaaataccattgtttggcggcttctaaaagggtggcaggagaaaccctgcaacatacgtctcctcgtactccttgcaggtccatctgcatctcgaaatacttgaggtgggataagggatcttccttcccagtatacatcttccaagttgacatcttaaacttgtggggaattttaggatattaatctcgggggagaaaggggttccacgtgcttggtccaactcgagatcattgttcctctgactggccatgccttggaacatattttttagttcgtccaattgtgcttgcacggctggactaacctattcggcctcttcaccgacctgagtcacataagcatctctttgagcgggatttcaagcgcgggtttccggatgcacgattggcgcataaagttggtcgtccacccctctcctactgttcagattgtttctgagatcatgtgttgtccccaatctatcaaatacaaaaacactgggttgcctcagtgactcgttggtttggccaatttgctaactggcaccattaacttggttggagttattgtatatgacatctccaaatgaactactagacaaggtctgcccgcctaccacttggcccacaggtggaacttgtgaccgggcattggacgactgaccatttatagtctgtgaagtgttcatcgttggatcttcgtcggtctcgcccaaggggatgacggttacaggctattgtctggtagtctgataggctttttgtatcaacacagtggcctgccgactacggtcgtcaatgagtgcttgctgagcccttaacatttccatctccttatctctccattcagcgaatatgtgcttctactcttcaaatgcaagatttaccacagcacggagttcctcctgatcatgatgcagggtgttggtgtgaccctacatgactccaggagaagcacggaggttctggatttcagtgtcatctccaatggttatttgaacattggtagtgggcggaacgactgtgttatgaatggcttggttggcagttgaactggtattcccagtctcttgcataccaggcgcgatttccacaataggagtcgtcaccccgcgacctacagtcgatggctgttcaggatttgtggttcacaaaacccttgtgttccttgggttttgtagtgcaggatccaccgcctgtggatttgctggatcaaccacgccactgcgagtctgtaccactattttacttgtgattagatctgagataaagagcgatcctcaagtttagctctcaatgaaagcaccaaaatgttgaatacgcttttagcaaacgacaatgagtctaatttgtaagcaacaagtagtttaatatgagtgtaatataataaagcaaataaaacacaggaattttatataggttcaaccccgagcagttcggtaatagcctaatcctcgtagtttgtattaacttaagaataaggaaaatggttccttttcttagagttcttacaatagtatctctgaatatgaattgttagatagattttttgaccttttacccagtgagtatgaatcactatttatagggctataagcttgggagggaagtatttcccttcttgttacaattgatataagtggaaagatggcatagtaattacagaatacaccaatcgtgggattcagacagctgaccatatctctgtgatctgatcctaaagttatagggatttcgttggtgagtcatgatgtgaaagctaattttactaaatgttggcatgttgcgaggatcgctcactgccctgttaagaggacctcgtctgagtggatgtatgtggtgttctgttcggcatatttcttgtgagcaagtacatagagttgattccacttgattccacgtgtcaccatcgttcgatgccacgtcagagtgcaaaaattgggataacaaacccaaaaagctgcgaaaaccaaatgggatggcaacaatataagcaaatattgcagtaattaaacctagaaatgcaacataacaaatataaaagatatcaagaagaaaggctacttactgtttaaagttagggtttgggatgaaatacagtccttcggtctgcgaatctttagaggtggtgaaggtctcttccagcatttggaatgagaatttaagtcggaggaaactcgcgtaaaaaatgtcaaggactgagatggcatgcaaattctcaagcaaactcgatgccggttctttagcagaggagcttaagagtttttcagaatttctaaaatggaggaagtaatgcgatggtggttcctttttcttactttacactcttgaaattagttttgtcggatcagagatatgtttgatcctacagatagaattggaaatggaagtggaaaagatggtcatttaatgctgatgtacctcaaaattgcaaaaccaccgaaatcagaggacatgcattttttcaaaagggattatgacaaatataccctttgtaatcattaaaaagcactttttattagaaagagttttttatgggcaattgttatacccaaaattttgctaacacatgagaggaggacacgttgcaagatgggaagaatatgaaccaattacacataactataattgcatttgaggtggcgttaaagagaaaattgacagagtatatttacaactcggttgactgaatagtcttatgcgagataaagatatacaaactgttgccttgtgcatcaacgagaaaccatgtaattttaggtgtacaagacgagacactaacctcgtcacgttgggcgaaatataacgactcacgagacacttaacatgtgatacacggtaagatagtcgtataagtacatgcaactaatagcgaggtatccatctcgctataggaaggcatcctcatggtaccttcactagtcgactccaggcatctttcaatgagattcacagctctgtcaagccagttttctcagacataagctgacattcaaatgatattggctgttgaaattcacctcattgtcaagaatagcaattttcagatggagcgttacaacttcagagcagaagtgatgaaattaacattatcaaccttgaaaagatatgggaaaagccccagctcgctatcaaggttattgatactgagttcctaccgagacattccagaatgttatgatttataacgtgtttaatacacgattatcttgacctattaaaatcagactaatcacagttgtatgatattcaaaagttaatcgcatttattttatgtgatatgcaatcaaaccccacgatttcaagggataattactgtaaagattatagtcaactctttaattaactgcctgactatgtaattataaatagaggcaagttagacagaaaaagggacaaaaaatattcataagcaaaaaggccctagaacaatatcagaaatctaataagattactcgtggattatgcagaatttgaactgcaaaaccacgtaaaaaccttcgtgttcatccttttctttttatctctttactatttttaatttcctatgcaagtttatcactattcaggctcaaatttggttaacaaaaatatgtgttaacagactcctcgcactgatcctacacacgcgggtgtagggaatttcatagttagatggtagattgaggtgattattttcatttcttttaaaattgggcaacctataattgcattgtatgaagaatgttggtcgtgttggaatttattttaccagnnnnnnnnnnnnnnnnnatgtatgttatttaacatcctaagatgaatttctaaaacaatgtaantaaacacatataaagtttgagaaatcttacagtgggtgtagaggaattaaatgactccttccactcnnnnnnnnnnnncttgtatcctttctgtaacagagtatcaccaagatctgagcccaaaactcctcccttgtgcttggattcttcacaatcttacacaatatgattgaggaccaacttgatgtgtgtgggcacttacttaatcactaatggctgaataatattttgtga

SEQ ID NO: 29309 - DNA, 2519 bp, Cannabis sativa
  modified_base (47)..(50): a, c, t, g, unknown or other
  modified_base (178)..(189): a, c, t, g, unknown or other
ttttgatcatataaccatgattatattccaatgtgttgacaacactnnnntcatgaacaaatacatatgttttgcacttagaatttaataataaaatcatgaaataaatcatgtgaaccatgcaacataaagtgtaatttctgatcattattaatttataaatctgattatattgaannnnnnnnnnnntagggcacaaaacccaacagatgtccttcatgatagaaagaggcttcttgtatgggaaaaaagcttgggtagcgatgtatattattttaggagtttctattagtagagggaagcatgtgtacttctcctccttctcctttgagtcctgtgatgtatgggaattattgaatttccccttttttccattatttcggctagtgtcgttattattatatttcctccattattcttctttttagaggggtggacggtatttcccacactagctggcatgttagacagaattggggactatacaccacttttattatgtccaatactaacctgccttcatatctaggcttgtcagtcagctttttccaactttgtgaaaccatctgcttattcaaggaactttttcatgttgtttgttgagatccttctaaaatctttctagattttactcaacggtaagatacctccaagtatggcctcataaccacctccttttattgtcatttgaccttattgtcctcgaccatgaacctttgaatgtagtctttcaatggttttccttgtctttgtattatttcaataaggtcttctaggtgtgaaggtatttgtctcaaggacgagaacttacaatagaattttttatagaactcctcccaagagttgaaccttcttggggtcagctttatataccactatagggcagtttcaaatagggttgctggaaaaattctacatcacacatattcaattactttttggagatctgtcgggatctcaaggtattttaagtgtgccacatctctttccctgtgtacatcttccaaagttagcattttgaacttaggaggggaagtgccttgacatatgccattaagggtgatcccctagacctgtctagttctaggtcggacagctttaggctggacatgcctttgatcatgtgtttgagttgatcctactgtgcttgcactgatggatctactgaggcagtttccttttagactgcactgtttggccaaccaaactgactagactcccttggtgggccaagccagcttgtggattgattgaaggttggtcataccaaccactttgatttggcaaatccacctgtctaaggctgtcaattaaggtggaacaaagtcactctagttctctatcctcaagttattgctgtccattgtgtttttatccagcgtagcacctaatctgtcaaaaatagggcccctagaccattattccacatattctcaaacattccaggggagggaattattgtgctactggaccatacccagcgagatggcatggttcctagcccgaggttgtcctcccacctcctatctcttcctagtgttagaaattgcttattcctgccatatggtttgtctggaaagacctgtccatcttcaggtcaaggaggatctttcctcgtgttcgagggacctagtccgatagtttgtccattgtctgcctattgatagacgctgtatgatctatttgtaagtcttccttacagaagatcccttatcaggtcctcacctgtcccgatagttctctcattgaacttccttctaagttcagtggcctctcaaccgcggcagttcaattcatcttggtgggcctgcagggtggctgcctggccatccatccatctcagaaatttgcatctctactgagagaatgcatcacatacatcaacacgtatttcttcttgtcttgtttgagtgacctgacctacagcttctctgagcctaaccagctcaatatcatccccaaggtccaagcgaggttcgctaatgggaggttggccaactcttggcccaatttctcatgcataaactagtagtggcattctcattagtattatgagtaagggttctccatgttgatttgctcttctgcacaagatcctgttggtggtctagctttggaggtatgaaaggatcagcaagatttgcaggattggttagattgacagtattagccagattagtaggaccttttgtggtgggaggaacatgaacattgggatccaccgtcatgggatcatgaggaagatccgagggagcagttctgctggttagaaccttggtgatagaaggctctcaataaaagcaccaaaatgttgacatgaaatttagcaaaatggtagcggagccttattaagtactcaattctggctgattacttgctacaggaattcacaaaggatgagataaaaaaggtagtattcagcatacctgcaaacaagtccccgggtccagatggcttttctagtagcttctaccaagataattgggagctcattggagaggacatatgtgctgctgtgc

SEQ ID NO: 29310 - DNA, 2655 bp, Cannabis sativa
tttttaataattaattattctactagtattaaactagtttataaaatcacacacgtggtgttcctatagattagggcattacatgttaggttatccaaaccaactcgctgagtacagaaacgatcttcgcaggaagacctttatagtcctcgcatatatcttggtatatgcgagtcttagcccgatctttggtcctgctccatgcgagctactcaaatacgactagacactatcaaggtcacatcatcccgctgagtctggtttcaggcgagatttgcactcaagaggtttctcactgacatctcaatcctcctcgaggagagtgagtacacgtgtcattttttataggagtccggtctcaagtttttaggtgagaaaatctcactataacatagaccaccctttgaggagaaaagtccattaacttgtcctttacaaagcaacatgatttataaaattcatgaaagatattgttatcattagttatttggaaaacaataacaagattcttggtaatgaaaggcacttgaagaagaaaatttaaatgtaagggataaaaaatcgatagaggagggaatgatggtatggcatatatgagaaataagtaatttattaacattaccaataacaagtgtctcgacgccattgtaaggagtggtagagtccaagttattagagccaaaagtgacatggtttgttgcgcctgtgttcacgtaccggagctcatcatcaccaattataagaagcattatagtagctaattaatgcatgtggatcatgaagaatgtcaatttcagtcggataagcctgagataaggagctaccatacttgggagtgacctaacttttgtcgaaatgatagtgacagacagtggctatatgaccaacatgaagacatacttgacatagtaatcgagtgccatttccatgatcaaagggacgaccacgaccattttcactagaagtagtccctcaactagagccattttgtggaggaagcccaccatttcttaatgaaccaaaaacaaaattgcttgcatctttagagataagtatgtgaaaacattgtggtgttcaagacacatttcatgggagagtaataatgcctgaattttttcaaaagtgagaagatcactttgagaagtgatgctagaaataattgattcaaactcgggaccaagatcgtttaacagttgcagcataaaatcttgagtgctaacaggggaaccaacaattgcaagagcatcaacaatcaattgagctttattgatatatttcagagttggataaattacctttttgaaaatgggagaattgacctttcaattggagaagatgagccttggtttggctggagaaacgttgctctagagcgctccaaaccacaaaggatgagttaaaagggacaactgaagcaagaaatggttttggcatcgataatcaaatccatgaaagcatgagctaatcttttttatcattgcacaaattttggatttggagctccggtgaccagagtagtagaaggggagacatttgagaacaagatttgatcaagatcgtggccaattacagtgggaactactttgaatttccaagagaggaagttgacatgatctagcttcagtgtaagagaagaggtgagtgaattcgagaatgtattcaagaccgttgccagaggagtagcaatagtagtagcagcaggaagcgtcgtcgcctaaggatcagaggttgaagactccatggacgtaagtcaaagacgatgataccatataaaagataaaacatgcgttgagctagcaagcaaagaaagaaaaacttgaacagagaaagaatctttggaatgaaagcctcaactcatcagagtgagttagccactttatttatagactaaattttaatacagaagcaacggaaaacaagattacaactgaaattagttaactacactaactaaccaagtaacaaacagttagttaagtaacagtttcactaataagttggttaacacataataaggcttaaaactcgagttgcttaacaatattgtcaaaaatgaaccaatttttggttttgttaaattcatatttagaacgtaaataattataatcataggcggacttagaagtgttgagggagggctaaaacccaccataagatttgaaaatatattaatatataattgttgcttacatatatacgcagtagttaaatggaacaattagttaagatgctttgagtttacatgggagaccatgttttgaatccccttgttctattttttttaatgtgtgcctacattttatttattaaaaaaataacaaaatataaagtttaaactagattcaaacttatgttttagattttattaaatgtataactaaatttatcttaaaattaaatcttggtccgctaattataatcatatccatacaaaataaagaaaagtcaattctcattatcttttcagtgctatttgaattaatatttctaaatattcgaaaatattgagtgttaggtctaatattttccaatataactctttaaacctatccatagtattattacttacaaattactaaatttaagtggcgtttggtaacacttttttaatcagatttctgtttttaaaagtagaaaagtgaaaatatttttcaa

SEQ ID NO: 29311 - DNA, 1427 bp, Cannabis sativa
tcaacatcctgcgaggaaataaacaatttcagttgacggaggaatgtgaaaaagctttttaagagctaaagacgcaactcgcaaaacttcctgtaatctcaaaacctctacacaaagaagaaattgggatatacctggctgtcacacagcatgctgtaagtgctgtgctgatcaaagaggaaaaaacattcaacatccgatgtattacatcagtaaaagactcattgtggttgaaggccgatatccattgatagagaaactcacttactgactgattctagcaacaagaatgctaaggccctacttcaagctcaccttattcgggtatacactgaccaaccgttacgccatatattgcaaaaacgggatgcctctggatggttactcaagtgggcagtggagttgggtaaatatgagattatcttccaaccccgaacagcaattaagggctaggccttagcagactttgtagtagaatgcatgggcaaggaagagagggtatcagaaaacaaccctgagccaaaataaatacctcacccaaataacaatgaagacacgccgacttggaaactacatgtagacaagtcggctacagatcaactatctggtgtaggaattgctcttgtcacacctggaaggcaacacctacacgctgcactcaaatttgaatttaaagcatccaataatgacgccgagtatgaagctttgattgccggtctaaaactagcccgaggaatgaaggctgaacatatcgagatctgcagtgattcacagctggtggtaaatcatgtatctggagaatatgaggctcgaggggaaaagatgatagcatatctgagcaaaatacacgatctgcttgcacagttcaaaagctatgtactcaggaaaattccaagggaataaaacacaactactgatgcattggctcggcttgcgagtagtaacgtaaatgataacgcaaatttgattccaattaagtttcttgaagaacctagcatcacttgtacaaaagagattgaaatgattgatacatcctcaaactggataacgccaatagcaacctacctcaacattggagaactcccagataatcgaaatgaggctcgaaatatgagaaggaatgcttcacggtacatcaaagtagagggagtcatgtatagacgaggattctccatgccattactcagatgtgttacccgagaagaagctgcacgtctattatctgaagtatatgatggattttgtggaaaccatgctgccgggcagtgtttatctaagaaaattctaaggcaagattatttctggccaatgatgattgaagattccaaggcctatgtcaaaacatgtgataaatgctagagattttcaaagataccttgagcaccgctcaacgagttaactcagatgcaaagtccttagccttttgc

SEQ ID NO: 29312 - DNA, 3033 bp, Cannabis sativa
ttcttcattgtgggctagaagtaatcgtgatgaaggatctttttaaataggctttgtttgaaagtatggtctccataaaaccttcgtggatcttgtgtatggtagtatttatctaggtcccaactacacaccttaggtatagcacaaataaccccctacagtagagcttcccatctagtatcacatatcacagagcctggtactggaccttctaggaagcagctttgttcgctggaagctccctcgaatttaggaattggtatatgggccatatctaggatttaaaatgatcaacgatggtacttatgccctgtgtaccaatacttgaagcttctaagtgggccacaggcaccactccgtattgaatgatctctaggtctgtggcgagtttctctagcatatctgtgaatgaattttggtcccaggggacctggccgatgttttagctcttaaaaccttacaacaactctatcggcatcatcacataggcagtcattctttcacctttagcttgagattcctcagatatttgattcaccaccaattgggagtcactatgcacttcaattgggagtcactatgcactagtcctgatagcatggcttcgtgttcaacttcattattagaggcaagaaatttgaaatggtgagaaatttggagctggtctccttgcagagagatcaatatgattactgctttgaatcccttttcatttgatgccctgtcgacgtagactttataggtaggtaactctgggactagaccgtctgggtggtcacttagtctggaacaatctattacaaagtcagctagggcttgacctttgatggacacccttggctagtattggatgtcaaactagctaagttccattgctcatttttgcatcctgccagatgcctccaacttttgaagcacttgacggagagaataatttgtcagtaccttgatggcttaatattgaaagtagggtatgagctttgtggaggaaactattaagcaaaaggtcaatttttcaatcaagggatacctagattcttcacccagtaatattttgttcatgaagtacactggtagttggacctttccttcttctcccattaattccgcacttatggcatgataagacactacaaaatataggtacaactcctcaccttccaccatctttgataagataggagctttggcaaaatgctcctttattttttggaaggcctcttcacattcctcaatccattcaaacttcttatttcctcataacacgttcaagaataggatgcacttgtctatggacttcaagattaatctactgagggcggcaattcttcccataacactttgcacatccttgtgatttttgggagattgcatgtcaatagaggctttgatattctctgaatttgcttccattcctcgagaactaatgataatgccaaagaacttccaagaggagaaacaaaacgtgcatttcttgggattaagcttcatcccataactttagaaaattgagaaggcttccttgaggtttgtactgtgctctctagatgtcttagacttcaccagcatgtcatcgacataaacttccatatttctccccaactggttcttgaacatcctattgaccagtcactgctatgttgctctggcatttctcaggccaaatggcatgaccttatagcagtacacacctttatccatctagagttggtgtgttcttcatcagctctatgcattttgacctgattatatctagaataagcatccatgaagcttagcaactcgtaccgggatgtggcatctattatttggtctatttgcagaagggggaatcattttcgtgacaagccttgttgagatctgtgaagttaatgcacatcctccacgagccattgggcttagggaccaaaattggattagccagtcaaataggatacaaatcttcttgtaggaagtcatttgtggtcagcttgtctacttttgccttcactgcttctgcccctagtgcttaaagtcattcctgccacctccacccaactgtctagggcaaacacggctcttcctccattgcctcctccgcacttcaatcttcccatcaggcctatctcagtgacggaggaaagtagggcatatctagaggctctagaacaatttaactggtagaggtgcagtagtgagcttgatgacatgaagaaactggccaacaatattgccacaaggtagaatgttgagtttgccgactatgacaagtgggatgagcctttccctgatctcctgaacaaggcagaaatgacaaaaaggcttcgccctagggttggaactgacatggcttcattcttgactgacttgttggaccaaagtgcctccacaaactcgaagcggataggttcgccatgttggcgagtgggaatcctgttttcatggaaaactctctgaggacccaagtcaatgttgtaagttgattttacttaagataaaggatatatcttttccactagactgattcatttgtccttttctctcgacatgtgagtttaatagcgaagaggaactgttctttggctactcaactggcttacgaactcgaggtgacaagggcaaagcgtgcaaatgctgaataaaaggaggaggctgccaaagctctggacaacaccaggatggaggctaacataaagcaaagggtggctgaatctttggacaaggtcctaacttgcgaaaagaaggcaaccaaggcagtgaaggagcatggagataagtataaggatcttcattccactactctcactaaaatcaaagacctagaagctgacttgaagcaggaaaagcttgacattgaagagaaagaccaaaagcttaccatcctatctcgagatatgacaaacaagttggaatcataaatgacaagatcattagtgaaactactccagagagaaaggtgaagcattatttggagttatagtagaaggagaaagaagctgagaaaaaggctatccaaagggctgaagaggctgagactaaattggatttattcga

SEQ ID NO: 29313 - DNA, 3459 bp, Cannabis sativa
taaatttttgtaatatgtaaaaatgaaaaaaaaattataacattttattaattttttttttctctattattacaaatttttaaaaatatatataaaataaaatacattttaaatgttaaaataaataataataaaaaatatgaaattttattagagtaaaaattaaataattactaaaattaatacaagacaatataaaaattcaaaataaatttataaaagagtaaatactattttggaccctctattttgcaaaaattattaattgaaagttaaatgataaaataggccttttattttctaaaatggtaaaaatagaatcttaaattgattttttatcaaaataaaatataataataatctgatttaaaagtattatgacaaaactgtttacgttttctgtatttgttcgtgttacgaattttcttcaagttggttatattgagaaaaaaagtatcaaatcattgcaaaaaaaaaaaaaaaagaaaaaaaaaactcaaaaattaagttcactgtcctatttttactattttaaaaaatacatgatctattttatcatttaacaaaatagaaggtttaattaataacttttacaaaatgcaaggtccaaaataatatttgtcctttataaaattgattaatttttttttttactatttaaatgtacataaaaatttcgtaagatgcaaataaaacatctttaaaaactttttgactaattagattttttttataccaaatcataacctttaaacttttgagattgtaaatttttttcttaaattattgaaatttataaatttaaaaagtcttacaatgatgaatttcaaggggctcaaatttgtacatctcagagtttggaagtacaatttagtagatatcatagttcgggatacagttagtacatgtaattagatagaaattttttaattacacaatctcaaaagtttacgtagaatttttaacaacttgaaaaaaatgaaaattataatttagtacatttaaaatttaagagaaaaattattctatatttttaaaaattttacaatgtcttaaataattatagtatacacgactataaaaaaaatgaccttaaaaattaaaattaaatagtgatgtattagtattggtgcacctattttaagagggtacattgtaaaggtaacctattatatagaaggagcattcctattgaacaccagtagtaccaatcacattctataggtgagactctacgattgattaacgatattttttaaaagcaattttcttaaattatatggaaattgatccttaattataccaataacactataacatcgaaaagaattttaacactactaataatgtgttttaacaattatgaaaaatactaaaatgcacagtaacatttagcatcctactacaaattaatatctatattaatatatggaagaattatgttttatataatttgatataataattttttaaaaaaattgcaaactacatgtaaaaaaatatcagttatacccaataattatctaaagcaattctatatagagagagagagtgtttgtttgtgtaaatgagtgcaggtaagtatgacgcgtgtccgttagccagctgtatcccaaacataagataataaccgcttcactggaaaaggcagtttctcaatccccacaacgctcttcccatttcccaacgattcataacctgctttaccggtcacccttttcacattctctctcttattttctctcttaactatttataacaaccaaatcccccacctctctctaataaccctttcccccaaatcccattttctttatttcttctccattttcaaaatcacccaaattcaaatccccattttcaaaaacaccacaatcaataactcaaaactcaaaaatggccacgattaccagaaaagaaatggatcggatcaaaggtccatggagtcccgaagaagacgattctctacagaaactggtggagaaacacggtcccagaaactggtctctgataagcaaatcgatccctggtcggtccggtaagtcttgtcgattgagatggtgtaatcagctgagtccacaggtggaacacagagctttcaccgctgaagaagacgatactataatcagagcccacgctcgattcggtaacaaatgggctaccatagctagactcctcaatggaagaacagataacgctataaaaaatcactggaactcgactctgaaacgaaagtgttctacaatgttggaagagaccgacaatggtcatggccacgtcagcggtggtggtggaggaggaggaagagcaggagggtacgattgtaattatccacagcctttgaagagatcggttagtgccgggtcgggtattccggtttcaaccgggctttatatgaaccacccgggtagtccttctggatcagatgtgagcgattccagcgtacctacggtgggttgtactactctttcaccttcgcacgtgtttagacccgtgccgagaacaggtggcgttttggtcgaaacggcgtcgtcttctaacaacaacaacaacaacaacaatgatcctccaacttcgttgtctctttctcttccgggggttgttggattcgattcttgttctgaggttatgaacttgttgccggcaccggtgttggcgccggcgccggtgacggtggttggtggtggtggtggtggtgaaggtgagagtaatggggtttttgtaccgtttagtaaggaattattggtggttatgcaggagatgattaagaaggaagtgaagaattatatgtctggattggttgaacagaatggaggatgtgttccgccgccgccgtcatcgaccgccgtcgatgggtttaggaacgttgcagtgaagagaattggggttagcaagatcgagtagtagtttagggaagggggttggttagtagtggctggttggataccgagaaaatggaaaagaaaatcatgaaaggagaaatctttggttggattttgaacagagttagttgtttagtagtataagggagaagagacaaattgcctgttttttttttttttaattttaatatttaggaaataattttggttaatgtacagagaaatggaaaagaaaaaaaaaagaaaatgagagaaagtgaaaaagaaaatgagagaaagatatggtgagttgagttaaagctcgaaattggagtttgagtaatggaaaagtaaagtttaaagaaaagggtataagaaaaagatgaactttgatgaagtttgatgatgagagaaagtgaaatttgagagttttttaggtttaaaaactccattaacttttgtttaatctatatctatctaatgatgatggatatggcctttgtttatttttttcatactgttttttattttttatattttttccagaagaactaaacttaaagaaaatcaaaaacactaatatgaaatttaaatccaa

SEQ ID NO: 29314 - DNA, 8311 bp, Cannabis sativa
taggcctgtgcctagggcccacttagcccaaggcccatttttttccttttaaaattatgtatttttttactaactttgaaaaataccacattttttctaacataagggcctaaaaataattttttttggcccactttgtttgaggcccggccctgcaaacgaccattattagtttttaaaaactgttttcaagttatgaagctaaacaaactctaaaactttcgttttattttataatattttaaactatttttttaatataaccaacataaagcgtgtctaacacaatcaaatgcagaaaatataataagtttaatcattatacttctaggttaagttattatttagttttattttaataaaattgagcttagggtattattttgtactattaaaaaaaaaaatcttattttactaaataaattgtccaaaataatattttgaataaactattttatagttttacattcaaatatatgtttttgaaatatttttcaaaaacagcaagaaaaagctacatgaaactaacaagaaaataagatcccaataatatcagaaaatataaaaaataatatacatataacaacataaaaataacatgaatatataaaagacccttttttttttttataaataaaatcttaaaaagtcgtaaaactctttgaaattcctaacaattatatttttgtgtaattttgaaataatcttttttaagtaattctacaatgtacccccttaaaaggtatgtactcgtgcaccctgtacttgtatcagcatccaaaagaattgtttagtctaattatttttcacatttatttacgttatagcaatttaagatatcttacaaaattttgagaaatttcaaataatttacaatacagaaaacaatattcaaacaatttattttacacgcgtataaaataaaataatcacgcgtataacacactgtttaaacgcaatcttcagcgtgttaaacttttctgaatttcttaaattttacaagatgtcttaaataattttaatttacatgaccatgaaaaaaatttgactaaaaaattatttcaaatattaaaataaataaaaatgtatacgtacatccctttcaaatggtgcattgtagaatttttaatctttttttttaggctaaccaaaactatttctttattattaagaaataaaaaataaaacaacaaataaagataaagaaaaggaatatgagaaatttgagatttggagggaaagaatttttgttatataaatcttcttaagaaataagaagctttcatttggcgggaaaatgtccttaaagtccttccctttttctcttatccaaactataaatataaaaaccctaatcccttctttctctctcctcacaaacacttcaattcggttcatttccacactcagctccgtcgaaatctcttccaccttccgccctcagatgatgtctgtgttgagaaattaggtacgtatgttttcgttttgggttttaagaatcaaattccactttgccatggattctagggtttggtgtttcaatgttatgattttttttgtaatttgctgaatttttgttcgattgagctgcaggtttggagagaaaaagtttggtataagtgattattgggtttttgaggcgaattttgtttatcggggaagatgggtgatgcatttgatgatgaagtagaggtagagcaaacagtttccattcaagagtatcttaaggacgttgaagaacgggagctggtatgtcctgttctgttctgttttgctttgctttggtttttttttttattttgtttttatggttttttatttggtgaattttatgggttgtagaggttgaacaatttggttagcagaaatcccagctgttaatatcaatgtatttaggtaattagcattatatgttgaattaggagctagggcatatgccttctcattttaatcttagctactgcttgagtttgtgtttaatttttattggtatttggtgaatttaatgggttgaggaggttgaattatatgacaatttttattctgtttttggtgaaaagatgctggaggaaagtaattatgttggggagtttgaactgtatcagtttattggtttctttgtgcaatgtttgatgactcatttgaacaatgacacagtttagcaggcatggtactttgattattatgctatagcaatgtgctttgatttctcatagagatctgcttggcaacaattttctcgagtgtcatacttcacaaataatgtagggttttagtggaaggacgtgatacaaaaaaattttaagatttgaatggcttgatgattgcattatacaaatcaagtcgacaaaattatccatttcattgtttcttagctagggcggtgcagataattgtttgatatttatatttgtttaagctgcttgtttcattcatcttaacattggtgccttcatcttgctgataggaagcggatttggttttaggaggtgatgaagggaaggagtgtacgtacaataatggttacatgaagagacaagcaattttctcatgcttgacatgcaccccagaagggaatgctggagtttgcactgcttgcagtttatcttgccacgatggccatgatgtatgttttagtcaatatccttttcatcatagagcattttttgataaccacataattacgagttgcatattcatcaggtaaacatcatgttttgatgtggacttctactttctttttatttgctcaatgatatcaagataaagctaagtttatgaatgtagtatgcagataaagctaagtttatgagtgtagtattttggcctagcaaaacaactttctgaaacaaaaaaaatatggatacttttcctatcatccagcataagtttttttttttccctgtaaaacttaacataaactaattggtttgcttctttctagcatgtttttattcattggaaactgttttactgtttggttctttcttgcatttttttattctctggaaactcttttagtgttcatttctttctaggatgttattatggaaactgttttactgtttgatttacatgtttaactatttcatcatgatatttctctttaataggatgctcatctacgtttcaaattgtgtgcactggagtagtgggtggggttgatttccattattccactacatgataatatgctgttaccatacctcttacacaatagttatattcagagaaatcttgatgcattagctttacctaccgttcttgtaatatatactcataaatttaagttatgcacttatatctaatctgtccttccatttgtttatttcctttttctgggtgctgtttggaccagattgtggagctatggacaaaaaggaactttaggtgtgactgtggaaattcaaaatttggagagttcttttgcaagctttacccaaataaagatgttgagaatgttgagaattcttacaatcaaaattttaaaggctcatactgtacatgtggccggccttatcctgatcctgaggttgaagctgaagaccaagttgagatgatacagtgttgtatatgtgaagactggttccatgaggagcatcttggtcttgaatcttctgatgaggttattgctcgatatgttttaataggcttaagtaattttctcatgttttacttgctgagtaacgatctgcacaagtagtttacaccaaaacattgcgcacatgtatgtggcaagattttcaaccaatcacatgtaagaagatatgtctcactaggctaaaatgacttcgcacagaccattacttgtctttgctttcattttgtcgagtcttaccattacggccactatactcagcggtagtacttgatccgtgatgtcgtctcatttcttataatctccaagatttgcctttggggtccatccaactagaaaattgttaaggaacataaatgaaattattcaaaagatgttgcgagaactttatgttgctcttaagtacatttgtcattttcaaagattggcattttaataagtgttggtgtttggcatgttaagctttaagttcttttgatattttattctacaacaggtgcctagagatgaggaaggcgaaccgttgtatgaggatgtcatatgtggggcatgctccattgtttgttcttttataaggctatatcctcgagccgtatggacagtagagaagcagaaaactgacagtgttagtgtaagcaaggacaaaaatgttgtggaagatacacaatctggctgtaaatctgaagagatggaaactaagacatctcccgaaaaggattgtaagctggtttctgccatatctgaatctgttccttgtggggagggtttacaaaaaggggaaaattctggaaaagacatagatttaaagcctgctgtggatgcagtttgtgctcttggtgttgatttactggttactgccattgactcagagaggaagccaatgtttctttcgaaaagctggagggatgctctttgcaggtgtgaaagatgtaatgattactgcaaacaaaagggcattggttttcttcttgataaggaggactcaattgcagaatatgaaaaaatgggaaagcaaaagagggaagagaagttgcagaaacaagagggagctgagttaagtctacttgaaaatcttggtcatgtagaaaaaatggaaattctgaatggtattgctgatatgaaggatgaaattcgcactttcctggtatgttttttttggatcactgttatatttctttagtgtcgttaatagcttaggcagttgaaattctgttttattagttgctcttcacaaaaaagcctcaatgttaagtccattcttttgcaggaatcttttgattcttcgaagccaattacttctgacgatgtccaccaagtgtttgagaacctagcaaagaagcgcagacgtgaatagtgagttattattatgacaatattaactaatgttctatggatatgttaatcgaaatgttcaatgctcgagactagacttagtccagattcagaaacattaagaaaagctgttcgtgtttaaggcttttcttaagcagactgctttttcttcggtgtaacagtttattccatgtacttattttatgaaggacctaaagagtcattttaggcatgcctaattcaattgctgaaaatgtagtgcttacgttttaacacaacaaccatgtttgtaggtgcatatttatgcttgcccatgtggtgaatcacacacactacacttgacactagaaaaggccatccctttgggttgactgattcatcatatgtcattgttaattgtttgttttatgacactgttcatgacatgtatttatttcacttgtacatatgttcctcttttccatgtgcatttgtctctggagtaatttagtgaagtctaacttttttatttgggtccatgatttggttggtattgaattttttacatcaatttttgacttgaagcatttaattgaaatcacatgctccttttttaccatgtgcattgtctctagagaattcaatatgagatgaattgggggcaaaaaaaagggaaaaagtactgaacatctaggaaaaatttaccgcccattagtctaatttttttttatggttgtttactttgtaattatttaagatattttgaaaaacttaaaaaaatttatcacgatgaaaattgggtttaaatagtttgttttcttaaaaaattataacatacacgatcatggaaaatattgaattaaaaaaatttcttagatgcttcggtgtgggttgtagaatcacttatatatattttaagcttaatttggtacttgatttggttgataataaacttgaataagtcactttgtcaagaattaaagaaatcacatgcatatgatatgaataatgatatgcattgttagaagacataatcttttatgtaagatttcatttcattagtgaaataaaattataaatcacataatacatttcttgtataatatgaattttttgcatatcttataaaaatatattatagtgggggggctttaatgaaatcctttggtttgattttctaactgacttgtgataattattcaacttttatttatttatttatttttcattttcaacactctttaacgagctaggacaagagtaggtagttatagttagtcccataaggctgtacacgtgttccaaatctagccatatagtatataaatatatatatatgtatatataaatattaattagtaattaccaaacttagtcattgtgccacctaaatttgtgagactgtcggcttaaatgtactataaatttataatagtacagtaacaccaatctatgaaaacaaaaacacaataacattatattaatatcttttaatttgatgtggacgaaagagaatcagattcttgtttgagtattatatatattcataattgtttgaattaaatatttattgaacttctaatgtcatctattgtcatgattacatcattagatacctactactactaagtactgtacttactatataacttaagggtgtttttacaatactactcgacacaaaaatttcgaatattttagtgtcaaaataaattttaaataatttattgcataagtatttttttaaggagccaattgatttgaatacaatttggaatttttcgaatacttgccccaaattatgccaatttatcggtgtattgtactttagtcttgtcctataacttcattctcacacttggtttttgctcttttatttagctcttttaaaagggtcttcaaggacttgaacaatgttattgatattgataagagtagtgttaagtaactctttaattacaataataataaattaaataataattagtgttaatgatactgcccaataatctttgtaattagtggagatgactttgtatctcgttgcatgaaatgtataaagagaaaattcaagcactaaaatgtttaaataaataataaaagaaaagaagaggcatgttgaattttcatgcaggtgtgaacatgaatatatataagaataatttcacttggattgtttatattttttgagacaaaaatacaactattcctaatagtagtagtaaccatgcattggtccaaaatggttgctttagcttagctccatagtcatatcaatcaaaccgtgatttttgtttttatcacatattaaaaataataataataattttttcaaaataataataataataatgaagtgtgtacttatatgatagtattttgtgtttttgataatattgaaattgtatatattaatactctaaacttagaaattcaattacatatagcttagagcagttttgtaatttaattaattttcataatcgtatacatcgtagctatataagactatttgaaatttttaaaaaaatttcgaataatttactgtgtcaaaaataaaatttaaataattatttaccatacatatagtcgtatgtgtaatgaaatatttaattcttattttttatttggaacagtgttcctgaatagctacaatatatgtgatcttgaaaaaaaattaaaataaaaaactttattaaatgccaaaacagataaaagttttaccaaaagactccaagtacactgtaaacttatccaataatatctgttatttttctacgtacacacttagtgagaaagacaaaactattaggcttttaagaagtaaaactagttctcaatttgaagtttgaacaatggtttaaagctgccacaaaaagatgagtacaatttgtctgattattacagaggaaattcatagaagctttttgtttgtatttttatgaagaaaagaaagaaaaaaaacagaatccacacacactaataattcttgtgaagaatccatacataagatgatataataatgtgaatataaaaatatctatgcttatctgtataaataacaagaagataaagctcagctatttaatatctttttaaatcttttcttattagatcaacataataattttgattttaaaaagtcaattaactatttttaaggacaaagatgccttgtgacaaaaataataatgataattaagaaatgacaaagaaggctctatatatatatttctttctttaatttctattattattaatccaagcttgggtatttttttttagtagttttcgttgtcaatcaaagaaaaaaatgttgaaacaaaaagtgaaaaattaaaaaaaaaaattaagaagaaagaacatagtaggtaaatctaatgattttcttgttgtaagaat

SEQ ID NO: 29315 - DNA, 1898 bp, Cannabis sativa
gagaagtgtaaaagcctatctaaagtctctaaatctacttgtgagactgaatgttaaagtggttgagaaggttactagataatttaacacaactacggaaagttctatacaatttttggtgttatttgagtcatggattaactactagtgttacttcttgataacatagatatagttgccaaatagtaaagaatctgataccctaagaagagtaaatatataaaaaataatttcacaatatctacgattttgagactaaggatatgtaatggtggagaaggttggtaattgaatacaacctgtcagatcttattacaaagataatactacatactacacttgctttggacatcaatgtgttgagattagttgaaatgcactttagttatatattagtgcaagtgagagtttgttaggattttatgccctaaataaaacccatttgaatatagtcagatttactaaataataaaagatcataattcattttatgttacatggttcacatgattactttcatgattaaatgtttaatgtataaattctattaaatcctgaacatataggtattcatgattatagtgttacatagtggaaaataatcatgattatatgattcaaagtatttacttcttgatgtaaagtttatttattctattttaaagtttaattatgtgaagctttagttaatcgcgttttcccaacatgtaagaataactgtgagtccatagactcagtaagaaaagtataaccataatataaacttaaaccaaattacaacgaggtgcccatacacccaatcataaccctattttgcatctcatgcatactaagtctagaatgtttgtacaatagtaatattgaccataatatcagtctatactcagtattctagtcataccaatgtgatagcatcaatcagtacttatgtaaaatatacattcatccgtatctaatataactctatatatactgatactgctatttgaatatgttatctaacaaacattcataaacatgcacactaaacatgtaataaaatatgcatataattatactaatcttaccatgatcccgagtttaggtgtgttggtcatcctgagtggaattgttgcacgacagtttataggcacctaaatcacaatattgtaaaactgataagcgataccctaaatcactttctgaggacttaaaattaaaactagaagtttccctatcgatggatagcatggcaataccctaagtatcactaaaacatgaaaaactagggttcaaaaactactagaaccggtaaactggattcccaaaatagaaaattggttcttagggttctgcttggggaaacgattaaccaattctacagggctagcacgaactggttaaccgattctctacaagaaccctaaaaaaacctcaccaataattcaattctaacccaaaatgttccaaacctttcagaatacctaaacaagccataataaacataattcaagtaacaaaaataggtaaaggttcatggaattgaatctaccacaaaagggcaaagtttgagctcaaaagctcaaactttgtctcggcggaataacaactacttaaatagtccataaacaacttgaataacttaaaaccgggcatcttcttagaatcgaaaggtagcacaggtcactctgtaatttccagtgactcccataaaattcaaaatctgagtgattacagttagccactactcggatttcataatgtttggaccacctagaaagactagaggttcctacttacgaaacctttcatacaatggttccattcgattaaccataacaactgacgccacctgcatagcaagggcataagctactttcacatcaggagcaggcattgcaggagcaccctactgcctc

SEQ ID NO: 29316 - DNA, 6259 bp, Cannabis sativa
  modified_base (3850)..(3851): a, c, t, g, unknown or other
  modified_base (5632)..(5640): a, c, t, g, unknown or other
atatgatttataacatggtaagaccccgttgttgagccaggggcatttaagtaattatgacctgagaaaggtaaaatgataaaattaatttaattacttgcttttggaactatattactatatagtatgtctgtgttgtctttttaggtgtgttatgacaggttggcgcggtatagtcacaaccgggtatttcgggtcgaaccctgttcgggcccgaaatgcaatttaattgaaataattgacatttttatttattagtgataatctgaaatttaattgggattaaatatgcatgaaatgactattatgcccttatgagtgtaaatacatgttatatgacgctaggggcattttggtctattgaccttatttgaagaaatgaaaaaagaaaattgtagttttgcttcccatctcacctgacccctctctctctcaaaccctctttgatttctcaaatttgtatggagaattgcttgaattttgtgtggaattgaagctttgtaattgaggaattttgagcttgctttcgggttgagtttaaggtagtttttagagctttaattctagttatattttgctgaattatgttgttatagaagagcatgaaaagggttgtgatgttgtgatgtggcatgtatgtgttcttatgtgagtatgagcatggttatattcaaatcttgtggattattgtatgggtttgtgtttggatgaaccttcgatgaattctagggtatttttcttctgaattcttggctgtaatactatgtatgtttggagctagcttgtaaattctagctcaagagcttgaaattggggtttatgtgatttatatgaaatctgaaattggggactttatgtttgattttgatgcataaatatgtgttttagaccctatattatttgctaatagttgtagttagtaaattgagagattggttttgatattggtgtgatttgggtgtgtttttgttgctgaattcttgtttgaagatggctggtttttgggttttcaatccaggtgtcgcgacatggtctgagcatgccgtggcccgcccctgttggtggaacctaggatttgtcccaggtgtcggggcatggcttgggcatgccgcggcccgccctcgattttctgggcagtttgagtgtaaactttaaaattgcatatcttttgattccgaactccgatttgggagttcgttatatcgttggaaagttcgttccgagctctatgtgattatctgaattataaatgccatgaaaatattttatgagtttgaaatcagggattaaccctagttgtgaaaaatctcgaattgtgtgactaggattaccggcacctgatcaagagtacccagggattcggaatctctgctattccaagacaacaggtaagatagtagttagaatttagagtatgcgcggtggcgcttatgctgagattgatatatgtgaggagtattaaccgggattagggttattatcctaatataagcagttaatagcctagggttattatcctagtgatataagttaagtaaatgctatgtcatgttaagtgtatgattatattgagatttaatggttatgcgttcaaggcataatcaggttggactcggtaatcataaccgagatgaaccattctaaggccttattatatatagacgtgtgagagcagcatgtaggtctacgccacgtaggcataaacagacgtgtgagagcagcacgtaggtctacgccacgtagatataaataggcctgtgagcgcaacatgcaggtctgtgtcatacaggcagatatgaatggcattattgtttatattgtatgatgagcatattattgatatgttttatactgtcttgttgggcttggctcacgggtgctctactgtgcatgaaagggtaagactttagcttatgagccatgagtgcaggagctgggcaaagaatttacatgtccgggccatatcagaccaagcaggttagggtctaccagtgttgtgtttttgagattttgttttgccgcttaggttggctgaaagaaaaggacttgtaataacattttgaaaacgtttttgggatcccaacttctgtaacttttagtttataaagtttaaagtattgcaagtttatttttattcctattgttattaaagtttaaattctgcgctaattttattagtaattccatttaggggattagggtttcataagtatcttgggtaacgtgcctaattatttagggcgttacactctccgtacaagaaacttgctcctatgaaaaaggacataagtaagaggggcatgtccaagttttgtagttttcatggagattatggccatgacaccaacgaatgcaacaatttgaagtgggaaagtgaattcttaataaaaaagaacaacccacacgtggaaaaatatgtcaagaccgatcaaaatcagaggtccacccacacagacaataatcaagacttactgccaccaccggtagatgcgcatttacaagtcattaaaggaggcccacacatagctagagattcaggcaaagcccaggaaaggtatgcgcgaacattaaaacacgagcaagaagaagtggtcttggccgttgaagaaaggaagccaaaaataccacgggcaggcgaacccaccataacattaatgatgaagatgttgtcgagattaatttcccggacaacgatccgttggtcatggaagtccagatagccaacaaaatggtggcccaaactatgatagagaatggatcatttgcaaatatcttgttcaaaacaccatatgaaaaaatggggctccaactcaaagatttaaccttctgtcttcagcccgtgtatggtttctccggccagagtgttgcacctctagggaaaattcccctacccctcactgttgggcaagctccgaagagcataactgtaatggtacaatttttgatattggatgttccatcagcctttaatgtcatgttaggccgagcagccttatatgacctaaaggttgttacgtcgatatttcattcgtgccttaagtttccaacaaagaatggggacgggtgcctaagaggaaatcaacaagttgcacaggaatattataaccctgccctgactaaggctgaaaaggaagtatcatctagtcagagttcgggaaagggaaaagaaattgccaaataaggaactgcccaaggcagggatgaagatgtggatccctgacttggggaaccaaatataaatgttggtccagtggaagaactagaagaaatcaaaatcgacctaaatgttccaaccaggaagctcaaaattgaaaaaggtttgctgctcgaagtaaaatcagcattgataaaatttctaagagcaaacctagatattttcgcatggtcaaacgaggacatggtcggaatcaatccttctataatctctcacgtcctgaatattgatcctaatttccggcctattaaaaaaaaagaagattgttggatgaggaacgagccctagcactaaaagaagaggtagaaaagctgcgcaacaacaatttcataattgaagctttctatctggcctgggtggctaatctcgtacaagtacccaagccgaacaaaaagtggcgagtatgtatcgacttcaccaacctcaacaaggcgtgcctaaaggactgctttccacttccacgcatagatcaacttgtggatgcaatagcaagacacgagctattaagcttcatggacacctattcggggtacaatcaaatcaaggtgcatccaccagaccaagaacataaaagtttccgaacaaatatgggtctgtactgttataaggtcatgccatttggtgtcaagaatgccnnagctacataccaaatattggtaaataaaatgctcagagaccagatcagacaaaatatggaagtgtatgtggatgacatgctcgtcaaatccaggaagactggggccatatagatgacctggacaaatgcttcaaagtcctcaggaaatataacatgaaactcaattgtctaaagtgctccttcagagtcagctcgggtaagtttttgggctttatcgtcaatgcctgaggaattgaagctaatctagagaaaattcaagccctcctagatatgaaatcgccaacaaaaaccaaagaagttcaaagtttgactggacggattaccgcactcaacagatttgtttcaaagtcaacagacaagtgtgtcccattcttcaacatcctacgaggaaataagcaatttgaatggacggaggaatgtgaaaaagcctttcaggctaaaaatgcaactcgcaaaacctcatgtgctttcaagacctcaggacggagaagagttaggaatatacctggctatcacagcacatgctgtaagtgtcgtaatgatcagagaagagaacaatatccaacacctggtctactacatcagcaaaaggctcattgaagctgaaggtcagtacccattgatagaatatctcacttactgcctaattctatcaacgagaaatctaaggccctacttccaggctcatcctgttcgggtatacactgaccaaccattacgccaagtactgcaaaaaccggacacctttggatggttgctcgaatgggcagtggagttgggccagtatgaaattatttttcaaccccgaacaacgattaaagttcaagctttagcggattttgtggttgaatttaaagaaaagagcacttcaaaaaaacaacccagagccagtacaaataccttagctgagcaataatgaagacaagcaaacttggaagctacatgtggacgagtcagctacggatcagctgtccgacgcaggaatcgccattgtcacacctaggggcaacacctgcacgttgtggtcaaattcggatttaaggcatcaaacaatgaagctgaatatgaagctcttatcgtcggcctaagacttgcttgggagatgaaagccgaacacaatgagatctgcaatgactcactgttaatggtaaatcatgtattcggagagtacgaggctcggggagagaagatgatagcaaatctgagaaaaatacatgatttgctcgcgcaatttaaaagctatgctctcaagaaaattcaagggaagaaaacacaactgctgatgcattacctcgacttgctagcagcaacataaatggtaaagcaaatctgattcgtatctagtttctcgaaaaacctagtatcaccggcacggaagaggttgaaatgattgatacatccccaaactggatgacgccaatagcggcctacctcaacactggggaactcccaaataatagaaatgaagcttggaaaattaggagaaaggttgcaaggtacatcattgtagaaggagttatgtatagaagaggattctctgtgccgttactcaggtgttttgcacaagaagaagttgcacgacttttgtcaaaagtacacgatagattttgtggcaaccacgcagccgggtagagtttatcaaagaaaattctaaggcaaggttatttttggccaaccatgattgaagaatccaaggcctacattaagaaatgtgataaatgctagagattttcagagatacctcgggcactgcccaatgaactaactcagatgcaaagtcnnnnnnnnnttgccatttggggaattgacctaatcggacagttacccaaaggccaaggcggagtgcaatacgcagtggttgcagttgattattttaccaagtggacggaagccgagccattggcaaccatcacatccaaaaaagtgcaagacttcattgtaaagaacataatttgccagttcagattaccatataagatagtctcagacaatggtaaaaaatttgacagtcaatccttcacggatttctgtgcgaaccatgggatcataaaaagtttctccgcagtggcacataccctaaagaagaaacttgaagatgctaaaggaacatggccggaggaacttcctgaagtattatagtcataccacacaactgagaaaacagcgaccggacagactccatttgccatgacatatggatatgaagctatgttacccgtagaactcgaaccaccgtcccacagaagattaacatatagccaagaggccaatcatgtactcctagcagaggcacttgatgaagttgaagagaaacaaaccgtagcaaacttgaaactgatagcccatcagcagaaagtagctcggtattttaacaaacaagtgagagcacagaaattctttgtgggaga

SEQ ID NO: 29317 - DNA, 2131 bp, Cannabis sativa
  modified_base (424)..(428): a, c, t, g, unknown or other
ttgtaaatattagagtaatttgcgacataaatacttaagtttaactttcagttgtaaataaatacctagctttatttaatttttggcggtgataatatctaagttatatttcaggaactctgtaagtaactaactattaaatgttaaacattatatccacgtgtcattttcttattggtatatttgaactaatttttttttaaaataataaaaatttaatgacttggaccaattagaaattgccacgtggtaatttatttaaccaggtacctacagaagttctaaaattataacttagatagtactaccgccaaaaattaaacttaagtatttatgccacaaattactttaaatattaacataaaatatatatatatatagaactcgacctacaacatcaaactttaatatatatatatatatnnnnntatatatatatatattacctggtggccaacatcccaaataatcttatctttgggagtgttgaaaacatggtgaagtgctattgtgagctcaaccacacccaagcttgaactcaaatgccctcctgttttggacacactgtatactatttcctctcttaattcatcagctaaaatcccaagcttctgttttatgtatatatatatatatataaacaattaatgtactatactcaatcaaataaagaaaaatcaaactatatattatttattatatttacctcaatggaaagatttttcatatgaattgggtagtttatagtgtcaagaattggagtagaaggtttttctccagaaaaattaagaaccttactattttgggtatcttttaataaggttattttatgatgatgatcaccaatatcctctgataaggttctgtctagagaagcagaaatcatcatcaccccattattcatctgaaaaaaataccacaaattatatgttagaagaaatttattggtaattatttattaaggaattttataatgtatttactacaatatatattaggatttgtttgatggtattgtataatattataattagtactaaatataatattataatacaatatgatgtaatacagtgtacaaaaccgaaccagtttatagattattgttattactactaattaattttaccttttggtggtttgtagtagagagaaaactagttattgggatgaaactagttcttagcaaagaactcattttctcttttcttctttcaaatttatattaatttagagttaaaatgggaactaataaagcttatttaaaagagagcaataagaagaagagaggaaaaaatgttgaaagtttatgtttgattaatataagaagtatagtacttatagagcttggaagagtagtagtatttatagcaaaatagttatgtggtaaaggagagtacttttcaaaatataagcttcgaagtttccacaaattttcaaaataacaataaaaacaaaaatcacgtttttgtttatttgttatttattttgaggtggtaattggagacattaatgatgtcaacaataatgaattatattcataaaatgtacacatcaactctttatagtttctcccctttgccaaaaaaaaaaaaaaatgtataattaggatataagtacaagaagttttaaatttatatttaacagaataactattttaaatgacataaatacttaagttagtaaaaatgtaaattttatgtaattttatcagtacatattctttttttaatttatcaaatataaagatttggaagtagctgatactatatatttccgtttagatccaataatttagaatatgggtcttagatgtgtcatgtttaagacactaacagagtatgtactatgtactaatgaaactaaacataaataattacagttttacaaatattgagtatttatgttactaaaaaattattaaatttatgccgctatataccgcaaaacaaaaacttttagtgtttcccaccatttttagtaagagaaatgatataggcaaaaattacacataaaaactgagagataattttctaatagaaattatacttattatgggattttaaaagttcttatgttaaatatgatacttttaagtttgaccaatttatatggtatttttttgttttta

SEQ ID NO: 29318 - DNA, 2793 bp, Cannabis sativa
  modified_base (1269)..(1272): a, c, t, g, unknown or other
ttagattagtatgtagtttattttacttcaggatataaaaatatagcaagaaattaaaaaattaatcatgccacataaaattaaatatacctacattaaatgggatagaactttggaagaggagctgccatatttacatgaggtgcatacaattcttgctgaggagggtcgtcatacggtgcctgatgagtagcttctcttcgtgcatgtcccccctgttcaggtggtctcttaagtcggactatcttctttggttcaaatggtcccggaggtccgaattcttggtgtcatgagggagatgacgagggtgatcctcgtaatatggaggtggagcattatattaaagttagtcccacattgctaatgtatagaaataaattgctatatataagatgaatgagctactcctttcattgccaattagttttgagatggaacatcattcatcttatcctcaaattctaatacggtatcagagctacttgtgatttgttgtaagcccaaatgtcacggggtccaaatagtcgtttgtgattcgttgtaagccaaagtgctactagtcaaaaaagatacttctgctatctcccgtttaaaaaggaatctttcggccaatgtgtgccagtttctagggttggggtctttgacctattttaaaattcacatatttctcgatgtgtacacccacaaatttctcgatatttggccttgtggaattctatcaaatatcacgttcgaccatgtggtctcttaaagatcgttcgttatacccacactttctacgcccaaacgacagcataatttttcaaatcactaaatagaatttgtgattttggctgtccatttaaaagaaaatataactaaatttatgatcaatttttttttatccttaaatatattaaaattaaaaaataatatttcatagtaagttataaatattttaactatttttccattgatatctaatttatttatatcatttcatgatacaagggcaacttttctactggcatggatgtttacccaagggcaagttgctctaagaattaaattatttattttgtgcaaaaattatttagcttagaaacatttaatttaagggattatttcacaaatacaccaaaataataaaaaaaaattacaaaaatacagatgtacagaattttaaatatttttatgatttttttatgattttatttacagaaaatataatcttttgatgtatttttatgttgtactcttgttaattgttgttgattttttattatttgnnnnttattttttgttgttattttaatattatttttatatagttttcttgttatttttgtattgcttttatagaacaccgtaaatatatatatataaataagtagtgttttatgtaattatcctttaataatttaatctaattatgtgataattttcagatttggtgtataagttagtaaagatgataacaagcccaaatagaaatggtccaaatattatccatttcttcatgcttttctctctccaattaaagcacttttcaagcccacgttcaaagcccaactttcacgtggatccaaatcgatcaataacaattatgatgttagggataaattgaagaatacctctttttctatctattaatcaaaaatattttcatattatattttattaaaatatatctactttttatgagtggattgtccaatatactcttactctgtacttaagtctaagcatgtaatttacattaacctaaggagtttaatagaaatatcatttataaagtatgtatatcttaaaaaatatgaaaatgaaggtaaaaattaaaacaagtaaaataaaatgggtatacaatgtaatttcttcatgatgttttgtatagtttggtgtattaattggtttgtttgtgatattacgttacattaagcttgtgttgtgttgttccaattcgtatcaaattatgtgtaaggatctcagatgttcagcctggtaagagactttttattaactttaaatatcatcaagcccggccctggacataagcaggctaggcttgtacttagggctcacttagcctaaggacccaaaaaaaattattctcttttaaaattacatatatttttttttttttactaattttggaaaatattatatttttttaaataaaggcctaaaaatatttttttgtatgacccactaaacttcaaagtcggcctgaaaagcgaagaatcattgtataatatttgattctattcctttcttaacaagtggaacccatataaagtaagaaagaaaggatatagaatgatattttattttcatgtaatttttattaattacaaataaaaaacaactatttccttaaaaaattatattttcttaatttagtgaaattagaacattttgattactaaaataaaattattttgatttctttttaagtcaatttaataatagaaaaaatataataaaatattaatttcaattattttatattttagatttatttattttttttattaatttattttaattccgattacaagttaattagtaaaagtgtattatggttgttcaacacaacacatcctcacaattttcaattaagcactaattaaggagtctcttcttgttgacttaatgtatcaaaattctcaagatcaaataataaattacctaattaccaaaagaaaaaaaataataaattacctgattaaaaagatttacttaagctagtaaataccaatgaacactcatacaaattccaaatttgacacaatttccattacaggaaatatatgc

SEQ ID NO: 29319 - DNA, 4866 bp, Cannabis sativa
  modified_base (4803)..(4806): a, c, t, g, unknown or other
agagtaaaaggaacgacaaatttgagggaaaaaactatctattagattgatagagagaatttgtactctatatctagattaccattcataataagatgggctcgtggagtatgtaaactttaactacaaaaccatgtaaaaatatctggcgttcatttattgttatcattaactctatagtatatttattacgtaaaatgttcatatatttggttaacaaaaatctgcattaacagttggtgctttcgttgagagtctttgtaataaaaaaactcaaaaaataccctcctcctaaacacaattacaaacttatatctatggcgaataataccccttgaaacgaagaaaattatccataggagactacctatcaccctggaaaagaacctcgaggatcacaaagaaccaacacaattgaaacccattgtactgagagaaacgatggaaacttcaatccaactggtgaacagatcccatagaggcgaagtgaagacgcctatgatcccaccagatatgtcccactagtggaattagaaaataagcaatttcgacaatgcctggctgaatcacatcgaagaaatgctgagttggaacgagaggttgcggcagccagggttgcacaggaaaatagtcctcaaactcaacctgatccatttgtaaggcgaccacggggaagaccctgaggttccaggactaggaggcaagaaaatgttcaagggaatcccacaaatacacaggaagaacaacctgtgaatacaagggatatcccaatgggtagagagaaccaaccaaatgcaagcaacacaagaaattaagagcattgacatgatagtttaggaactttccaggattcgcaaactagagaaatgaacaacctgatatatcataatcatctcgcatgaatgtaaatgcaaggcagtcacgaatagggaactaggaaatccctcggcatgatgtgaaaaatcctataaatcaacctgggtcaggtcaacccccgaggcatccacaaaggccttctcgcacagacatagaaaatacacatacatacctaagtaggggttgtgtatcgaatctcttccagagaagaatgccaatgcgatatgagtcacgtgaagctagttcaagtacaggggagtcaagatctcacgggcacagtaggtcaactgggactcatagacaaacgtgagacaggaataggtcacaatattattttatagatcaagaaagtatgagtaactcgcgtggttaccaatttgaaagttactcagggactagatccgtgagtaattacaaccagagacgtcatgaacctgacctctgtgaacgattaaatcgaaggcagccagacctacatgaacatttaaatcgtaatgcacccgatttgcgtaaccaacttaatcaaaatgcaaatcaatagcctatggatcccattcagttgcgagtaatacaattggaagactagttcaaaaaataccaggatggagagtatggaaaactaccaaggtataactcagatgaagaaatgaaaccattccaccctagtatcctgaactcacaattttcttaaggatttacaaattcacacgtcttgcaatatgatggtcacggtaccactgatcttgtcgcccacttgaaattttttaacaccataatacgagcaagtaacatttcaaacaacttgcgatgcatattgttttcgacttcattaacaagggcagcaagtagttggtttgacaagtttaccaaccattccataacttcttggaagtaattgtcaaaagatttcaaaaaatagtttcaagctacgagagatcgtccaaaatcatcttcattgaataatgttaagcaacaaccaggagaatcccttaaggcgtacttaagtcgttttactacagttgtagccaaagtcaaaaatttgaatgacaatatttaattaacatcccttcaggctggaattacaactaacttggcaatcgcagggggagagttatgggatgatttgcaaggacgtcctataagaaatataaacaaattgaatgaaagagtgcagagttttgtgcaaaaagaagaggcacaaaatgaaatctagctgttaaagtcaggctcgggagataaacccagcactagtacaacaacagtgagcactgtgaccactaaaatggaaactccaaatggttagaataccaagaggaaggacgagtcaagagactcatccaaggataagaaaaagcaaaagaaacataaaaagtatgttcctatttattcagtatatactgtattaaatgagactcgctagaatatttacctcgctaatgaaaattgggccgcatttcgcaaatcagacccaatgagacacgcgaggaataagcaagatcccaataagtattgtcgtttccacagagacattgggcatacaactagagagtgccatcatttaaaagatgaaatcgaaagcctaatctcgtgaggatatttcaggcagtatgtgaggacacaaggaaatgaacataaccagcctaataaccctaataacccaatgacacaacctccccctgtagagggtgatgatatcttagttatttctagagggtcacacctcgcaggaaatagtaatagtgcacaaaagagatatattaacgatgttaagaatgaggcatcaacattttctctagaacctctgaaaagggaaaaatcaaaagaaccgcccattattatttttttttttgatgaagacgctttacatgtacgatacccacatgcagaccctctggtgataacagtgcaactcgcgaataagaggataaagagggttctcgtggataatgaaagatctctcaacattctttataaggagacattaaagaagatgggactagagaaagcaaaattaagaccttgtatggtaaacttgtgtgggttcacaggtgacagtgtcacaagtttaggcataatttaacttcctttaaccatgggggaaccaccattgtccgcgactcaaatgcaagaattcttagtcatcgacattccctctgtttacaatgtgttgatggatcgtccatcgttaataggattgggggcaataagctcgattaagtatttgtccctaaattccccactcaccctggaataggaactcttagaggcgaccaactattagctcgagaatgatatatggtggaactaaaaaatagaagggctaatcatcagctgatggtgattttgacataagagaatgaaatggaaattaaagatctggatcctaagatccatgatgataataaccaactcaagccaattgaggagttggaagaggtgagtttagaccctaataatcccattaagtgtgttaatatcgagaaaagtttgggggagaactaaaatatcaactaattacctttttgaaggcaaaccaagatcagttttcttggagccatttagatatggtcgggataaacctgaatgtgattttccatcacctcaatattgatcctaatcatcttggaaaataaaagaagaggttgataagttataaaccaacttcatacgagaagctttttatccctcgtggatatcaaatccagtactcgtactaaaaccaaatggaacatggagtggcactttccctgtggtcttttccttcacatagaaaaaattagaatgaaactccattagcacattattattagccgtgagtttagacacactaattaagttttttgctatatcaggtacatgtaacaactcctttagaatcagaggtttgagagagagagagagagggggctaagacaaagagccattatgagcaataaatagtgagttaccatatcctattatcaatctttccttaccaccatatggagtgtgtttagtcagctggttagaatctgtagtgaggtggttgttggctccactatctgttaataagatctcatgatcaatgacttccaatgttgtgacaaaggcacttgggtggccatatcctgattgaggttgtgaaggtggtttgttacgagggtcactttccatgaatgtttcatcgtaatgattatagcggacaacaactaaatgaccatatttcccataaacctagcatgtgaggcgaccattgttgttagaagatcttcctcctttcccacaagatctgttaccacctccacgatagcctccttaccctactcggtgagcatttgaagaagaatttgactgcctttctggatggtttggttgtggtgaggccttgtctgtaaggttcgctgaaagagcaacaacatctttgagtagtttggtgttggagttgtgagtgcttagatgctcaagccgactaacgaaactaagcaggtcatcttgaagctccaaccgaggcaccactaggctcgatttgaaccacaatagtgaggtgtttttgaccaagaccattcaaaacattagttagtaagtgtgactcgggataaggaccacctactatggcgagggtatctacccaagtgcgcatctgtcgatgataggcggacatggtcatattatccttatgagttatctgtaaccaagttcgagtatcttcaacttttgcttttgagtatgctccatagagtgtctcaagagcacactagagattgcaggcagaggtacatcccattacttcgaatgcaatggctttgattcgtaaagcctacccatgagaagctggtcattgattatctagacttcgtaatttggattagggtaaagttcaaaggagggtgtaccatcatttgttgaaatggctactggtatgtgttgactttgcttttagccaacgannnngagtctattttataagcgataaacgatatgtagtatcaaatatataataaagcaatagta

SEQ ID NO: 29320 - DNA, 3143 bp, Cannabis sativa
gtacataaacaatcactgaaacagtaaaatttaatgaaattagaaaaagtcctcaatctaataatctcaatagttcagggagaatttttaacgaccaaaaaaaatcatgaggtatgatttaatatgtgtcaaaattgacggggaaaaattgttaattagcttttctttattttgcttgctttggttccttagttctattgtaatggtttctcttttcatgtgtttgtcttgtgtttttgttgttatttgtttcttttacttggccatccgttgtcattaaggctttatgagagagcattgtgtgttagacttaatctgtgttatttatgaataaaattttaagaaaaattaaaaaatattattggtacttagcctttttttaaggtgttatattattgttgtctcgtataatataataatttttaatgaatattatcagttaattatagagtgtgacctctaaaatagtgactagtagcaattttatgaaagtacttaataattagaagaaaaataattgaagcagtagtagttatatataccagcaattttctagtaaccccaccgttgacatctgcctttaacacgttgtaagtaatgtagcaacttttctttcctagtattttttggaagctgtaatattctagtaactttatacccaaaacattagattttttttttttttttggaacaaccaaatcattacataatttcaactgaaatcatacaaatattaatattttacaatattttagttctccactttgaccaaaacaattaacaaactgattttttctttctagaaacaaaaattaaaaattaaaatgtatatcatgagggaaaataactatagaaagataaaagagaacgtatcttcagctttgaataagtaatacaactttgaagaaattaaagaaagaggaatggaagtggtctaatagcactatacttagaaaacgatattaattaattagaattaaaaagacagaaaacctattgaatgcacggttagaaaatctacatacgcattaaaaaattgtcttatgattaaaaaattgtcttatgattaatcaattttataaaatagaatagtgtaaatttctcataaaataagttcggcgtggatggtgatgattttttttattttcttttttgtgaaatggatggcaataatttaataataatgatggaaaatgatacccagttaattacttttaattgggtgaaaaaactagtatactgaagtaactattatcaaattataaataaataaaaaattattgctattaagtatcagtagtgtttaatacaacttaaatataatgtcttatgattaactagaaaatataggcactcttaggccggttaatttaattatttactattataataaaatataactatttattaatataataaataaataaataaaagttattttaatatataataatattaaaattataacgcctaattacatattattattaattattttatttattaaaaataaaactcaattaaataagagaaaataaattatgtctattcacaataatattaattattattatttggaggattgttaaaaaatttattagtgtgttctattatttacctatttattaagaaaatttaagtttttactaacgtatatatatagaattttaaattgttttgttaaaataataattataaaaataagtataaataaagtaacactacaaaagaaatcttacttttagtcacaataaaacttgtgattaaaagtaaaaaaaattataactaattataaatcattatttctatgttgttgtaactaaaatatctgtgactaaaagtattagtaacaaaaatcacaatttgttgtgactaaatgtatttttagtcacaatacttattgtgagtaaaactaaattagtaacaacttgtatttaaatactatattttaatcacaagtgacttgttattgtgactaaaagtcacatatagtcaacaaaaattatgttgtcactaaaggtttgtagtgtaggaaaaaattagaatgtttcctataaatataatacattatttttatatctgatcattcaacacaatatctcaccctcgttgtctcactatatctcacctataattattattgtatcttacccattgtcttatccattgtctcaaattgtaaattattatatttttaattcttgaaactatatgtattttttttttaaaaaaaaataatagactaattaggttatttatcataaaccgttctatatatcaactaaaattaaaatatcaatattatttttaatttttttttaataaattaaaattttatttatatatagtttaaaatattaatttttttccttttgtttttgacgtaacttaacaaactaatattgcaatcttcttttgttattactaaatagatattttgtgccaaaaccacgaataattagttttagtttaggtgaagttttgaaattgtaaacaaagattgtaatgtgtaaatagtttttttttttaaaaaaaataataataataattcttaagttttgataattacgaaaacattgtacaaaatttgtaaaacataaaggaaacattgtaaagataaacttttaagaaaaaacaactaaaagaaatattatggagttaactctaataatatataattcggtggataaaattaaatattattgtaacaaaaatcaaatagaattgataattaccgatcttctaattaaacaataattattagaaagaataattaactcaaattttactttgctcatgccaaaacttcctttatcacagccgatagtctgctcatgccagaactattgtatttacgggcttatggcattacacatcagtaactaaaatcttcaaatattctaagttaggtgtaggcataattcgacttggtataaagaaaagtgaattcgaatacttacatgtcaataggggtgagcataaaatccaaaaaactaaaaaaattgttcaaactaacctaccgaacactgttgaaaccaaaaccgacaaaactgaaaaccaaaaaaactgcatgttggaaagtattttaccaggatcttagatctactcacaagtatgtcgattaacaccctaaatatgaactt

SEQ ID NO: 29321 - DNA, 1359 bp, Cannabis sativa
agatgtatgatataatataaatataagggtagaatcacatagaagcgacatatatattaattatggcatatatttatattaaaaaatgatattcatacataaatattagtatggtgaaattattaaactagattgtatatatatgattaaggtgaaagattcaaatctcaccaagagcattttttttacttttgcatatacatttaagtttttggtgagattcgaacccttgacctctctcatatatgcaatctagattaaccattacaccaaactaatattatgtccataaatatcatttttttattataaatatattgtcctacttaactataatgcatatacatttttctcattttttttttcagggcgcggttgtccctcctctagaggtgttcataaaatagtcaattcacacgatctaatccaatccataaagtgcagatatccacacttgtgaggattggattggattgaaaaatccaaaatttacacttgggcgaattgaatgttgattgacataaaaaatgtaatcgatctaattcaatccacacatatgcaatctagcttaaccattacactaaactaatattatgcctataaatatcatcttttattataaatatatgtcataaccagctataatgcatagacatttttcaattcttttttcaggggcctcctctaggggtattcataaaatagtcatttcgcacgatttaatccaatctaatccacaaagtgcagatacttgtgcagaattggattggaaaatctaaaattcgcatttgtgtggattgattgttgattgatatgtaaaagtaatcgttctaatccaatccacatatatttaaataattttttttaaaaaatatataaaattactattttaatgtaaaaaaattagtaattataaaattacaaatgtaaccctctaaattgattaatctgttattaattaaccaattgatgaaaattagatagatattggagaatttccatgtatactgtattttctttatttattttttttcattttacgttttttatttattttttaattttttaaaagctatttccatttcaaggttatgctgtttctatttcgaggttatactatttttatttgagaggtaatgttgtttgtatttaaaattatattattttcatttttataaatgaataaaaaatcaattacaaaagtattaataaaaataccccatacttatattatatatttttcttttgatttaaaaagaaaataattagatctaaattgacattattggcaaatgcccatccgaaatgatatatatatatatatatatatatagaatacttcttaatgggtaataccca

SEQ ID NO: 29322 - DNA, 5656 bp, Cannabis sativa
aagatttgttgattgcttccactttgataacgtctcttacttattcccaagtttgagtgtgggtgacaaagcatgtcacagtcaaactctcacacaggaaccaggaaccattgggaggtgttgccttgtgatcatcaaattattaacctgataaattgtacgtaggaaggtagtcgacgccagagccgttgactcttcgatgcttaagttagtagagtgattaagataaaagaaattgaaaaagcgtcaagtgtcgaatacattacagattctttgttgttacctagcttcctgatgatttgatttgagtctgatagtatactgagcccatggattatgcacttatgattaggaatgaccgctagtttgtcaattataggtttcgaaggattgcctcatctgtgtgattgcggtgtagatggcatagccgtcgactatttgatgcttaagttagtatattattcatagaaaatgtaataaaaaaaaaggttgagttagaaatgatactattttagttgtgaatggcattccagttgttgcctatttctccaccatcttctgcttgaagttgatatgccccttgtcctattactttagtaatcttataggagccttcccaattgggacccaacttaccaactcttgcctctttggtgttttgaaatacttgacggagcacccaatcaccctccttgaatgtttgtgcttagataaaaaatgtttaacaacctttggttggtatgctgcgactctgaccaaggcttgctctctcttttcatcaagtgagtcgagctcgtgattcatactttgctagttttgatcatcagtcaaatgatcatacctagaggtgggaattcctatctctgttgggatgacagcttatgttccaaaggtgagagagaaaggggtttcaccagtggaggtttttgcaataatgcgataagaccacaaaacaccaggaaattcatctgcccaccttcctttggctttctctaacctctttttcaatgtgttgacaacaatcttgtttgtcaattctgcttgaccgttggcttgcggatgtcttcgggtcgagaatgagagttggattccccattctttgcaaaaaatttggaactctaaacttacaaattgtgagccattatctgtgactacctcctttggcacttcaaaccttcatattatgtttttccaaacaaaattcttaacttcgagatctcttacttttgcaaatgcttctacctcaacccacttagtaaaatagtctgtcaacactagcatgaagactcgttgtcctcgagcggtcggcatcttccctactatgtccatcccccacttcatgaaaggccaatgtgctagagttgaatgaagcttttctgatggcatatgtgaaacttgggcaaaccgtggcatttatcgcatttctgcacaaagttgagtgcagcggctctcatggttggccaatagtaactggtagtaagtgccttattgttgagacttcttgaacctcagtggttgccacactaaccttcatgtaattctgtaagaacataatgagcctctattggattaagacactaagtaaggacttggagtatgaccgtttgtacaacatgctgccataaagagtgaaccttgctaccttggttctgatcttttgagattgactcctatcttgcgggagtgtgccatcaactagatactgacttatgggtgtcatccagctaatgttctttgacacatccttgacttcttcttgaggcttccaaactgtcagccattgcatgtagacgattggaactaggacaccactctttgcttgaattgttgaccctgggtttgcaagtgcatttgcatgactatttatccttggtacttgattgattgatattttagtaaagctcaaaagtctttctttaacagcttggaggtacgtcaccatctttgagtccttggcctagtatgtgccattgaattgattgactatgagttgcgaatctgacatgatctcaagagttttgatattcatctctttggcgaggtcaagcctagcaaggagcacttcatactcagtttcattatttgttaccttgaagtcacacttgattgctcgttggatgacatctccttggggtgagttgagaacaatgcctaagccacatcctctgttgttgcttgagccatctactgataacctccacttagagtcagattgctctttcaagcacagcaactctttttctacttgtacatgcatgtctggaaatgtcagcaataaagtcaactaatacctaagatttgatagttgtccttggtttggaatgtgatgtcatattcactaagttctactacccacttggtgagtcttcttaaaagctctggcttgtgtaggatgctgcgaagtggaaattgtgtcaacacaataatagggtggcattgaaaatatggtctgagtttgcgtttgtgataagtgctagtgttagtttctcaagttggttgtatcttgtttctccatctagaagagtctttaagacatagtagatgggttgctgccttccttcctcttctctgattagcacagcactgactatcatttcagagactggtaggtatatgtagagtgcttctccatccttaggttttgctaaaagcagatgtaaggcaagatattctttaagttgtctaagtgcatttcacattcctctgtccacttaaagtcctttgtttttctcagcactgagaagaacaagtggcaatgttcagaagattttgaaataaaatgactaagttctgctatcctcccagtaaggcattgaacgtccttgattgattttggtcattgaatttttgataaggagcatatttgatctgggtttgctttgactcctcactttgtcacgaagtaccctaaaaatttacctgaggaaacactaaaagaacacttggcagggttgagtttcatattatatttttcaagtacctgaaatgactgttcaagatgattaaggtggtctactgttgctagcgatttgacgagcatgtcatcaatatatacttccattgacttccctagcatgtctacgaacatctgatttaccaatctctgatatgttgcattggcgttcattagtccaaacaacatgaccttataatagaaggtccctcattctatgatgaatgatgtcttctcttaatcatctcggtgcataaagatctggttgtacccaaaaaaatcatcaatgaagctaaggagttcatgcccagacgtagcatcaacaagcatgttgatgtgagggagcaagaatgaacctttggggcatgccttattgaggtctgtgaagtcattgtaatcctccactttccattcttttttcggacgacaactacattggccaacaattctggatagttgacctctctaactgatccaatgtcgatgagcttttgaatttcttcattgatcactttgttacgtttgggagcaaacttccttcttttctgcttgactggagggaaattcgggtctacctgcaacttatgcataacaatattaggttctatacctgtaatatctttgtgtgaccaagtaaagctgtcatgaagcctaatgagaaattcgatcaactttgcttgaagttccggtgtgagcttggcttcgatttatactttgtgctttgggaattccttgctaatgttcacttcatcaatttcctccattttaggctcatctggatcaatcattgcatttgactactgtagttacaataagtttgattatttttcttttagggtgctctgataacactctcgagctgctctttgtgcccctgatatctactttattcctaatggtgtaggaaatttgagaacttggtggtatgtggatggcacagctttcatctcatggatccatggtcggccaaggatggaattttatgaagaaggaaaatcaagaatgatgaacttggtttggaggtttactccttctacccaaacatgcaagttgacctctccaatcgagtgcttatgctcaccactgaacccgattaagactatagatttgcgagtgattgttgactcgtcaactttcatatccctgagagcattgagaaataaaatgttagcagaacttccattatggaccaatacacatttaataaatcagcttgcaatataatgaaatgactaaggcatcatggtgaaggtggagcaaatttatggcttcatcattgacaaagctaatggtatgtcgaacgactgtctctggctttctcagctttccttgactgttgattggttctcatgcatggtgtttagctgctgaatataattccactaacttttgatcctcttgagatcacattcacaatcctcgcattctgagggggttgaggtggactatcttgtcttttatccccttctgctatggttgctttgcctttatcacaaaggagatcttggagttgtcctcaacgaagtagccttgcaacttcaaacttgagtgttatacattcagctgtggtgtttctgtgatcgctatgaaattcacaccatttggtcatatctttcagagcttctggcttttgaatcttcccaagccacttgactttatttccaatgcctttcattacagcaaccacattaatagggtctattgttaaagtatactctggaattggtactttatcttgatagcctctaaacttttgggatgattttccccttttgtggtaatcacatgattgttatggcggagctcttccactgccttgaaatgatctagatctgttggtggggtacgattcaacttgataagatgacttgcactctactcatcttggaccgtgattctcacgagaggttaagtagttagagatcagttgcatgttcgattcatcttcctcccatttaatttgagcccatgcattggcaagcacatcctccatagtcatgcaagggtatttagttatttctttatatatgtcaggttctaccagaaggccttttcgaaaggttgtgacggctacgtccacattgtaggctgtaattgacaccttctcatcattgaaccttgctacatagtctctcagtgattcatcccttctctgtctaattctattgaggtcatctgatagcttctccagtttcttgctactagcaaattactctacaaaaatatcaattaattgagcaaaagaagcaatagaattattagaaaagtttgtataccactaaagggctgggccaactagactagacccaaaccctttacacatacatgcctcgcgtaactcgcgaggtattgcggcagtgaacatcctctacttgtagctagctatgtagttgggatcggtcgttccatcatacattttcgtcactaggagcacaaacttccttggcatttcgaccaaggtgatggcatcctctacttgtagctagctatgtggtcgttgggatcggtcgttccatcatacattttcgtcactaggaacacaaacttccttggcatttcgaccaaggtgatggcatctacaaagggtggatctacaaagctactaggtaggctcttttttattagagttggcactcctaggattatttggatcatggcctccatgccttccaattttcgtgcaattatttgttcaataaactc

SEQ ID NO: 29323 - DNA, 3440 bp, Cannabis sativa
  modified_base (823)..(825): a, c, t, g, unknown or other
ccagttagtatttaacagtaatatctaactaaaactttaaatttacaaagaaaaataaacttaagagggttttgccaccaaaaaaaaaaagaaagggattaagtgtataaaaactaaaatataaggaagttttgccacaaaaaaaaaatgaaggggttaactatataaaaattaaaacataaaggggtttcgccgcaaattactccaaaaaaaatatgatagtagactagatgagattaaattacctggcccaccagtgagagcacccggacaactccccccaagagtctgagatgagaggctgctatgtaagtttccatctcccttgacaagtctactgatcttccagccgcctcaagcggtttcgcagcctcttctgccttgcctagatcatcctcgcttgttgcactctctgaaacatactcagatatataaacaccgctagtttatatatatacatcaaatttttttgctgcagtataatggaccacaattctgtacgaaaacttcatttgcaacttcactatagaaatcaattgttatatcaggaacatcaacagaagaagcaaatgtcccaattctattagctttgtcgaatttagaaataaaaaaaggactttttattcaaaatctaaatggcattggtatgattggaccttagatggcgtttggttagaaggaatgaaaatataagaatgtaaatagaaatgggaataggaatggaataaaatttaaaatacataaaaaaaattaataaaaaaatcattaaatttttcctcttgttacattagaatggtctttccttcttttttaaaatggaatnnncattccaccaaaatgatggaaaaaacattccatcggaatgtcattttaatactttgctttccatttcattacctccaacccaacgccaccttaaagttgaaagctttccgttccaaacacacatcaataattggaacaacctgaacaaaacttagaatcagaaacaaaacagagaaatatgaaatttcggtaagccttaagatttatattatatatcacataagaattaaataaaataatggtgtctagttaggaataataaaaatataagaatagaaataggaataagaataaaaatagaataaaattttaaatgcataaaaaaaattgataaaaaattattaaattttttccaatcatgtagtataatggtctttacttctatttcaaaatggaatagccattccactaaaatagtggaaagaccattctattggaatgacattttaatactttaatatgcaactaaacaaaagaatagaatgaacattgtttcctttccatttcattacctcaaactaaatgccaccttaatcttttatgtacataggctgagttgtattagtattttaattctattcatccaattgtaattcttggtggcctaagagaccaacccaatcaaaagattgggaatttcgagaaacaagcctctcaaaagctcgatattgtaattttttccctgttttttagaataaaaatcactagagaaatttattacatagtatttattttgaaaaatagctaatagaatatttttactctaagattattctatcaaatttgtggaattttaaaagcaactaaccgataactagagctctaagttgggtaggagctcattttgggagacttgagatcctaaagaggaagggtggcagtagcgaaggctccacaattgcaatgactgttagaaatcaaaataactaaaaatacaaaatttaaatataatctagaatacaataataattaaaaataattaggtatacatacctgattgatctatggcaattaccttaaattgatagtttaatagatgaaacaatatgtatttatagagttagagataagatttagatacataattctagttggactgagtcaggacattataggattcaattaactagaaaagttaacacttatacttcaactaaattttatacacagtttataagcccattaactattgataactaacaatatagactaacataacaaagaatcatctaatcaactcatattttattaagaccaataaaagttaacgtaagacaaataaaatatcgaacatttttccacttggactacattaattttttttaatacatatatgttatatcaaaataattttctttaaaaacaattcatggattgaacaataggaaaacatttgtggccactttataaacaatagttctttaatagcatttcaacatactagtccaaatttaacttttaatatttatgataatcatattgtttttcaatcaacaaaagtcattcataataacaaatattaaagtattaaatcgacatggtcaataagtctaatagtgtgggaaaaaaatatgttcgacatgtgatcaataaaataatttaatttctatatcaatcctcaattttactgattatataatgcttaataaataagtcagtgaaattaaccatttactactaaataaataagtcaaggccactaaacatgtttaaaaaattaagccaacaaaatatcattgtccgtaagcaattaaatttaaaagacaacaatcacaacaagatatgaactacataatttcaactacatgttttcaatgcaatgattctcgagaatataacaacacacaattgaaaacataaacatccaataataaaaaattattagcccacaaaacaaaccaatcaattcataacatcaataagaaaattacatataaattaatctcaaataatataacaagaaactaccactaacccaacggaacaaaagattattaaatgttcatataaacaacatatttactaaacaacacgacacttaaccatgtggttagagaatctgctaacatcaacacaacatgtgaacaacaatattattatcacaatagattagtataggagagaaaatataatcaactagtcgtatttctaaaatcaaattctttaactacaaagcttgcaaagatgtcccataacatgcgaaaaactcggcatacatagtagatgatgtgattaaagtttgtttaacactttttcaagaattagttgtattagccaaagtgaaaatatagctagaaattgacttcaactcatctacacaaccaccaaaatctaaatcttaataataaacaactcggggatcgtcgacatgcttatacacaagcataaaactattccctctttgaaattattccatgactttcttggctgcaaaagcattgactacaaaagcactgttaggcaaaatgcaaacctgagcataaatcaaattccctactacacttacatatgtgatgttcatcattgtttttctttccaaatcgttcttaggacattgttgttcagtaaacttgttccccttcaaaataggaacaaactagccttccataaattca

SEQ ID NO: 29324 - DNA, 1493 bp, Cannabis sativa
gcggtgaatctcacatttaaagagcagaagcgcatgttcgctgaatggaaagacaaggagatggaaactttaagggctcagcaaacagccattgacgaccgaacccagcaggccaccgtgttgatacggacagcttaccaggctgctaggcaacaacctgcgaccatcatcccctgggcgagacagacgaagatccagcggtaaacacctcacagactataaacggtcagtcgtccaatccccggtcacaggtcccacctgtgggccaagcggtaggcgggcaaaccttgtctagcaatttttcaggagaggtgatacctaaaaattcgaactaggttaatggtggtggccagctcatgggccaaaccactagtcccttagacaggcgggtgtgtttctgtatttaatcgtttggggacagttcatgatctctgtgatgatctgaacagaaggaaaagggtggatgaccagcatgacgcaccaatcgttcagccagaaactgcgctgaaaatcccgctccaagagatgttgatgcaactttgatcgaccaagaggccaaacaagttagtccggatatgcaagcacagttggatgagctaaaaaaatatgttccaaggcctgggcggtcaaaggaacaacgatctcgagggaccgaggacgtggaaccccgttctcccccgagattaatatcctggaatttcccaacaagtttaagatgccaacctggaagatgtatgctgggaaggaagatcccttatcccacataaagtagtttgagatgcaaatggacctggaaggagtacaaggagatgtatgttgcagattttttcgtgccaccctctcagaagccgcccaacaatggtatttcaagttggtgcctagaaagttcaactcacggaaggctttctcctcagagttccatgcacaattctcctcctcttgccaacttccgttgcacctaggatatctggtcaaagtgaaacaaagaccaggagaacctctctgagcctacatcagcagactcatgacagaggcggctaaggttgcaagagttaccgaagacggaaagttgtccacgatactggggggcattgaagtccttggtgaaccttggaaggacatatggaagaatggaccagtagatttgaagtgtgactttcttgactaggttttattaagcttgaagaagccattcagcgagcagagggtgaataaaaacctagccagtcaaaagctccttctattgggacatccgtccagctcccccatcacccaagcaattcaagcacaggtggtaaacagtctagcaacaacaataggcaagggaatgggaaaaagggaaagttcactggcaagaccgaacaagttcccagggagaatccttccaagtatactacatttaccgtcctgacagaagatatagaaagtgtgtacatggctactcagtcattagccccgtacaagaagctcccacccatgaagaaatatgtcag

SEQ ID NO: 29325 - DNA, 1745 bp, Cannabis sativa
cgcataactctaagtgcaactactgtcttgcttgatctcccgcaaatgtagagattccaaaccaagtgctcctgaccaagtgctggtattcctagtcataaattctaagatttacaactatagggttaacccctatttccacattcacaaaacaaatatctagcatttaaatcacagatattcacatagagctctgaacgagatttccaacgatatatagaactccaaaaacagagtccggatcacaaagttatgaggattcaaataacacgtaaatatctgcccaaaaacaaagggcggggcgcggcaccccacatggggccgccgcaccttggctaaaatcccaggcctccaactggaggtgggccgcggcgcccaaggagctgggtcggggcccctgggttccaaacccaaaaaccaacttcgaattttcatgctcaaacacaccaaatcacacccaaagtttaatcaaaatctcaaactataaattaaaaacatcaatatacatactgagagttgaagcaccaaattatggctgaaaataacttcccataagcacaaatcatagtaaattactatacaaaactaagctcaacacttgagcaaaaatccaccatgaacacccacacaagagctagaactcaagaacaaatctcaacaataatttcagagctgcatagattaactagaaaaccattctaaactcaaaatttccttcaaattcacaacccaaaacaacctacaagcatagggtatcataaaaacactaataccaacacacatgcatttcaagagaacacaacacaatttcttgcttttccacacaaaaatatcagctataatttcaactaaaaaccattaaaaaaaagtacctcaattcccttcaaactcaagcacaaagccatcaaagcttgaaccaagaaaaacctcaccaattcaacaattaaaacaaagagataaagagagggagagagggttggttttgaggagaaagaaccagaaaaatgcctcctattttcattaaaatgctttttgttgaaatataactcatacatgcaaagttaccaaaatgctcataggccacataactctcatataaacatttcaagggtaatatatagtcatttccaatataaatatcctcaaataaattttagattattcacattattaatacaatgtcatcaaataatcgcagaattgtatttcggcccgaacccgattcggcccgaaataccagttgtgactataccgcgccaacttgtcaaaacatacctgaaaaaggacaaacgtgcatactatataataatatagtccataagcatgtaaataaattaaattcacagttttacccttcttgtgtaaaaattactaaaatacccctggctcatcaacggggtcttaacatgtcataactcatactatttcatatataataaattatataataatataattccataataatacacaattaactagttagggtttgctaatccattttcataatatttgggtattatagaaattttcccaaaatttacctgaacaacttcaaatatttctactgcatattcgtctcgagttcccaggttgcttcttccactattctgttgttccataatagttttactagtgtaattatcttgtttctgaagactttctcccttatatcaagtatttgcactggttgttcctcatatgataaatttggttgtagttccaatgcttcataactcaagata

SEQ ID NO: 29326 - DNA, 2101 bp, Cannabis sativa
tcaaattaataatatgcgaaataatttaatattaaaatacaccaataacaattctattaagctgcagtttacatattcaaaagttgcagtttacatattccaaagttggagaaacggtaggcgatcaattcattttattgggaagtaacagaaaattacatgtacacataaaaagaaataactgctgaatttggtttaccaattacatgagacctataccataatcttacatatccaaatatatcaaaagcagataacttgattcacataacgtaaactagaaagataattagaaagttaggtgccatatatgagttggtaaacaaaattcagcagacttaggtaccaacgtactactaagggatattaagctaaataaaacaacaatagagattacgacgtacgatgtcgctatgacccatatgcatataagataatagatcaatcccatattttctattattatgaactcttacagtacgtccaaagaggcaacaaacaggtgatgaggctttttcgaatagacaaagctcttaacatatatttatctatatatagttttttttttttttgaaaatatttatctatatatagttagtcatatagtgatagtactagctaccagaagaagttgctcaaaggagatggagactgagagtcctcaagatcatgggatggagaatgaacgtgtctcccctcgtatgtcgtgataaccatccttggatcctctgctaaccgctccacacgtttctttacgcgacagttatcctgcgtgcaacggtaatagcttctgcagaggatcaccattaatattcaatatatcattatgtatatatattataattataattactaaatatcatcatgcatgcaagccatatagctgggtataataaagagtttccatttattgattataattactaaaatcacagaaaagtcaagaatgatatgtttaaatatcgacacataacaactaacgtgcatgaaagttcctatatagacatgcaatatcacagtaggaactactatacatctacaacttccgatcaaattaaatgcagcacaatcactattacaattttgtagttttgcaaaaagaaaatgatcgttgcgagttttcatgtaatcccaattaagaaaactagctgaataaaaagaaaaaagtttatacattaaaagcaaataaaaagtaagttaaggcgctcccacatatagtcccatactcccatatcaaatcataaaagccataatcaaatcataaaagccataataatgacttgttgtgctagacaagttgtgcatatataaagggtaaagataaaaaaggacagattaaaattatgtcctacatgatcagacatatcatagaaggtaattattgggaatcttcaagatcaaataattaatttaaaagtaacttttgatggaaatgtacaagttactatattaacgagtgtctttaattaagtttcatttacaaattacatgagtagcagagtacatgaacaccccattaaaacaagcagactagctaatgagtatatagacaaaagacaattgtgcctagtgtaaaagttgatgtgatgaatccaaccacagtatataaattcactgtctacatatagaagattatgctactcgatcgatcacattatagaatcatcaagaaacatcaattcaataactcgtgtcttatattaattagccattattattattatagatatctggttaacaaattgaaattgatgcttatataaatttatgtggcttatattgtgtgagtaatttaaatgtgtgatgtctatgattactctaaaaaataatgttgactttgttaaatctattagtacgtacgtcaagcatatttaatgattgtgtataaatacatataaatcctaaatgtttcttattgttttttctatttagtaggagcaaaggagatcgagacaattgctcatgtatataacggataagaaaataagaactttaatttccaactttttgacttatatggctggaatagtaactatatatatcccaataattacagcaagagaacgcatgcatgaagccataataaaaatgtaagtatatt

SEQ ID NO: 29327 - DNA, 1998 bp, Cannabis sativa
catctccgaggacacttcacggttccggtacacctaccgaggaggttaccggtcggctattcgattagcacgtgtggtttcggagactgtggcgctgaaccactcggacgtgaggtggtacgtgtttggtgacgatgacactgttttctttcctgagaatttggtgaagagtctttccaagtatgatgatgggctttggtactacgtagggactaactctgaaatttatgagcagaacatcatgtttggatttgatatggcttttagtggggctggttttgctataagccattctctagctaaagttttggccaaggtttttgactcttgcattgagagatacccacacctttatggtagtgattctagaatattttcttgcatagctgagcttggcgttgggctaactcgagagcctggcttccatcaggtatattatattgatattcgatttatttattcttaggctaaatatgaattttatctcccgaaataactttgacatatgtactaaattatgctttctgaatttctaaggtcgttaaaaatgcctcctgaactaaaagtctaacacatataaaggttcagggggacataatttagtagatattaaaatttgggaagaataatttaatacataaacaatctttgaaaatagtaaaattgaattaaattaattatataaaagtttttaaatctaacaatctcaatagttcagaggaatttttaacggccagaaaagtttaaaagacataatttagtacatattaaaatttgagggaaaaaaatcctattaaaacaacaaaaacatattcattagtagctaggtgtaccttatatttattaaagaataatatatttttggaaacacagatggacatacgaggagatatatttggtttattggctacacatccagttagtcccttgttatcattacaccatttggataaaacagatcccatcttcccaaacatgtcaactcctcatgaagctctaaaacacttattcaaagccacagaggtcgattcccagaggcttttacagcaaacaatctgctacgacatatggtattcatggacaatcgtagtctcttggggttacgccgttcaaatctacccatcacatatgtttctgccggaggctcttcatgctccggagactttccgcccctggaaaatcaaccggaataataattctcctctttcggggctttatactttcaccacgaaacaacttaaccccgacacgtgtcgaagacccaccatcttctttcttgatgacgtgtcatcttcaggtagggacgatggtgaagaaatcatgagtatgtacaggcaagcctttgtgaattgctcagtctatcctggttcgcccagaaaattgagggaggtcagagtcttctcccataagttggaccttgatatcaaccaggtaatttattaattcttcttaatttattaattattcatttttctatgcgtttataaatgtattatgggagatttcagcaacattcttgtctttatttttttttttgacccaacattttgtctttattattttaaagttatattaattttgtaagggttgtttttttttttatttaagcgtttatatattacatcagcataacctgagactcgaacccaggacctccaatacacacgcaccccctatggccacttgagctagcctcaaatggttttgtaagggttagtgtgaattgttggtatatttcgttataaaatgtatttcttttttattatataatatattattattcgatgatatatatttttttaaggtaaatatcattttgaatcttgtgttttgcgaaagttattgattggacgttgtgttttgttaaatgacaaaatagaccctatattttaaaaaatggtaaaaataagagtttgagcttaatttttgacaattttttttttataatatacctaacttgaagataattcctaatacaaacagatacagaaaatgtaa

SEQ ID NO: 29328 - DNA, 987 bp, Cannabis sativa
gacttctccatgggaaccttagatgagcccatgggatgagtgagggcaaaggtggcccaaacttctcatggcagagatgttgctaggtcatctctgcctcctccaccaaggcctggacttgctaggcagcctgtgatacagcctacgggacagggtgctcagaggcccgatcgaggagcaggctcaactgcggggtagagggttgtgggggcagcccacatatgcatagagagagattttcatttcatggatgaggagctcaaggagcttggtgatggcgagccagatatgctctactctactggccttcgagatcttttttctagtaagttttatttttagctttgttcatctttctggcactgtataagctagccaaccaagggacttattacatgtggctggctgaccatggatgtatttatgagggactatccggccatatcagtcacaaagaggggctagttgaccagtttgtagtttgatactaattttgtcttgttttgcttttaggtcttgatgaagttgagctctgtatgcgatagctcccaggggtccttagatgttcttcgggagtaggtgaagaccatggaggtttcctttctggcgaaggacaaagccatgtttgagatggaggctctccttgtggaaagacagagcatgatttttggcttagagaccatgctgggcacctgaaacaaggagaacaccacacaagctgcctttatctctaggatggagtctaaactagcagggcatggggagagactgagagcagctcttgatggccagcaggccataaaggaggagtatgctgacttgtcctccgaactcacctatgagttcaagctacgtaattccagaactaatctgtcatacatgggcaatgaggctttagtggagaacaagttggcctgagaaaaggtgctctttgagagccagttgggagcagactagactaatgcctattgagaggggtcatcatta

SEQ ID NO: 29329 - DNA, 1498 bp, Cannabis sativa
  modified_base (748)..(750): a, c, t, g, unknown or other
  modified_base (952)..(954): a, c, t, g, unknown or other
tgtaatttttggtgttgtggttggagtagaaataatttttgacaccaaatttggtgatagtgtaacaccaaatttagtgtctctttggagatgctctaacacttgcaacctgattggctaaataaaaaaattccaagaattgtggaaattctagaatgatctcataacagctcatagtaggcaaataatgttttcacatctcccttatttttaacaaaatatgaaaatgtgaaagaataaaatattacaacatatcatacaacctcttaaaatgattgacaatcacaaaaaggcatagtaaaaattaatgggattccattttctacacctctttttatgtaaaataaaaaacgtttgtctgtaccgtaattccataaaataaattgcatgaatttgacaaacatgatgaggcatctttaagaaaatattatgtattattttaatgtaggttatataaaattaattatgatcaccatatgcataataaaattgcataaattatatacaatttactaatatatattggtgtagagagggctgggtatgggtatcacacgtggtaaatggaattgggacctacaaacataatatataacatataaatattgacaaaatatgtgtctgcagttttctggtacatatcactgttaattttctctactacactataaattgaagcaacctacctttggccaccacaatcaatcaatcaatctaacattttatataagggtaaatactattttgnnncctgtgttttgcaaaagttacagactgaaccctgtgttttgttaaatgacaaaatggatcctgtattttctaaaatgtaaacagatataaaaaatgtaaacagttttgtcatagcatttttaaatcggattataattaaattttattttgacaaaaaatcaattcagggtactattttaaaaaatacagggtctattttgtnnnttaacaaaacacaaggtccaattggtaacttttgtaaaacagaggatccaaaatagtatttactctttatataataatttttttgatgaaaaaaaaattatacaataatcttaatcttattatttaattaattaccattgttaaaaatgatcaaatcaaagtatctaaccaaatatccacacccctaggctattttttggacttgtgcaaaaaagcaaataataaggccaaatttacaaataatgtatatatgtgggtgtatttatatatgatattacattatataatatattctattatataaatatatgtgtgtggtggtcctattgaatcaaattgcatacaaagctatgtaggccaaataatattgcagaaccccaccaatgtctcttctctctatttaagatcttatcagaagcaatccatcaatcaatattattgcaataagggtatagtgccaaacagacctcttttttcctacacacattttctttctcatttccattcatcttttttccttctctctctttctcttcgttttctt

SEQ ID NO: 29330 - DNA, 1650 bp, Cannabis sativa
actaattatacaactatttaattgaaaaacatactctgatgatgatcttctagtgtcaaggtctcctacatagtcagaatctacaaaacatcttacttctccaccatcacagtttgcacaatggatgaggcctgttgtacatgaagactaggataatgaagcctaatctaccataaacacaagaaaaaaaaaaaagaataaaagcattcagttatgatgattatcattagtttactttctttaattgattgtgggaaatatgtgcaaattaagattttagtttatagatgcaatattaatatattgtcttttttggatgtaggatatcaataacatttttattgtactccaacataatggttattgggatgaaaattaaaattccatcaactttcaagttcgtgaaatgatcattctaaataattgcaactacaacactttggtttaaatgataggtaatgagctaaaaatagagcttggatcaacaatcctaaaaatagagtaccaagaaaaagacggttaccttccattccacatagtagattatctctagtttatcttctacacggagttgaagaaaaaagaatcagatagtaccatttgtgccttacaacggagactaactaaattgagctgacttttttttttttcaaccagaattacaagaacacctaacttgtgtatagaattgggacaagttgaagaagcgacatcaaattcagatgaagaaggaaccgttaatatggatcagatgagagtgtagattatatctcttatgcaaggtttgttgccaatcaaataatagaaatggaaaatgaagcaagcaacgatgcagaagtgaacgaaattgatgaagattcggtaatcaacaataaaaaccatcaaaaaatagctatctcaaatatacaaagataaagagaccttgaagattgggttaagccaccacgctagaaaatattttcaataccgtgtgaaaaaatcttgcaaaagagagctcgtagcgcaatgctttgacaaaagttgcaagtggaagttaagggcaccaaggaatggaaacagaagccaaattataactaggacttttgatgacgatcacaattgtgatatgaagatcagattaaaagatcaacgtcaagcaacctcaaccatcattgcagatatgatcaagtacaaatttacaaatatcaagattaaaatcgcagttacagatattataaataagttaaaaattcatggagtgcgagtcaaatacatcaaagcttggagatcaacacaaaagacaaaataaaaagtgggaagaaatgtaagttaaatcttactctgaaactagccaagtatctttacttgttgcatcttacaaatctaggctcttttgtggaactcaaaacaaaggaagatagcaaattcttattcttttttgtagcattgaatgcttcaagaaaaggatagttgcattacaatcctgttgtgatagttgatgggacattcttaaagtcaacatatggaggaatattgctggttgcagaaactcaagatgagaaaggtcatattttcccattagctttcgctatagttgattcagataataataattcttgggagttggttccttgataagttcaggaagtgttatggtgcaagagaaaacat

SEQ ID NO: 29331 - DNA, 4032 bp, Cannabis sativa
gtaatccactgccactattgcatatttaaccccaccttttcctgtggggagagacccaataaggtctattccccacaccgcgaaggaccacgggcttctcattaaggtgatttcaggtggggctcttgggatgtttgcaaaattttggcacggatcgcacctgaggacatagtctatacattctttcttcatggtaggccaaaaatatccatgccttaatatttttttggagagacacgagcccccagtgtgatctccgcaaaatctttcatggacttcttgtataatccttctaacatcaggatctgacacacaccttaaatatggcatgttgagccctctccgataaagaataacattgatcatcaagtatcggtgaccctggtactatacctttctagacatagttctctctcgagacagttctcccattgttatgtacttgatgatagggtccatccagcttggtgatttctcattcattgctactttcgatatttgtctaatgctaggctccgtgtgatactcaagtgccaccacccaaagcttttctaccttgctatctgatgctaacttagctagaaaatctgcatgaacgtttctttctcaggggatttgttcgatcttgtattcttgaattcttgcagcaattccctgacagctgagacataagcggccatcttttctccatgcgtttggtattctcccaacacctgattaacaacaagttgtgagtcgctgtatatctctactatattagctcctactgccttagccaactttattcttgctatcaaggcctcatattcagcctcattattggaagccgaaaatgtgaaccttagggcagcttagagtctaagtccattacgagatatcatttctaccccagcccccgatccattttcgtttgatgcaccatcaacatacactttccatgtaggcacatctagatctggctcattggcattaccctctattttgttgcattcaacaataaaatctacgagcgcctggcctttgattggcttagctcctttgcccactttccatgcggggtatgtattgtatgtcgaattggcttagctcctttgcccacttgaggagccttcctaaggcttcaggttttcgtaagacctgttagagcgggtgatttgtgaacactttgatggagtgtgcctaaaaatatgacatcagcttccttgatgcaataagagaatagaaagctaacttttccatcatgggatactgaatttctacctatatcatgcgtttattgacatagtacaccgggtgctagatctttccttcttcttggaccaacaatgcactaactgcattctcaaagacagcaagatataggtacaggtcttctccaggaacaggcttggacaacaccggtggctaggccatgtgttcttttaacttttcaaatgcctcctcacagtctttgatccactcaaacttttggcactttttcaagatgttgaagaatgggatgcacttgttagtggattgggaagtgaagcgactcagggcagctaccttcttgatcaagctttatacatccttatgtcttcttggggagggcttacttaataaggcctgtatttttttgggtttgcttctattctgagctggcttactataaaccctagaaatttccctaatttgacaccaaaagtacacttcttgggattgagcttcatcccatacttcttgactacttcaaagcattccatgagattgtctacatggcccatacttgttttagatttgaccaacatgtcatctgcgtacacctccatgtttcgccctagaaggcctttgaacattcggttggccatgcattgatatgttgctcctgccttctttaatccaaagagcatgaccaggtaatagtatactcctttcttggttctaaatctggtacactcttggtccgcaacatgcattttgatttggttgtatcctgaatacgcgtccacaaaggaaaataatttgaaacctaaggtagcatccaccatctggttaatcctaggcagttggaagcaagtaggcaagctttgttaaggtcggtgaaatctatacatatccaccacgtcccatttggcttgggcactaggacagggtttgccaaccactccgggtaatacacatcccggataaaaatgtttgacaacattttattcacctctttctctagggcgtcaaacttcaccggatctagcggatgccttttttgctgtaccaaaggcatgtttgggttgacattcagaatatgagtaattacgtggggacttatcccggtcatgtctccatgacaccatgcaaatacgtctgctgacaccttgatggtatcaataatcttgcttcgctctttcagatcgagaccctttcctaagcagatgaccttagttgggttctgatctcatattcctacctcttcaatatcctccactggttctaatgtagtttcaaagccaacgcaaggatccaacatgtcttgtcttgatgaggatgccacctcaatcccttggattgcaaaaatgcacgggtgtactgcaggattataacactatcttgcctcaccttgattaccccaaactgttcctatcccagcctcttaagttggaaacttaaggcacaagtgcctaatggaagtgaccactcaaaagtcaactaaggctggtcggctttgaatggcattgcaagtggtggggcaatctactaccacaaaggtgcaatgcttgaatgtactttgtggagtgtttggacatagagtaatggggagtctaacctttcccgtagaaacgagagtaggtctgttaaatcccgtaagttttgaaccgcttgaggagaggtctcgatcagtaagcccgatggccatgaaagcctcttaaaataataggttcactgaacctccgttgtccaccaatattctagctacaattttgtttgcaatgggggtttcgatgactaaggagtcgtgatgcgagaagtgtaccggcgtagcatcttcctccgtgaaggtgatgggttgatccataagtcttggtctttgggtcaaaagctgattaacttgtcatatctcaccatcatgctccaaagcccaggcataacatttcaactcatttcttgtggtccctcctatgtgaggacctctggagatcatggcaatccttccattcattcagggaggttgtctgggcacttgctgatgaggtatacccctaggaggtatctgtccttttggtgccattgctggtcccccttgaggtacttgggatccagtttgtccgggattcaggtgtggcaacctatttttgatccattcatatagatggcctaatcgaattaaactctcgatttcatccttcaaatttttgcactcgttagtgatgtgaccgatatcgttgtggtattcgcacctcttgctagggtctcttcaggagctatcttggtacaaaggaggaggcttccaataattagtgtttttcctggttgcaaagtacactcgttcttgagtatccacatgctccgtatattgtgtatattgggggtgtaacctctgctttatctcttatcctcaggttgggtgctaccttttgaggatctcttgcttcgggaactttggggggctcctgccatactagtggctagtggaggttgaactgggagttgtgcagccatctcggtaatgggattattagattgagccagagcaagagtgagtttttgagcatatcctggggtcaccaaaaactatactccgcttgtctgtggtgtaatggggaggacagctctaggaagttgcgttcctggcatgtatcctggcctaccagttggataatacctgttgtaagcaactatctgtgcctcttccaagttgatatacttttggaccctttttggaagtcttggaggctggcagctccttcctgttgtagctcattccaaaaaggagttttggttcgtatcccagcttagagtagtggtagttgttgtccatcatcaacttttttggttttt

SEQ ID NO: 29332 - DNA, 3531 bp, Cannabis sativa
taaagcacctggaacaatgggactgtggagacaacacctcaacaagagctgaaacataaatagaaactgttattcttaatgctgacagtagcaagcttgatatgcacagaagtgatttaatattccttcagatttaaagcgtttcataacaaagaaagagaaagatcaaataagtggttaacgaggaagctaaacaataggtaactaggatgggagacggagacctgaatggcagcacataatgaagcctctagacgttgttgaaggcagtaataaagagcaacctgtactgcctttgatccaaggaatacttttgtaactgcatcaacaatcttaactgattcaataccaaacaatgaaccatcggggttgctattttcaagttggagcctagaggtttgtagagcactgaggggaaactgataggccttctctttcatgtaaaaaatttctgatgcttcaataagtgaccaaatagctcgacatgattcacaagcagcacgaagcttatcagaagaacctgagattaaacttgcgcccgaaatagccaaacagagacacaaaagatccactaaaccacatgttttagcatgaccaagaatctgtttgagtatctcaatggcagtcgatttgacctcagaacctgagccagaatagaatgcttttaggccttcagcaactgaagctaacatcacagtaatgcaagcagtggattcatacaagacttttccagatgcatcttccttgtaagcaacaacctacatatttaacaagatgccaattaaagatacttgtattgtttccagctatcactggtcaatgcagccaaacacgcaataaatatataataataataaaaaaaaaacctgtgcaaaagtttctgttaatgaaacccattgcctgaaccatgaatctgtaacgctacttcctctgttgtttaccaaaattttgatgatcgagaaactctgtaattaatttaaagttgcataagcccagcatcatctgttaatgccaatgagaaacaaaggaaaaccatatttttctaaatgaacgcatacctttgctattaagtcaataagttcagatgatttcaagcaaacaacatggtgtgtgaaatcaagaagctcatgtattatctcatcaagaagttcattcaaacataaggcaccagctgcaactacgtttgatagaattcttagtgactggtttgacaaaagaatgtcttgatccctgcatgaattgtcaatgaatcatggtcttcataaacagtccaaataagcataaagtaccatgaaataactaatgtttgtaaggcgcttaactaaatttacctgcaaggactttgagatcccttagaccatactttcagtggttgtaaaacatgtactaatgcttcattatcttgaccaatcatttgtgcccctttgactgtgcgagagttattctctaatctgtctaatgtctggcagcctgaaaataatatatactttcactacaatttaccagtgtcacataaaataagcaaacggggccggtccttgtactgaagataagatttaagagtttatgacttttagtcattcatttcatctactactacataccctatgctacatgcagagaaaagcttgtagcatgaaaagtcaaggagtatagatgctagcctgctctcttctacattttaaattattttaatttttccacggaaaatatctacctgttggtttaacatcattaggacttgcaaatcctgggaaatcctcacgaggtgaagagttgttgatggtagagtcaggagcatcaaattgagcctctttttgaatgttcagcctattacttttctctgaagaattaggagagtttttttcacctaggacatgagattcaaattattaaaatagaactaaacatttgaagaaacagagggcttacaaccaaatactagaaaagccaaaccagctgatggatgaagtgtgcttcctccgtttgcacatgctgcctctctagcttctggaggacatatttcctgggaaaagtttacatataagctaatactgcagttctttttcccatctcttttctatagaagaataggaattttttactttaccaaatgtccgcttaatatcatcgtgttcgaaatataactaccttgaggggcctgggttctagttcatctgacgaatcctttatgaaagggtgttcaagaagagtaggccatgtcaatcgattttgtggcacctgtcatttattaacaaagacttagtacaaaataattggcagaagaaaaatataaatgaaactattgtcagatcaaaaccctttttaacataaaagacaaccttatttagcaatcccttgaggaaacttttaaattctgcacttatgttgtcagggtatttaactggatcctggcacaatgcatgtcaagttagctggttctttagcaacttattaccaatagtcatttaagtttgacagaatgaaccttaacaatgtgccggatgagtgcatatacagaatttgtgtaaaatggaggctggccaacaaataattcatacctgtcaattacatgaattatagtttgaaagaagaagaaaaattaatcaggggtagaggaaacaaacaacacagctagcagaaatactaatgattaagcttattactcatgtaaaattctaattggtttcaacagatatttatatttatcaggtcctttgatggtgcaaaggagactaagaaatgtgccaaattgctgcaatgcaaaatatgttataatggattttttttttgtcaattgttttctaagttaggagtgttcatttagaattttagagtgtaactttggttggtattttttcgttttttttacacaagtgtctggtctgagtggataaccatcaagatattggcatattggaacaatcaataatttgggtctgagtggaaaactctcaaaaaaggtttatcaagaaaatctttgatataatcttttcaacttataattacaaaaaaacaagctaaaatgaacagaaattgctagacatgtatgaagaagacaaggagttatacatacagtatgacaccaagtgaccacaaatctgcggtgtggttgtagggttgttctcgtaccagttctggagccatatacagaggagtgcctggaatagaaaagaagaaattgataaagagaggcagaagtccatagggtcaacaagtgtgttacatcatcaatttgctgacacttaccaaaataaaatcataaaaggaacattaggaatttaagatagtataaccttaccttttatggatcgcaaaacaacagtattcatagacatagctcgtgcaaacccaaaatcacaaagctgccggcaatttagaaagcaaacaagttatcatctaaaaatgagtataaaatcttaagtaaaggaaggttacataaaatctgaagtaactagttaaaagaaagcttattgaaagcagaaaagaaaattaataatatgacaacaggaacaaggtaatattgtcttg

SEQ ID NO: 29333 - DNA, 2891 bp, Cannabis sativa
agagaaaaagggggtatcagattttgaaaagagaatattctcttttggatccgcatcaaagcaaaaggactcatttacccctagaatgtgactgttgggtgttgtgtgtaggggcaaaatcggattgccagctatttcctacagttaatttaggaggctttagcaatggaatcaagccgcttttggtaaatatgtcacatcgatagttattaaacaagatatactacgagtgaaattggtggataatgtttatatcaagggtgaaaattagtaaaattataggatactgcgcgtagctggtaatggagacaaatattacaagtcaaagagaagttcaaacaagtaattaatctccaactccaacgatttgcgatgtgcaagtatacaatcaaggaagaatatgagaagcttgtgcctgaacaagaagccatgtcttggtatatggggagattttgggtagatttttcactccaaaacataaatttattatatggttggttgtgttaaatattttaggcaaaagatagactattcgagttcaatattagtgatgatgataattgtttaatttgtgcacaaaaaatgaaaacaacaagccacttaatctttgaatgttattatagcaaacgatgtttaaaggctaattcagatttgctggattggaagcgtattgactctaagttaatgagagtgttaaaagccattaaaaggagaagatgcatgagatttagaagacaagcttttactacatcggtagttacggtagtatattatgtttggaagggtcagaatgaggtattttggaatagttctttgccaacattaaatattttgatatctagagtgaagcaatcatttggtacgtattatattatattatattatatatcatattattatataattattatgttaagttttaatttatattaaaatattatatatttattcgtctataaaatttaatataattttatataaaaatattgtataaaatataatttaataaaatactatacaatataatacaatgtaatatgacatatatcaaataaacccgaaatgggaagattatgtgataaatattttgttatggtgtgatggttctgtgtaacatgaaggatagaaactcaactttcctattttgtattatgtgtgtttaaatcataaatgtatggtgttttccaatttcataatgaataatgttatgtcatgatctatagataaatgatgtccaacgcaagtatatagtcctctgttgtcccagatcagtgttattattaaaaagaacaagtgattaattaataagaattaggggacattaattatgtataaaataaattttcaatgaaccacttgtctggcttgatttgttgttagttgttttaattttggttgggttggtttaatatgattaattaaaatgtcaaaacgtaattaaacaacttatttattataagtagtggcatggacccttcagagcctataatgattatttccttagaatttcatacagcttgttaacttctaactccaaagaagaatcattactataaaagataatatagaatttatttttataatttttgttaaacagaattttcttttatacatgttttatgtaaattaaaaatgtatagtaatttaatatgaactgaaattagttagtgctattatatcattatctgaaattaattaagaaaatgaataattttatcatacaaaggctttttttaatgtaaattgtgatttaagtcacaataaattatctttgtggtaaaattgtaaatgttatgtataaattattcattttagggctaattagaattttttttttatcaaatatcatgtttttgaaaatttaaaggtggtataatttgatacatttttaagtttatggaatacgatttgatacatattaaagtttaagagtataattaatttgattaatatcaaaatttgaggacacgatttaatacatattaaagttcgagagacatgatttaaaacatgaacaattgtcgttttagtaaaattaagcaagattagatagaaatctttgaattcaacaatctcaattaatacttaaattttaatcctttaaaaaatttgaaaaatttgaagagcataaatcctaattatatgcatacaaatacttttttttagctatattacttgtcattttgtgcctttccgaaatcttaaacacaaaatgttattttgttattaatattgttatgtatcaattatttttataaatatatatgtatttataaaaaagttgttcaccgaattttttgttaactaatttaataagaagatcgtaaaaagaggattgaacatgatcttcatagattatgagtaaaatgtatataaataatccgaataaaaataattgacatgaaagtttataaaatattgtatatggttcaaattcgttaaattagatgttgttattctttctattttactgtttaattcattacaagatctcttgatatattattttttaattatgttgcgtatttattagttcgataaactgaaacgtaaatctttgattgtttccatttcgcaaaatgttcttgtatttctattttagcttatcatctaccaacaacattaaccttttaactttatcatgtcggtaaattaatgaggttatgctatatcattaaaaaaaaacatattgtcattgcctcattttttactactcttaggccaactctaatggacctgcaaaacatcaattatggtgtgatattacaccaaaaccaattccatttttgggtttcccaccatatttgggtgggcactgtagacagcactaaattgtttttttttttttaattttttaataattatataatatttaaaaaaactaaataatt

SEQ ID NO: 29334 - DNA, 1470 bp, Cannabis sativa
attaataaataaataaacctgaaatctcttttctttacaatttcgccctctgcttagtgaaaattcataaattagacatagtctaacttcttatgtgattttattaaattaattgtaaatttgaataaaaattcgctatgaaaatgataaatttattcgatttatgattgtcttaacaacgaattatttctttaataaaaaaataacagaagattattaattattgaaagatatttagtattataatattataaaaaagaagaaagtaaagtgtacaatataaaactttttctttttattaggtttctttcagttgaggacttgaatgaatgaataatttactgtttacaattttactgctgactttcgacattatctgatcttgccccctaaaataacttgttaaaaattttccataaacttttgtatttacaaaacttcagttttgatgttagatctcatcccattattatgtttaaatgctgatgtataattgtaaattattaaatttattgcttaaactttaacaactataaaatcgtaccactccaaataaaaataacaaagattcgatatttaatttccagtaaatcttaaaaaaattaatttagatcttaaaaaaatcatttttaatgattaagaataaaaatagaaatcaaaatttaaaactaattaagtgatttaaaaaataaatggaaaataacccatttatatatcaaaaagtatattaaaacctcaatttttttttttaaaaaaaaaattataggaataagtttgagtgtatttttctctaaaaatctatatttgattaagtaaatatcaatattttttagtttaatttccaatttcttttcaaataattatatatttttattgaattttaattttaatttttctattttttaagatgcgagtttgtattataaataagccttattttctcaaaaaaaaaaaaaaaaaacaaaaattattttgttaaattatttattggatttttttaataattttgatatgtgtttttaagatatatgtttattaataaaataaaatttgaaattatattttaagaataatttagatttttttaaaaaaaactaaatatttttttttatttatttaatactttcataagattttttaataattttcttttaatttgtcataattaatagaaaattataatttttaaattaatttttaatggaaaagagcaaaatttagtgttggtgaaaatttataaagtaaaaatgttaattttaaatggttaaaaaagaaaattgcatatttaggtaatgtgaaaggatgagaagacaaaaatagtaattattctaagggttatttatttattttttattttttgaaagaaaaggagtccgctaagaagacggaaaatcaatgatattacaggggtcgtctccaatccaaatggctacttcatctaaccctagagctcggtgagctagcttatca

SEQ ID NO: 29335 - DNA, 2654 bp, Cannabis sativa
ttgtattagcgagcttttaaaaacaacacaaagtacaatagtgagagttaataactgacgcaaaaaaagtgaaacccttaaaactaaaatacgcaaaaccctcagccttctctcttcagacgattcagcctcacactattcacgtctctgtgattctctttagtcgcatctcctcttcaaacgacggtgagaactcaccctaaccacctcctcttcagacaattcgacagtggtcggtggtctctcttctcccgtgagctccttcgtacaacctctagttgtttttgagttccttccttcaaaacctccggtggtcaaaacctcccgtgagttccttcagacgattcgacggtggtatgtttctattctttaatttattctcttaactctctattttgattttgattcacctagaaaagacaaaagctgattccagcaaagaaaaagaaaatgttgtaattttcttaccctaattttctctattctcagtccccagcctcttcacaaattattatactcaaattattccttaattcctgagatccattggaaagttgtcaatgtggaactaactagaagtatgatttggtaaatctgatccgtgatttgctatgtattttcaccataccttacattttgtattgaacacaatcaagagtaagtaccagaaaacttgattaaatcgattagttttaacacaatattcagtaacacattttgcaggcctgtttaatctgtagacaattctactttcaactaggtactctactggcttcaaattttagtggagactgagctcatttcttgtgtaggcgtcccagaggaagttattaagagggcagcatctttgttggaatctattggagaaaataagcatgttgagcgattgtgtaatgagagtatatcagcccaagatcaaatatacatggtagtagttcaaaaacaagactttaaatacgatacttggattaatattacagtaaggttcttgcatatttttatctttcctttctatataaatttcagaaagcagtggacaagatgttgtcctttgatgttttcaatggagatctaagcctttttttccagaatattttttcatcttagtcctaaaggcgttgaaggtgagctcagctcttaatgcatgtatttctttctataaaacagactttatattctttagacactttttcttctcgttcaagacatctttttggcaaggaatctgtgattcggtttgcaaaagagccgtacgtaattttgaacatcccaagcggagatgaacacacgggcaggttttacttttgtctttttctgttattgtgggtgacattatacaaagcttgaataattaagtttttgatgcctcacactagaatcttgtacgaaagttcttgaatcttaatgcttcaacacttgcaatgaaaatccttttattttgggaaaaatcatgttgatccataatttcattttgacgttaaatttggctacaactactgtttatcttttttcaactagctacaaaaaagttgtacgcacttaaacttaggggtctttcactataaaagtcaactgaggtaacattatattatggtgctttcttgtattggtctctggtgttacgagtctaaagagcaactaactgcttgacgctcaatggaaatatatattttggtggaccatcaaagatataatcagataagatgctatgtgtcgcttctgttggatggtatagatcccaaaacacatggcctcgtctgttggagcaatattttgctattggcaggcaaggtgattcggacctaaatttcccaagaccacagcaagcagatttcacttctgtaaatcctgaaataagatgaaatttttttatgtctcagttacacatcacattaaagttgcacaagaccaaagtttgagaaggaaaaaaaaaaaagatgtaataaagtaccatatgatgctggttgctggacaaggttgtttaaaacatcataagtctcaaagtaggagtagctgatgttgttcaacactgatttcagttcccccaacgttgactttagaccatcattatatttgatagcccaatcattcatttcttggaagcagtctcctgacgagctttttctcctttgtgctgggcagcatccaattggccctaccccagtcactacaaatttccgagcaccataactgtgtaatttctgataaaagagagaaaacaacaagattatattatatataaaagagaagaacaattcttttgagtattatgatgacactagtaggtggacatattataccttgagttgttctttaagtgtaacaatcatttcttctacatactcttgtggggtggttcgattacgaagcttggaggagccaaagtatccaaagaggtcgttgcttccaatgacaattgtgaatagagattttgagagatgttgctctgcgcttgtggatcccagcttctgcactagcttgtcgtgtactatcgaatagtactccacttgcttcgtaagaggtaatgactgtctctgaaataaaacgttcaatacaaattatttttaaagatatttcatctgcggggatagctcagttgggagagcgtcagactgaagatctgaaggtcgcgtgttcgatccacgctcaccgca

SEQ ID NO: 29336 - DNA, 3080 bp, Cannabis sativa
tttttatcagatggctgaggaaagggaacgaatggcagctgatcctaaatccatcatgccggcagcatttgtttctttcaaaagtcgttggggagcagctgtttgtgcccaaactcagcaaactagaaatccaactgtttggttaactgactgggcgcccgagccacgtgatgtatactggcaaaacatggcaatcccatatgtttcactcaaaattcggaggctaatcgtgggtgttgctttctttttccttaccttctttttcatgattcccatttcagccgtacaggcttttgcaagcatagagggaattgagaaaagagcaccatttctaaagcccatcgttgaaatgtgagttttttttttctttcttttttgagcccatcgttgaaatgtgattttttttttctttctttttcttggacttctaaattttatcctgtggcaagcaactaaaccttatgatatgtatgtatgcaggccattcatcaagtcagttatccaaggacttctacctgggcttgccttaaagctatttctcatctttttgccaactatactgatgatcatggcaaaatttgaaggctttgtatctttatcatctcttgaaaggactgcagcatctaagtattatctcttcaatttcgtaaatgtttttcttggaagcatattgactgggttagcgtttgatcagctaaatacttttctcaatgaatctccaagcaagtaagtcacggttatggttaatctgtagggatttattttatttgaacaaattccaactctaggttttgttttctctcttttaacttattttcaagagcctccgcctttttcttatttatttatgtattttgcaggatccccgaaatagttggggtggcaatcccattgaaagcaactttcttcattacttatataatggttgatggatgggccggtatagctggagagattctcatgctgaagccacttataatgtatcatttgaagaatttcttcttggtaaaaactgaaaaggacagagaagaggcaatggatccagggagtcttggtttcaacaccggagaacctcgtatacaattgtatttcatactaggccttgtctacgctacagtgacaccaattctgcttccattcataattgttttctttggcttcgcctatcttgtgttccgacaccaggtaaactgttcatttaagtacttttgttttaaataaccaagtgattcggtttatgagcttctttgagtacgcatacttccgccctccttagctctgtggttgaggaagtttagtttgctttattggtatagcataaaggaaaataaacttctcagcacaaaaatcatacaccatttaaatgggttgaatcgacataatcaaaagatacatgtttgtgatggtttatgaaatttaaatatgcagataattaacgtttacaaccaggagtacgagagtggagcagccttctggccagatgtccattcacgcattattatagcactgattatttcacaactgtctttaatgggtttgttggccacaaaaggctctgctgaggcaacaccagttatcatcgtacttcctatactcactatatggttccacaggttttgcaaaggtcgttatgaatctgcatttgttaaatatccattacaggtagtttgaaactccccaagttcactcaaatcattaatgactcttcctaacaacttaaaccatcatattttcttctctaatcatatgttgttatttcgatggtacaggaagcaatgatgaaagacacacttgaacgtgccagggaaccgcacctgaacttgaaaggctacctccaaactgcatacgtccatccagtcttcaaagctagcgaggaggatgaggacgatgatgatttagtgtctgaaaaatgggaaactgagagtacccttgtaccgacaaaacgacagtcgcgaaggaatacaccattgcccagcaaaatcagtagcaattcatcgcctactctgccgggtggttttgaagatcagccatagcaaagtttatgggaaagactcacttagctgtacatttgacctttagcaatggagaggagctatggcactgtaaactattgtataatgtccatgatattgtatagaggtatagaagaaagcacggtctcaaaagaagcaagtttcatgattttgttgcagcctacttggggagggaattagagccatatatcagtgagtgttgaataactagagattcaaaagtggtagttttcattttcattcttttgttttcttagaaaatttagttttagttttctgatttcttttttatttatttgtgtatctacatattgaagtccaaactgcacggacttgtcattgctgggctctttaaagtgcaaattctcttccactcttagaagataaccgtttccaagataaacactgttttggtgccactttttcatcgatttattattttatttttgtctcactttttcatcaattagataccgaacttttgtgatttttctttttggcagaggtgtggttaaaaaggtttaccttattattatcagacaaatattataattaaaattaatttaataaacttttaacattaaaacaaatatactaattaagttattgtaacaaattgtcattaaaaaattatataacatataacatatattatatatcatatatatatcaataataatataatatgttaacaatattacaagtaggaataaataaggaatgagttgctatttcatgttaaagagaaaaagaataaataaggagtgaaaataatttatatgaatgttgctttaaatttaatagtatgatttgtactttgtaaatacatgagttttttatatattaaaaaataaaatcatagtatttttataatatataatgtgatacgatttgtactattattaaattcagactagctaactgtagacttgctaactgtactgcatataggggtgttcactaagtatccgatctaatccaatccgcacgatccaatccaatccgcaaaatgcggatatccgcacttgcgcggattggattggattg

SEQ ID NO: 29337 - DNA, 1766 bp, Cannabis sativa
tacagtgaaatagagttttatttagggcataaaacccaacaaagactcgttcgactcatggttcaataagtgttagttgttaaattacttattaattacttgattacttgcttatttgatatatgctaattattagaaaagcatagtagtgagcaatgcgtatgcgtatgtttagaattgcttattaacattgattatgaattgaaatatactaaatgatggaaagttatttgtgggtgtatagatcatgcatccgaggcaattcggtaggggtaaccgcgagcttgctgggctcgaggttggcagtgagtgtgaaaagcctccaccaccaccaaattgagaagagttatatgtcgcgatgaaagagaccatccgacaacaaggtgatcgaattcgagaactgagaaagcagcgagctcaacatgttccaaatcctaattttaatcctccgaaacctcttgtagtgccacaggatgtgggaaatcatctggaaccattgtacgacgattcaggaagcagaatccaccagtgttagagggtggtgctgatccacccaaggcggaacaatggatgagtatgataacatccatatttgactttatgcgggtcaagagtaatgatcgggttagatgtgccatttacatgctgcgtgaggacgcccgcatttggtgggagattgtgtcacagggtcatgatctgaataacatgacctgggacgctttcgtgaccctattttatgaaaaatactataatgagtcaatccgagcagtaaaagtgtaagaatttatatggttgacccagtgcaatatgacggtgacagagtatgccaccaagttcgatcgactggcaaagtttgcctcagatgaagtggccactgacgcagctagaaaggccaaattcattcggggattagaagaacacattgctagagatgtgattgttgctgccaaacaacctggatttgttcgaacctatgctcaggtagttgagttggcccttgctgctgagggtgcagaagaccagattcgaaaaaaaagaaatcttgcaagaagaaattcatggaagcagacatctggtactggttctggtaagggtaatgaccctagtgatcgtaagaaaagacccaatgatctgtcagctataggatcgaatatgaggtttcaaagtaaccaaggtttctgtcgtggtggaaacgagaattggcagacctattcagaatgtccaaggtgtaagagacgccatcaggacgagtgtcaagctaggtcttgcttccagtatggggtagtaggccatctgaaaagaaactgcccacaactatggatgcgataaccaaaaaaggcgaaggaaaccaatacaagaacttgttcgagtataggcattacagtttggcagagcttcattctagggttactggcaattatcacagaggtttcaattcctttcttattttgatttatacacagacaaccaccttgtgaagttttaggcttttaacattgaaagttttccctttctctaactgcaacaggagattataatttcagtttcagtttaagtgattggttgtgactggaaaatttgagcgcaaactttgattttcatgttcagttgcgaataattttagtcaataaaaatggaacccataatttgaaaaattcataatcttgcttagctagtttgtagttataatgaagatgtcagaaatgggtttctttagaactattttgctaattcttttaaatgtctttttttttttaatatatata

SEQ ID NO: 29338 - DNA, 2130 bp, Cannabis sativa
tttttcttctttaatttctttcttaacctttttaaaaattatattctcttttggtcttatgatgacattaagtatttttcagtgagtaaaccatagaaaatggatccttgtcaatgctgttgctatagcctatttcttacaaaagtgctctcaatgcagaagtagcagagcttccatcatataccttacaggatgcgcccgcaagtcatgagcagagcaatgaagccgcgacttcccaaccttcagcacctaaacaatctgttgtggctagggaacctgcccgtgacaatactaagcccgaacaaaacgtttctaggggcggtacttggattgatcgccttctaccatttaacaagactgaaataatacccggtcatggtactagacctcaactgactgaacagctacttccagctaccacaactccagtaactaagccttctcccaatgattccgcaaaagataaagctgtggaaaacatttccgactttcaaagtccagttccacatgatgataagataacatttcctgatcattcctctggtgttactgtaaatgtaataaccaatccctcaacatctgaaactgtaactgttacaacaactcgaggaccggaacaacactcagaaatagaaactagtgaaggtaaactggatgctgcagtgggagacaagcacaaaggtatgagaatattagatcaatataaactaacttttaatataacctctaataagattatgaatttttattttttgatgcagggccacccgaagatgtgcgtacagactcaacaaccatcactattacatcagagcgtactccactgattcaacagcaaaggagtcctgcttcgtgggatatcgtaaagagcattgtttatggtggtttagctgaatcacttacaagcttaggcattgtgacttcggctgctagtggcaatgccacaacatgtaagcatctaaggatttgtcaaatgaaacaatctgttgaatcttgtttagaaatgcatattgctgtaactgtgtattttgtaattgcagtgaacatcttaggcttggcattggcaaatctggttggcggactattcattatcggtcacaatgtgagtgattctttctcgcctttgtgtttgtgtaactatactcagagaatccatgtagcgaaatttaatgaacttttttatgtgatactacagctttgggaactaaaagatgacaaatcaaagattccttccagtgacacagacgaacatgtggatcgttatgaagaagttcttgggaagaaagaaaacttcgctcttcatgcgcttgttgccataatatcattcattattttcggattagttcctcctttggtttatgggttctcatttcgtgagagtaacgataaggacttcaagcttgcagcagtggcagcagcctctcttgtatgcatcacaatcctgtcgattgcaaagacctacgcattgaaaacgtccaagtatatccaaacagtaacgtactacattgccattggtcttgctgtttcgggtgcttcttacttggcaggtgtgttgatcaacaggctattggagaaggttacctggttgcagtcaacttcggcttctgctcttactctttgtgcaaggaattcgggaaaccccgcatggcaatggcaatccttgtagagtaactagaaggaccttactatttttgtaggtactgtttatcttgagaatgagattgttgttatgttatgttatggtctttgctgagaaaaaaagctttcttttcaatggaatcttcgttttactttttgctgctatgtgtcaaaggttttgttccattttcattctttaatttatttgtagtctgtgttttagtgtctttgtaataaactttgaagttcagattggacaaagaaagagtcagcaaacctctcttttaagacttgaaagacttgaaaaatacttttcattcttctagtcagataaaatcaatgttttttatcaaataatgtaatttgcggcgtaaatacttaagtttaattttcggttgtagataaatatttaagtttaatttttggcggtaataatacccaagttataaatttgaaatttttgtaggtatctggccattaagtgtcaagtta

SEQ ID NO: 29339 - DNA, 1161 bp, Cannabis sativa
  modified_base (273)..(273): a, c, t, g, unknown or other
atagaatgcccaaaatttggaattaattttccctaactttttgttttcattcctattaattttaggggaagaaaatgaagaaatattaaaggatataaagatggtgatagccatatagggtagtagtaggagtactgcatagacagatgaaatgagaatatgattggtaaaaaatctcaagctgtaaagttttcaactttctcataattaggttaaattcttgggttttatacaagtgaatctaatctcacacacacacacacacactatatntatatatatatatatattgatcaaattggctggaccttagttgcttgctagcctggcaaaaagtactaatggatccatataactctctctctctctctctgtcttttaaattattattttggctaaaatgatccacaaattcaacttgtactatagaggtccatatgataccaacctttactttcttgacaggtagttccctagcttcacttcaataattcttagattgaaaaagaaagtaaagaagaaaaattaaattaaaaaaaaaaaaagaaagaaagaaagaggaagttggaggtaagggaacagatattcaattgccacgtggtgaattgtctttttatactcttttgtgattgtaactcctaacaaatacacaacccaaaaaactattaacaaaaaagtggcatcaaaagaaatgagaacactatatgatttgtagttttgtaacaaagttttgtattcattctaagtgataagaagagaagaaaaaaggggaggaattttgtgtaagaatataatgatcagaaatggagaaaatttgctgaatttatcagctttcctaaagctataataaattaaaactatatattaaggaagaaaataaacatatttgcccaacattttgactcacattttcaacaatgtctttatcaaaactatctgtaaaacaatgacatcaacacacttacatttatttatgtgtataattatagatctcaattattctagcaaagcttgtttactgttttagaactattatatatacaaataatatgttttcgagtacagtactaatatagcatgctaataaatacatattattattatttataaatattttttaataataaacaaaccccccaaaaaataaagaaatttttacat

SEQ ID NO: 29340 - DNA, 2816 bp, Cannabis sativa
  modified_base (1807)..(1809): a, c, t, g, unknown or other
  modified_base (2670)..(2671): a, c, t, g, unknown or other
ttcttcgaaacaagaccatcgctttggtcaaattgctcttgaggcacagcgaggtggaggaagccacatgggaattagagtatgacatgaggactcaatatccagagctatttaggttagattttgaggacggaatccttttaacgagtggataattgtaatgacagcatttgtaatatggataagtaaaggcaattagcactaattactgatatttttatattatttgtgaatttaaattatttggtattcccattgctagaaataaaatttctcaattctagagattttatgaaactctaggtgtattatttgaactataggtgaattatgcaatttttataatttttgctcggcgacaacagaaaatgcgatggatggctagtttaatcacatgggtaggtctagaaccttatttcttagtgggttttatgttggaggaaatagtatatcgggtttgagcagggttaaaatttttgaccattttacccctagtcttgaaaattcttaagttataaagaaaagggcattttagtaatttaacacataagtgacttggtggctgccctagattttgacaccagcccattcctttttcagcaaggattaattaacttagcccttaattcatttagagaaaaatcaagaaaaacccaaacaaaatagaacgatcactgtttcctttctctctctttaaactagccaaaaactaggggaattattgctaattcttggtgtgtccagcaaggaattcggagaagatcaagctaaggtaaccatagaaccatagctttgtacttttgaagctttaagttttgttagagtatgtaattctaagctttaggggctgttaggatttgttttgtgtttggttcaaattgggagctttatttacgttgattttaagctcttgatgttagttttgatgtgtggtgatggaattgcacatgtttgagttttgaaactcaagcttaggcctttaatggaatgttttgagtttttttgggttttcttggttggaatattgtgttgtttgtaccatatttaggtactctagaaggtttggtagcatttggttgagttttgagcaagatttgggtcttttgagggagactggtacaaatcggttaaccagtttcccagtacctataaaacctgttaaccgatatcggtaggttcccccaaacaacccattttctcaaattctttccatttcagtgccttagtttggtgtttccctatttcctaagatagtgtagtccctattgattataacagaatctttggttgtaggttcgggttttctggattagggtttttggacatgtgatttacctagttttaatatgtgattagggcatccatcttgcacgagacattcttttcaggtcggccaactcacttgaatctaaaaaggaggtaagaactgtgtatagtgtgtaatatgaatatgcaaatgtatgtatatgttaagtgtatatgcatgcttatatgtttgtaacactaccaacacttgtacggttatggtacaaagtgcattggtataatgtgtattgttaaggagtacattacggtgatatgagcacaagtacgggaaagtacagggtgtgtgtggtacatcaatcaattgtacccagtgtacgaaacaaactctaccaacacttgtacagtgaggtacgtagtgtatgtggtatagtggttgtactctagtatggaacgttcttactcattttttaagccttgtaaataagtgtatgggcgcctagatacaactcggtattgtatgatatgttatatgcttttcttnnngagtttgtcgactcacagttctactttcatgtgtaggtaagagtaaggcaaaagctaaacaggagtgagcctgagctgggatgtggttgtacatgtcatggcggttgcgacctggagtgttcggtctcgggacatctggggttgttattttgtagtcactgtgcggccatgtttatgtactttgtatattttgcaaaagtttagaaacaggatcccagaacttgtaaatgattatgtcaggtttataatgtttaatatttaatataaatgttttaatttgacacgatttttgagaaaattctttgattaacaaagatagcactataattgaaatatcactgtaacgtgccttaggattagggccttacaattattgtggttatgatgtttgtgattatgaactaaacactcattctagagtgttgataaaactattttaaattatgaatttaagttgttagattattctcatatttgttcttattatttgtttatgtaattttttgttgattatcatcttcttaatgcttgatcatcacttgagagaggtaatctaaaattggatttagaatttcatgacataggaaaagtgtgagattgagagattgcactaattctatgagtttcatttacagagaatcatattggtttttatatgagtgcttattttttattaacattgaatagagatatctttttaattaatttaagttaaatatattgatgtgaaccacaccaacagttgtgatgaaactcaacaccgaatatggcagactctaagatttcttgaaatttggaagtggaatcgcgacccaatgcttaattaagcatgaaccttggtatgaaggaagacgccacaannggtggtggaaatctatttgataagtcaggttgaaagccacatggaatactccttgataagttcaaatagttctctcatgaactcaagaagaaaacctctcaaaattttattcaaaataatatgattttccaaagtgtttacaaga

SEQ ID NO: 29341 - DNA, 2382 bp, Cannabis sativa
gaattaatagtatttgtagaaagaacggttgattcttcttccccatgccttgtctcttggtttgatatctgtcattttgaattccgtggaggtttcgagtttaggaatatcgagcaatagaatcttgatgtattggaaagatatgtttgtgatattgctcaaatgaaagataatgtgtcaataaagtggattagttcgatttatataaagaagcaagattgggggagctacaatgctcgacaaggggagagttggtattgaaaaataattgtagaagtgaaggacatgattaagagtcttattggctgtaaagaatttctggccatggaatttgagatttccaagctttgtgatagaatgtagcctcaaattgagtcccctagagtttggaacactttgatttggaatcagtacattgatcgtaaacacaaatttatgaattggctggcttgcaggcaaagattccaaactcgagatcgtctaataaaatttggctgcattcaagttgatacttgtttgcagtgtgatcttgagcaagaatctcactgtcatttttttctctcttgtgagtatagtaaagtcatttgtaaactgatatttgattgggttggtctcaataattagaagttggagctcgaagcttgtttgaaatggattaaaagatgtagacaatcaacattccgcaggaaagtttatattgctactgttaattttgtactatactgttcatgggaagcaaggaacattgctctttggagtaggaaaatgtatattgtacatgctattgtaaatagaattaagaaagcaattagtgaaaggttttctcttcttaaaaaggagaaacatagtttagaagatagattgtactttggaaagataggaatgcctaactaatatgtacatgtgtaattgatttttgagtaatagtatttcttatttaccaaagcaaaattattattatttaatttaataattacgtaatagcaacttcaagcaaaatgcattgcatgttactaatacctagtgtatatatatttaattatactatatgttaatattacatgcaatgcatgtatatatacttagttatattcttagtttttagtttagatatgtatatttttagttgtataattatttttatgttattcaataaacaacatcatttttttattaagcaaatattttattaaagcgctatatttataaaaaaaaattataataatatttaacatttgttattaattattagtgctatttataatacttttattttttaaaaagaaaaccatattatttttcttattattttttaagaaaaaaaaaagattattttcttagtaattgcaatagataatgcattacaatagtgattttttaagaaacataaatatttttttttctattttattgttttaaaaataattataaatagatattttattagatatgtgctatgtgtttaaatttaaattgtaattttaaaatatatatagccacatttaatataagataaagataaaagagaatgtgtagtgagtttaagtttgaattgtaatatttaaatgataaaagataaaagagatctgaaaagtgaatttaaatttgaattgtaattgttatcctaaatttcgcacaaggtgacgtgccactcaggaaggtaacacgtgttctacatatttggacctggatggaagttaaatccctttggaaccataataagtcaaagccaagttgactagtttatcctccaatgtccattatccaggcaggtctcagacctcacactactccgaatagatcaggatgccgagtaaatgccattcgtcgaagagttgcacgcaacgaataaagatagctagatatttttttttaatatctccacaattatagcccatttagaatccctattttagtatgattgatttgttatataaagcaaattgtgggatttgatatttaaacatttctaatttatctcccattagttcgtgataattgtaatgtatttctttataaatagtgaaaacgatatcattgttgggggctccttcttttcacattccaaaagaacatttattttgcagaaatatttgtaagctttttcaaggattattatgaaactcgcctggctggactttgtgatcttaataattcctcataagtaatacaacaaaaaggggagtacattattaccgttatcatggattgaacctctacaaagactatgtgtctttttattcctatattatcattaattgatcaaaaattattattgctttaaagactttgtgtcattgactaaaagcaaggtcaatattttggtgctttcattgagagctggagtacaatcttgcttttatcaatctacttcttcgattt

SEQ ID NO: 29342 - DNA, 2627 bp, Cannabis sativa
cagaggcttcaccagagctaccttcaagaccccgtgctcaggacacaactataagacccaggtcgatcggagtacatgatcgacttggaagacaaagagacccgtgtgacctcttgaacaatagaagaacaattgatgtgggaacttttagagaagaccatatccgggtaatagaagctccatctgagacacagacaaccattcacggggttgattgggcagagtttggcaccttagccactttagtaaaggggatcacgacacctgagttgtctgaattcgagctcgacagagaacagcgctcaccactctcctaaagaatcaaacccttcctatttctccaaagttcaagagcccttcctggcatcaatacttcaagaaagaagatacactgtctcccatccactacttcaaagtgcagacagatctacaaggtgttagagacgacgtcaagtgtaaaatcttccttgctacactgacaggcttagctcccttctggatcaatcgacttcatggaaagatctagtggatcaatcgacctcatgaagagatctagtgaatgcttctggtaattagtttgctcattcctgacaatgccagatcaagcctaatgatttgttggatgtcaagtaacaagaagaagagcccctcaaggactacatccaacagttcttagaggcagacgctaagaaaaaaagtcttagtgatgatgcaagggttatggcactcgtagtcgggctcaaggagatgagccctttgtggtctgacctttgtctctaggcggtatacaccatgaatgacttctcgatagagcatatggcttaatcaaacttgaagaagtcgtcacctgagcaaagggcacaaagggtggtaagaagaagtcgccagacactaaagcccctactactgagttgtagggcaatgagaaaaagggaggtttgaatatgggaaagagagccaacaatagtggcaagcaaggaaactctcctaaaagaaaaaagcctaaaattaggggtaagcccttgagagattatgagcctctcagtcaacaatgtcgtaacgcaaacctcttcctatcaaagaattaggaaaaagggacatgaaaaaattctaccgttaccacaacagctacggtcatgacacaaatgagtgtaaccagttgcgagatgagatataatttctcattagccagaaacatgttgctcttcagtggtatctatgacctgaagctccaactaggggcaataatccactccagtgtgcgctagttttaggcaggttggagatggtgattggaagccctcacttagcttggaattcaaggaagcctttagaaaggtatgctagagccaatcgacatgaaacaatagctaaagtcctagaggtagcagaacgacctccaacgatactaaagtgaattgatcacctttggagaatcaaactcttatcatgttagttaccctcacaacgatccattagttgtcgaggtccaaatagctaatatgatggtggatcgacgatggagcgccattaaacattctgttcaagcaagccctactcagaatttgaccccaccttccattaaaatcatatgttgttgaggggttgatccccttgatgtcggccaatgtcaacctaatggccttcatgtggtttcatagaaatctcaataattttaccgtctccacatcaaaatctgaagctaaaacaataactggaagtgtcttgttctcacctaagaactcataccgaagtgaccaggaaaaacttttaattctaattctagtggcttctcaatagagggcaatgttatttatggaattaccctaagctcttcaaaatactttctgttcaaaggcctataagaatcgaaccacatagcttactccattgattcctttctatcttggtcaaccacttcctcttgcaccaaacatagattaagagagccttctataggcttcctcgtttccaccaatttctccaccacatcaaccgaaaaatagttttcacttactttaggataagttatagccttgagtacgtttaacacaatttcatctccttctagtactcttagctttaactcacccttttccacatcaatcaaggcttagccggttgccaaaaagggtttcctaaggataatgggaactgtgctatcttccttcatgtcaagcacaataaaatcatctgagaaaataaacttgtccaccttgacaatgacatcttcaattatcccccttagatgagccaaagaatggtcagctagttaaaacattgctggcttggcttcccctagttacaatctcttgaacactgacaagggcattaagttgatatactcgcccaaaatcacataaagcattaattccctctatccttcaaatagtgcaaggtatagtaaaactctcaagatgtctcaatttatggggagcttcttttgtaaaattgcactaaattcttctattaatgccatagtttcaaagtctttcatatttctcttcttagacaaaatgtccttcataaacttgacataacttggcattttctccaaggcctctgcaaatagaaagttgatatgaaactttttaaatacttctaggaacttactgaattgcttactt

SEQ ID NO: 29343 - DNA, 3429 bp, Cannabis sativa
cctttcaacttgtttcaactgctgtacatggttgttacattggattttaagtacattcaaagttacttgtaatttttattattattcagcaaatgttattgcttcattgttccagtaagtggaagctggtgtttttaaatcacgttgtttttttagtttgcaatatggtacatgcttcttttcatttttctatgaatttgaaactgttgtcagctcatactgctttcttagtttttcttttcttggtataaatttattatttaaagtcctttacagagaagtttagtgacgtagatgtcttctacagtatatgatatgactgtatacatgagaactgtagcagttatttttctcttccttcaccgtggcctccatttgagtgtcctattaaagttcatatgaatatgctgaaactatttggagataataagaagaaaaatgttaacattaattcaagcacttagaataaggcttctgttctcccacataagatataattccttccgtctttccatcttttaatgtttctacagactactaaacatcaggaaggagattatgtcctcatcccatcataataggaatatatagcagctaggtattacaaaatgggcgcttctagctcaagaatagaagaagataaagccctgcagctatgtcgtgacaggaagaagtttgttaggcaagcacttgatgggaggtgcgcactagcagcagctcatgttgcatatattcagtcactaaggagcaccggagtggctcttagaaaatttgttgagcctgatggtccagttgaatcttccttgtatacgtccaccactgcaacacctgaacctcttgctctgactgagaagacacattctcatttttcattttcttctccatctgtgtcgcgacatattgatgctactgaaatattttccccaactccttcccctcctagctctagtcgaattcacataaatcatatgaaattcaatggtagcatttccaataaggttgaagaaaaacccccagtaccatttgttgggacagtgactacatcaagtacaccacaaaataccactccacgttccactgaagtgcctgaaggctcaccatttgaagatgcttcccttccttctggaactcctccatgggatttctttggtcttttccatccagttgatcatcaaacttcttttcaagaagacaaggctatgagccatgggtttgtgcactctgatgatataaatcatcttagggaagaagagggaattcctgagctggaagacgatgaagaaaagacatctttacgtggaaaggaagattctcaagattctgaagatgaatttgatgagccagccacagtttctctggttcgaagttttgaaaatttcaatagagtgcatgatgctggtgatgttaatgcttcaacttcagtgcctcctgttgaaactgcatcttcagaaacaaagtcattgaatggggcaaaggaaaattctcctttcttgccttccacagaaactgcagcatcaagttctgaggtactgaatggggaaaaaagcaagtctcctgatttatcaccattgagagccaaaaaatcagtcgtagtagtcccggttgagacaaataaaactcaagtaaaagaaggttgcatggaaaacaaggttgtccctaaggacttattttcaagcataaaagatattgaacttctgtttttaagagcctccgactctggtaaagaagttccaagaatgcttgaagcaaataaattgcactttcgaccaatgttgccagggaaacaaagtaagattctctttttctctcactcagcccctacccccttctagtttcattatatatttgtcaaaggttatcggttctaatttttattaatatatattttttacatggaagttatgttaatatatagtgctatttgatatactctatctacaatttgcattattaatatgccagtgtcaatttgaagatgggtttgattaatattccataccagtcaaatgtaaaaagtaatgcataatctagccgattcttttgcttgggtggggctcatgacttcaaattttggtatctgtattcttcatactatagaatatgcttgatccgtacaattttagaagaaggtccatctttcataagtttctccttctctgcacagctagaagtattcttcttttgcatattggtgagagattaaaacaaaagactttttactgtatcaggtggctcaacagcatcaaagttactgaaatcctgtttctcttgtggagaagaagatcctagtcaggttcaagaaggtaagttatctatacttgctgttgctggtgatcttgtgtgtgttttagattttagaatctttttaaatatatattttatttatgtaaaaggaagaagaacttgttattgcaattactatgaatatttcattgacttattcaaccatattcaagagatcaagttttatcatttggaaaaatcaaatcatgtggaatgtgttggaaaaatcaagtcccttgacatgtagtagttaatctcctggtttcataagattattttctgtaaacctacctgaacttggaggatcattttcctattaaaattttttccgatttgtcctcttgctaaatcatgcctttagggggttctcacaaattagattgcatgtgtctcttagatttaatgaaatgaggaattcaagtcaatatttttctattacttttatttagtattagaagaaggtcttctttgcttgtcttcggtagggattattgtaaaccttttgttgctttttaaactatgcctattcctgtatcaagactcaaaggctcagaacatctggctactcctctcattcaaaatccttttgctactcataacgatcacccttacatttgtatcaccaccatcaaacttggacctcataattaggtagaatggtttcagtttttgagaccatttctcaaggcaaggggaaatgggacaccttagagggctgtttcctcattcaaccaagggaatgaagaaacctggtcttggttttgtcatggttcatcaatttgattcatccagatattgggagggcttatatttagctttccaatttgaaagaaattcgggaagctgcagcagagccactctaattttattttgcaatggagacaaagccccaagatctgactctattgaattgattacttatacaataatcatcgagtttcctttatctcagtttattgaaaccagagttgcctgatatctactgtcccctctttagaaataattaaaaaaattaattcttctttttattagaaatgaaaataaagattttttttcttcattaaaagtcaaaacagagattatattactaacaggacgattggttatcatctaagctacaatcaaatgagatactaactacgaacc

SEQ ID NO: 29344 - DNA, 3713 bp, Cannabis sativa
  modified_base (3664)..(3666): a, c, t, g, unknown or other
accagagtctttggtaggaagaatttttagagctcgatattatagaaatggtattttctattggcggaattagagggtaattcgagttttgtttggcatagtattctcgaagcacaagaagtggttcgtgaagaagcaaggtgtcacattggtgatggttctacagtcaatattctttcggacccttggctaccagattccgaaaatctgaaggtatcctctactcatcctgctctattgaatcaaactataagtgctttaatggttattgaaaatttagcctgggatgtcgacttggtatatgacctctttaatgatcgggatgctagtttaattcttagtattcccttatcttcaagtcgggaaaaggattcgtggtactagtgtttggaaaatacaggccatttttcagttaagtcaacatacaaattcttacagttgcaaaaggagtcagagctcagttgaataattctaatttttggaattgtatttgaaaactgcgcgttcttcccaaagtaaaagatctactgtggcgtgctgcaacagattatctccctacaaagacgtgattgagatctcgacatgagcagattgataacatttgtcctaagtgactgcccatcctgaaactccatatcattgcttggtggagtgtccttttgctagtatttgttgggagcaaacatggatcaggaaggatatccaaggggtgtcttcttttgcagggtggctggagacgatgtttaaaagagaagccatagtagtgacttgttgggcattatggaaaaccaggaatcagcttgtttggtctgataaacattcgactgctgcttgtgtctctatcctggccaaaataaccctctctaattggtctcacgctcaggacaaagtggtggttcctacagcaacatttttaacagatatgcatgcattggagacatggcaaaagccagctgatatgaagctgaaagtaaacgtagatgctacaacttttgacagcaatggtacctatagctttgcgtgcgtggctagagatgctaatggagatttggtggaggcaattatcgtctatcgggcagggaacatgtcacattaactggtcgaggcaatgggggttagggaggctttaagttgggtaagaaatcatgtcacagagacaagactaataacctgggctgggcccagcgcccaggttgacatattgtgagcatgggctgtttctgatcaagttcataaaaaagtatttcaggcaattttttcatcattagaaataatgaatattcaagcaaactcggagagaaaaccacaatctcgagtccttggaaacaaggcccagcacccaggttgacctaggactaggctcagcgcccaagttgacaatcaacttgggacgctgccttcaattgctcaaatgccaaatctgatgcgcccattgaattcagaatggtcaaaaaaaggggaggagatgtcatcctcaagttcaaaagccttggaagtatcaaaaacaaaatctcgcgagctcgggaataagtatccaacgcccaagttgacaaaaagtctaattcgctttgtccaaatctgatgttgtttcgaccgtccgtctagtttttcacaacgacaaagatatatgaagtcagaaaagtcaaattaacaactttgcatttctcatttctagctcacctggaaatgaagagttttgagtctttcatttctagagaacaacaatatttccgaaaattggggactagcttcgctggaacatagaaattgactaagtgatgtcaaaatatcacttagacatcttaaagtacattcttgggatattttttcacttacccaacatccaggttgacgtcatatgtcaacttgggcgctgggatgtcaacctggatgttgggtcatgaactatttttagtaaaacagttacaacttacttaattttgatccgattgacacgattcaacttgtgtttcgaagctaatttaatgttctatcaagtcatgtctcacattctagacataattctgaaactattgtcgttaaaatttgccttaaaagggttaaaaaaataaattttaaattatgttacaaaaacaagaaaatttgccttaaaagagttaaaaaaataaattttaaattatgttacaaaaacaagactaattgcaataaaaaactttttaggaaggagaaagcacacgaaataaaatatttagagaaagcttgggtgaattattattattaattggtttcataaaaagaaaagaaataattagagaaaaatatcttgcattgtttaacacgagtgttacatagcacagctttctttctccatcacccatcgcccaccctctatctccgttattcaatctcttctctatcggccaagtcctcgcctttcttgctttactaactcatcggagacgaccaattccgtttcactatatactgtaagtctatttatattctctgatcactgagataagattatcagtacccatgtgaaaaagttattcagaagaagagcatttagtttaaagtttcggtttttatatttccagatatctaatctaagctcatcttcaactttaacagaagtagtagtgggattacagttacttcatcaagttcaacgatggcagttctcaatattgcattacagttacttcatcagcaacacccatctctccggattctgcaaacccagctgtgccagacccacgacagaccaaagtcattttgcccaagaagaaggccgtgaaatggtccactgggatggcaccgggcgagtatggtggaccaccgaccaccactaaacttcgcaagtactggggaggtgaaggagaagaccctataacatctgacgagtttatatggaacaaagacttcatgagtcgcatgaataaattgattgatgactctgcttctccacctcaacaacctcctgttaaggtctcctactcttactcttaattgctctttttgtaactgttaagtgatcaagaagaattaattttattgcctaatattatcaaatagagtgttttgaaaaaaaaaaagcgtatttggtttttttcatttgtaaaattaatggattttatgtgatcaaatgtgttgaatgcattgcaaggaaaagcctaccaagcgtgagatagaatgtttgtcaaatagagtttgaatttggatatttgtagattcaaaaaatgaacgatgagtccaaactacaatcaattcactattcaagcagctgaagcaatggaagattagaaaggaatttcactatactctttttagtttttctaataatattccacatagtaagactttttttaataattttttcttctatttaaagatcgcacattttctttaatttttgttacataatatttgctttaaattttacaaaacatatatcttgttcctctacaatactattttgttatgacttatatatactcaattatattttactagccgaatataatactataaatattactttaataaaacaaatcattctcataatcatacatttagttacacaaatctaaataaaaataaagaactaaactttaaataaaactaatatttacgtgtcttggcacgtaacttctacctagtatatattagtattggacagggccggcccaagcattgggcagcnnnggccattgcacaaggcccccatttttttaaggcccaattttttattt

SEQ ID NO: 29345 - DNA, 2552 bp, Cannabis sativa
aatgtattccaaggtacattaaatgggtttcagggtacattagatggatttcaaggtacgttaccatattttttaaccctaattacccctagatcaatcccagccctcagatcaaataactccccatctaacggctatcgtacatcacgaaatacatttcatgaaagtacatgatcacgagacaaaatcatgtcccataggaaattaaattctttggtatgggtgggtaggcaaagtgtgtgttattcgccagtattacaccctgagaggaaagcaatatatatgtcggttaattaattgggttattcattttcgtaattcactcaattaaatacaaaggataaaagaattaattttcacaacaaaattcttgtacaaaggatgagcatttaaatctacttccacatttcaaatatgtgcattgttttaaaaagttttacacattctttacacacaattatatgtatttaataagtaccacacttttacttcatacaatttgaatgtgtcacaatataacattcttaattattttattagtattatttctttttgtggcaaattaatccatattcatatatagatataaatatttatatactacttctaagatattaaaaattttttagggcccaacactaaccttgaataattgagatcccgtacctaagcaccacaccttaactccagcctcaaacccgaccctgaccctcgacttagggccccaaacttgaacccagatccaaacattggaccccatgcccaaccccaaatctacactgaccctgaatcgggacctcgatcccagacctcgaatctaactctgacaccaaccttagaccctaaaccccagctacgaccccaaccctagaccgtagctacaatctcaactccggacttagaccatgagcccgatcaaaatatccccactacaaaaaaaaaaaactacatttagtgacaaccttttaatcacaacataatttttttttgtaactaaatgtgacttttagtcacaataaaaaattaattgtcactaaaacatagtatttaatttaatttcagtcacaattagtgttgtgactaaaaaatatatttattagtcacaacaaattgtaatttttgtgactgatacgttaactacaaattttttactcataacataggaatggtaatatatagttaatcacgattttttcaattttaatgacaaattttattatgactaaaagtaaaaaaatttataaacccacataataacttagttcataattaaatattacaacacaaatttatacatccctttttcttatttattccataatacaatacaaatattttctccaaacataataatttactaatttaatttaatacagaaggcttttatggacaaacaaacaaatccttgttgtctttaatcatcaacactaataatagaagttatgctttggcaaatatatatattattatatagtttgtactataatttaaaatatagattatctcataataaaataaaaagaataaattataatttctccacaatatgataacaaaaacgcctcctcataataattttattgagtgaatattataagtaaggtacatgttgttcactagatgatcactaatgtctctcaacaacctctcaaactatcctttcatgctatagtatatataaattagtagatgaagatccctaattttctactgtaaaataaaatttctatgaatcacattgaagatttattgattggaatataatcatattaagaaagaaaaagtgattattttgagggccatgcaaaattaatattggctttgaagtgttgtatattcattgttttggttctataaatatatttaattatacatatattgtagataaatatagattcaaaaactacaagatgagactcatatggtcattgttgtctcaacagaattgattgacaccatcaaatgattataatatatataatatatataccaagccgtccaagtttaaacccaaaaccaaaaacaccaaccaatttgatgaaatagtgagatcatgagtgattattagctaataattgtcgacattaattatacttgttattcctaataatttataagttcatgttatcactttattactataattggtattgaaaggacctcactacaaaaagctgctccaaagaattttcaattttatttttttaaatcgaaggaaagaaaatagttttaagtacaagaaagaaaccctagcaacaaaactaatttattaatatatatcaatgcccatcaagatgattagattgagggtacttttatggtaagttttgcctttatcggtaggagtgtctttgttttaacactttaattcttcaaattcagattggctagttgttctctaataaaaaaccaacttggatattattttgttcttgtagctagagacataaaaattctgtgcttgagatgagggttttccctaactgatacacggtgttgtattcctcgatttctttgctcttggtgttttattatggctgagataggagaag

SEQ ID NO: 29346 - DNA, 2362 bp, Cannabis sativa
gcggcagccggggctgcacaagaaaccacccctcaaactcaacctgatccatctacaaggcaaccatgggggagacaccaaagttctaggaccaagaggcaagaaaataatcaagggaatcccaaaaaaaagctcaagaagaataacctaggaatacaaaagatatcctaatgaatagagaaaatcaacccaatacgggcaacacaaaaaaccaggggcatcgacgtgatgtcctaagaacttcccatggattaacaaaccaggaaaatgaacaacatgatataccagaatcaccattggtgccaatagcaatgcttatttgttaatcaaaatttgaaacgaggatacaaagagtaatgacataacataaacctaatatgtaccatgacaatatacacacaaatattatatgcatcataattttttgtaaccaatcagataatttatttaaattgagaatttcaatatatatatatatattcaatatttgagtgtatgtatgactatttgggtaccaaatatatgtaggaattatatatatattcgatcatatatatgatgaatagaatatttataagggaaaatatatagaatatagtttttcaattttaaatctaataatatttattgtttgttggcaggtgttgtagtttcttccaagtgactgtcagtcatcatttgcaacaaagagaaagcagtaattaaaatggcggaatacaattcatattctcccctgaattctctacgattagagttagagaggcctcctctcttatttaaagaccgttgtatctacagagttccgaagcggctaagggatgtaaatgataatgcttacacaccaaaagttgtttccataggcccatttcaccatgccaaccaaaatttgaaaccaatggaagaccataagaagaggtacctacgtcattatcttcaacatacacaccaacacatgaactattacgtaaatatcataaaagggaaagaaaatgaactgcggagttgttatgcagaaactataccattttcaagtgatgaatttgtaatgattattcttctcgatgctattttcatcattgagatattgttggttaagtatggaacgggaataaacgttgatgatcacgatcacatctttcatcggccatggaggttgatagacatcacacctgatttattgttgcttgagaatcagctgccatttttcatctttgaggaccttttcaacccagtacaaagttatttatgtcctgatgaacctatttcaatcgctaagcttgcccattctttcttcaagagtacgacatcagtatccaatcgggagggttcggagggacactctgatagtcatagaacacaacactttctggatttattcagaatctctatccttccgccggagcaaaattttggaacagaaactacttcaaacctccaaagtccaacaaatcgacgtgaccagcatgaaatggagatgacatttttacccaatcatccccagcctagtgacgagtctgaacagaatagtcacataaaacccaaaatgaaaaatagtccaaacctcccaagtgcaacaaaactacatcaagctggagttaagttcaaggtgatgagaacaagcaaaaatttgcttgacatccaattcacattctctcaaggcattttagaaattccaatattaacagtagacgacttcacagaaaccctactacgaaacttagttgcctttgaacaatgtcattacacttatcgtcgttacatctgccaatatattttgtttttggacaagattgttaatacagttgaagatgtggatttacttgtcaagtatgggattattaataatctattaggggacaacattcaggtggctactatgataaacaagctgggtgatggggttattcattggaacgatgaagataaccattttgcggtaatatcgcatgaacttcgtatgtactacggaacccgctggcacaaatggaatgcaaacttaagacaaaactatttccactcaccttgggcaattatttctctgattgcagctgttcttctcatcattctcaccttaatacaagcagtttgttctgttatctccgttgttaaacactgatatcctctcttctcataaggtttagtttttctaagtgttgcaatcgtttatgattgattatttatttgtgtgatgagactactacattaaagattgtttgatgtaagtttgaagtgtaccatattataaattattattattattattataaaagtattagttacaaaattataagagtaaatactattttggactctctgttttacaaaagttattaattggaccctgtgttttgttaaatgacaa

SEQ ID NO: 29347 - DNA, 2596 bp, Cannabis sativa
tattttaaatggtcgctaggcgacaacttttgtattaaatgttttgtattatgtttgtaaataatttaaatatgtgatctcagttttgtaaaagatatttattttcatttcaagagtaattcagtaaaagttttaataaatcataattttctataaacctgttgattaacaacagattgcacaattattattaaatcacaatcacacgcctaaactagtagggtgttacacagagtatcttaaggatgattccctaagagatgttacatgatcaaaagagttgatctccaaatcattgggatgaacccagtgaaagaaaatatttgggtccagggttagtttagaggaccaaatttggatactgctttcgaaagcaggtagaaaagttatgttgattctaagcgtagagatatagggtttcaggtagggaacatgctttcttatgtgtttcactagtgaaaagaggtgaagtgcttcaaaaggtaaattgagccctagatttttagggtcatttaaaatttttaagaaggttgaacaagtagtgtactgttggtttcttctacatgttgtgatgttgaggggggacatgtcaaatctgactcatgtcttgagattatgaagccttaaagctacaaccagacttgttctataaggaaaacctagtacaaattcttaataaatataataaagtcttttggaataagactatagctttgacaagcacactctggaaaaatagttgggtgaaggaagccacctgggagtagagtctaccatgagggctcaatatctggagttatttaagttagattttgaggaaaaaaaatccttttaatagggagataattgtaataactgcatacttagaatatggaattgatgaaatgtattatgtgattatatatatatatgtatattatgtggtgtgggtcttattttcatgaaataggcatttgagttatgatttctcaattgttgagactttattaaactctaggtgtagtatatatgataaatatgaattttgctatgcccgataatagtagaaatgtgacattttgaccattagagtcacattcatgtggtagagtatttgagaattagcggggaaagattattagacatttagaatatcagattatgtggggttatagtttttgacaatttcacccttaggcttatagttttcttaagtgtgaagtaaagggaaaattggtaattttaccttaaggtttatattaattttagtgggttgctagattattctagtgttttaggatgatactaagtaaagaataaaacataatttaagttagataacattaaaaccaaagaggaaaaatccaatttctctctctctctctctctctctctctagccctctctagaacccaacctagagaagaccaaaaccaacctttttctgggtgattcagcaagaatttagtaggttttcaagtgtaaactgaaggtaagaatcctagctcctctatctctttgatttcttaaatttaagtttggttttgtttagatttttacgttttgcttttgttagggtttggtttgtttaaaatctactttgggagctgttatagttgttgtgttgagttttgattaggtgtgatgtgttttgagtaagcttgagctttgaaactcaaagcttactcaacaatggcacttttagtttcagagctttgatcatgtgttcattgttgaattttattcattgtggtgttatttggtgttctaaaaggtttggtgagatcactactacaaaattgacttttttgaagggggtcaatcataaaaaccgttgaaaaaggtaagcagagattttttttccaaaggtttagaaccgaagtaaagaaactattgggaaaaacaaatgtcaacggtggagaaccgtgagcaatactaaatagaattttttaaaagaaaacattgaatgccaacactttataactgttgggaatacttaaactattggaaaatgttctttttagtatactaaaaaaaattaagatttataaaaaataatttttttcttaatgaaaaaattgtatttaataaaagaaaatactaaaaaaaaattcacatttaaaaaaaattgtattttctttgcttactaaaagaaatttgtatttaataaaataaaataccaaaaaaagttttagatttaaaaaataattttttttcttaaaaaatttataatttgagaatttataaaattggaaaattttcaattagaggataattttagaaattagttgttgttatccatattttcgcgcatgagacacgtgacatgattaaaggatgaagttaattagcagaaaagattaatcgaaataactcataacgtatcctcgagggaacatctcggcaatcttggaagtgtgcactagacacctgacagattgagtcatttgtggacaaataacatctcccgacccagagggtagtcaagacagatgattcccagatggaacttccttaagtgatgaacccagggcacgatagtactctcgcatgcaatgactacgtcagcgttaggggtgggcatcatccaattcaatccaattgaaccgaaccgatc

SEQ ID NO: 29348 - DNA, 2027 bp, Cannabis sativa
aagattaggtctttcagcgataaacggggtttacacggcggttggcggcggagtacggcggcgcgtgagattgcgtagaggcgtttgtagggtacggaggttagattgtggagatttgatagggaagaagagaattgggtttggcaaatgggtttccataaattgttggaagacattaaaattgaccatgatttggagacgcaggaagccatagctagggttttggggtcgaggaactgagagattaggttgaggatctcccatggcggtggagaatcttgttcttcagtctccattttttttttttaatctatttttgaagatttatatagaaagaatggtggtatgagtgtgtttgatgacacgtgtcaggagtggggagattgcatggagtttggttgccacgtgggatttgtgaagaggtagtgttgaagtacacgtggcggcgtgaggctttggcgtgtctttgatgtgtttttggggtaatcatttctgttgggacttgggtttgatttagaatttggttttggatttagattggtttaatctgaaaattgacccatcaatctataatttgtcttaaactacttaaatttctatttaatcgctttaaactacttaaattgaattttttttcattaaaatatgatttaatataaatttataaatagattaattattgtatattttacaactataacatataaaataattgtgtcttattcttttaattttaatattaataaaataataatatactatcattatatattatcaataactataattcataaaacaaaaaaacttaacaaattaatatatatatgtataacggtcgggtttcgattttttcgatcggtttattattcaaaaaaaattaactgtagttttaaccgttagcgatttttttagttttcagttctgtccgtttctgtaatgttcaccaagtcagtttgaatgatttctttagtttttttaatttcatgctcagtcctacatgttgtgttcgggttatgttgaggtcttaaattaattaaagagtttgttggctcgagcataatctacgatacgaaaaatttataaaatataaattcgaacacaacccgcataaattttgtgtagtattgaactcgtaaaatttcgagttgtattcgtgtcaaattcacatgtcgtgacataaattgtccctcctagtttttgtaagtgatgtacgacaataaatatagagctgaaattagtatacgacaatgtgcaagacaaagaattcataaacgacaacttttttattaaaacggcaatattttttcgtgatttagaaatgacaaaccatgagtaatacattaatattcgagttattaatgtgaattaagaatgtaattgtaagtgggtaacactttttttgaaagttcatgtgctgaaattactattaattaaagaaatagatagatttttttgttgtctccaactatgatctttatagaattttaattcaattctattaaaagaaaatctcaaattattgtaattactgcaaatctacctctgttgcattttatttatttttctaggtagtttgatgatttagcattaatgtgacactaatttaatgcaatttaagaatttataaaattatatatgtataaataataatttactgataaattatgtaaatataaatttataacttagagtaatgtttgtttaatgtcaataaatataaattggacttttatatagtttaagttagttaaataaactctgatattgtattgtagttttatacttttgactcatcataactactacataggtaaattattattattattttttaaaaaaaataatagaagaatcctcaaaataataaaattaatttaactactagaaattaatgtcacttatcataactactagaaattaattttatattagttatattagaaaacattataaaaaattgagattggaatattattttacatcattttaaaaaataagtctttaaattatcatttaagcaaaccatt

SEQ ID NO: 29349 - DNA, 1286 bp, Cannabis sativa
ggtctttctaaagccaagtccgccatgcgacttgggtaagcacaagtggtcccaagcctttaagcagatccctctgttgccttgctcacagccccaccataagtctcttaccatcccgtcaattctcgtggcaagttttttcgagagctttgtcgtttgcatcgtataaacaggcacagcaaggccaactgatttgaccaacatggcctgtcctgccttagaaagagattttaacttccacccatgcaacttcttaaccagattgtcaatgataaaattgaagttagcatccttttgacgagacctaaataaggggagacctagataatttatgtttcccatcccacaactgagcccaagagcctgtttgatgcccctcttcattccgttgcttgtattaccagagaagaagattgatgttttaagcttattaactctttgccccgaccaatcacagaatttctccagacactcccacatctctttagcttcattcagattagccctacctaccagaatcagatcatctgtaaagaacaggtgagacagacaagggccatctctgctcagcttgatacctttaatggaaccggaactcagagcattctcaagtaatcgcgaaaggatttcagcagcccagataaaaggattaaactactaatctttctattattgaggaaaaggttgaaagatgtcgttgtgatgcactgactaacccagaggtgaaacttctcaggggccctaaaactgcaaagcacatgatcgataaaggaccagcttagcttatcatacgccttaactaaatcaattttaatagcaaagaagccctccttcccatttttcttcttgaaagagtggataatttcttggattaagacattttattatcccgaatgctccttcccggaacaaaagcagtctgggtaggacaaatcagccttgggaggattgttctcactctgttagcaataatctttgaaattaccttgtagatgacattgcacagggcgattggtctaaactgagccaccttctttgggttgggaattttaggaatgagagtcacattagtagcattaaagctcctgtgcaacttaccagataagaagaaatcggtcacagcatcacagaaatccgcaccaattgaacgccagtagtgcttgaaaaatagaaccgacattccatcaaggcccgaagccttcaagctacccatagcgaacaaagtttttctaatctcttcctgacagggaatgacctcaagcccttcttgctctgaaggggagagt

SEQ ID NO: 29350 - DNA, 1687 bp, Cannabis sativa
ctaaaagaaaagaaacatttaattatgaaaaaaaaaactaggaatgactattcgaagataacaatgacaatgtctagtccagtattttattcattatgataacataacgtgataatgatatgataattttgttttcagttgatggggctccaacgaggcttgaagatagcaacgagttcttctttagagggcgatacttccttgaccacaggatgagtaccgaagtcatggctccatttacagagctttggaaactttgcctctgtcaatatctctactcccataagttcttctattgttgggatccattgggctatgaagtttcctgctaagtccaccatcccaattctttctcctccaaaatacttgtctttcaactctttctctaagatctcaaggtactcacttacttcttccaacgcatttttctgctcctccttcaccttaaccactttaattgttgttgttacgatctgggaaaggatcatattcaacgtcaaattattacttgtgtaaacacataagttgttcgacgaaagttcaagctcaaaaaagtgaaagagagtgtctagaacaaatggcatatgggttatttcttttcaaatatgctgtgttcgacgaaagatctagctaaaaaaattataaagattattttggaagaattgttaccttgtcatcaatgaaacgactccagaaacgggcttgagctctttcataagggtgttgaggcaagatggggtgagtcttccatgtctcatcgatatattcaagaattacaagtgactctgctaagggctttccattgtggacaaaggcaggaactttcttatgaattggattatatttgaggagggaagtactcttgttcttcagatcttcttcatagtatttgtattcaacacctttgagtttcagagctatgtttactctgttactaaaagggcttcccctagcaccataaagcttcacttcttctcccataatttttatattgacactgacaaaaaacacttgtgttttggatttgcagctgtgtttgttaaaggccctatttatgatacaactttcttgatcaacaagatgtttttcaatatcatattaaaaatatattggaatatgtgttatttataaaagtagtggtaatgctatttatattgtttttaaaatttagaccaaaagattatatattaaaagaatttgggtaacattttgtaaaggcgaatggtgatgtaatagcatacgaaatcaattggatgggtaacatcaatgagaatcggttgtccatctcctatgacactaacgagaacactccaatgacactaagtcatttattttacaatttcttgaggaagaaaagtcaagttcttattttattttatttattattttttaacaataagtgtttgtagattaaaaataagaaaacaagagttacacctcaccgggattacatacaatgtattctattatagaagaaagcttaactattccaataacatttttggcgaaagcctatttagctacattatgggtcgcaacattacaaattttgaaaataaataaaaaattacaacttaataaaagattatagagatatttacaatgatggacatagttaccaatattctaactggaataggttcctttcagcatcttgataccagtctcacagtcactcttaataatc

SEQ ID NO: 29351 - DNA, 2638 bp, Cannabis sativa
tcctattctcattctcattcctatattttcattcctcccaaccaaacgcctagtttattggcatcatgatgatagtcaactcatcctcaatatatataataaacagtaaagtagattaaacgaaatagactaattactattgagtatggagtaagtcaattatagattatggtagtatggtgtgagatcaaaatcagatcaaatataaagtatgaagtaagtcaatgatattcgatcacaatttaaggggtaggcaacattcaatctaattcaaatgaaccaaactgatcaaatccaatttaattacaaaaaattgaatatttaattacaattagattggatgctaaaagttggattctaattggattagatcaattattgaatgttaatctcaaaattcaattaaaaaaaatccaatccaatcacatatatatgttaaaaaattatttatatttatttatataataaaaaaatataaaatttattaattatatttttattggattttttttttgtgttaaatttgtaacagttggttgttttgtgtatttattttcaatgtattttgttttattttattatttagaaatattttgttttaattatttgaaacttttaattgcattacattgtaatgatgataattttccaaatctaattactaattgaattggattgaatgaagagaaaaaaagttgaattggatagatactcaacccttcacaacatttaaataagagaataatttaacgatctcaacatttaaatatgaggataatttaacccacataaaaatatcataaaaatatgagaatttgtatgaatggttggagctgcacaattcagtattatatttagaattgttcgtacgcatatattttacagtgaaccacaacatagaatataagaaatcacaagtgggtattgtttggtgttgcatgaattctcttttaacaccatttaggtaaggtttctcacacatggtattgcttcgtcttaattaaatattaaaaaacaacccacgtcacaatataaacagccaagttcttatcgatatattttgttctcgaagaacccaaaaaaatccttgagtgaagacttgaaacttggattcacttcaagaataaagagacagattcttaacaaaaatgtggtggtgatgatggtcttggtgttgtgggaaaatcatgaaaatgtgagagatgcatagaaagcaactaaaggaaaagaacaaaaatctgctgtcccaattaattgcttcctctcttcactatgtgcacaaagtaaatacagatttgatgtataagcaacattaaaaaactacacaacttttttataatatagttcattctaagcatacaggagaaaattaaaaataaaacaaaaaagaaattacagtaggcaagatttaaaggaggagagagataaagattacttaaaagagttgaagaagttcactgtgtcgctaagagcctgaatgaagctgtctacatcctctttagtgttataaaagtaaagacttactcgtgcacttgcattgattcctaaataccgatgcaggggctgggcacagtgatggcctgatctgatggcaacaccatgctgaaactgtaaatgttagaatggaagccatctctcctacttattacattaattttctcatctttcttttatactttactatatcttaaaaaaaataaagcctcattcttttcatacctgttggtcaagaaatgtggcaatatctgttgggtgaatgttttcgacattgaatgaacaaagtgctgcccgaggagcattttttgttggcactggaccataaatgcggacattagggactgatcggaggctttcatataggtattctgccaactcaacctgtaaaaggatttcctcaatgtataaataaactgatatattgttttttctttctatgcatttttacgtcttttgagtcaaaccctgacctgtgtctatcctagagaaagtaggaccaattaattatttatttcaggatactgaaaaagagaacatgtggaacattagattaaaaatatgacagcatttgctcatgaaagaaacctggactctggactcgggttcagaactttggaataaatttttatatgctaatcataagaaaaactatgcaaccaagattgaagtgttcatcattaaaagaatctgccaacacaagaattctctaaaagtccacaagactcaatgaaccaagtataatgttttcccctaattctggaaaagaaagaatattctcatctccattctgaatcacgctgacacaatatttacataatttaatgaatattatttaggagcaacttttaagcattaaattcctagaccaaggtataacaaacttttcctgacaatgatattgagggtgataagcccccaactatgttctattccaggtgtaacaagaaacagcagaagcaaaacattactagctcgactagtttttgagcttaggtgaggcttttgggtgacatgttagattacaggtctgacttgaatatttaaaacaattacctaagtaaaaatgtatccaatactatccttgtattcggcccaatccttttagtagaacttaatgggaataagatgagaggcattcata

SEQ ID NO: 29352 - DNA, 2601 bp, Cannabis sativa
tcttcaacttcaaaagcttacctcgctctacattcaagcacactgtaatgcagattgggtagttgacccttatgattgtcaatttgctacaagctattgcgtgtttttaggagaaaataattaagtggcatggcaatccaagaagaagcctactatgatcacgctcttccacagaagctgaattccatagcgtagcagtaattgtgcttgaaatcacttagattcaatctttacttactgagctgggtgcccaaactcctttggtttcaacgatctagtgtgataaccaaaggtttgtcatgcttgctgcgaaccttgttctatatacaagaacaaaacatattgaaatagatttatactttattcaggacaaagttctaaacaaagaaatcaatgcatttcttgtttatgttgctcatcaattggctaattgtctcactaagcccatcttcaacaatcattttcctttccttaaagataaactgaaacacttagtttgagaggatagattgtcaagggataactttgtaacatctagttgtcggttataactaactttcattttattagagtgttaattacattttctattatttatctcttccctttctttgctcaattcaggttgtatgtatgtcttgtactcttttcatcaaatcaataagaattacattcgttctttcattcatttttgttattcaactataacctcaataataaacttgattaattgactaaattatatatttgctcaatcctgatttaaagaaacagtataaactttctataataatcgtgtatgggtgtatgcataatttttgatatgcaccaaatttaccacaacttttaacatatggagaagcttttttcacaaaaatatcaaaacataatacatcacaaatttagcactattagagatactcttaacattaatttttttttttcaagtattatactaaatgtggtatttatattattttcttagtttggcaaatttaatattttttcttgttaaatcatctattggaaagatggtctaattagggtacataataaaatgggaacacaaaacattctacgaaaatttgataatgtgaaaatgattttttgatcttaatacctctttctaatattaatggctacaatttgtatagttaaaaccctagacaacatgtgaggagacttttccgacgttcccaaaaattaagaccaatttatttgaagtttataaggaaacattcaaaaagaagggaaacaaagaatatggaccaattccatcgtcctcttgactagattagtagctatagtggtccatttcttcaagaaaaagttctctttatttctttttgttttcctatatatatgcatgtattttctcatatcttctttacgaattaatttcttttgtatacgacatttttggctgtaaatttataaggcaaacaaatttcattaattgaagtatgaaacgtacaagtcaaataagtatataataacggtcacaaacggagttaggttggctcggaaaatagggtttagccgtgttgaaactttatgacagtgttatgaatttttcgaatctcttaaatggaatttaagtcaaaaagctccatttgtactattatttcactcttttttatttttgtgatgaagtgcgttactaaagctacgttggttggttgaccccttcaaaactctctgtattaattaataagtttattatatggtacatgatgatcacaacacaagaaaataactatttttatatatatacaatgattaccgaactgcctaactatatatagtcttttcaatttaattattattattattaagtagccgttgtctaacaatatcaatgataatgcccctttctaaatgaaaagctccaaaatgatgatataggagaaaataaggggtagtgattacattatgtattttaagattaatgatacatgtagctaggtatgtaaattcacacaaaaacatgatgtacattggggttttcatatcactgcaaaaaataaaatatcacttttactgataattttttagttacaaacaaaaaaatttgtgattaaatgtgaattttagtcacaacaaaaaaattacttgtgactaaatatagtatttagaaataaattgttactaatttagctatagtcacaacaaatattgtgattaaagatacatttaatcacaaaaaactgtgattttgtggctaatatttttagtcacgtcacaacgtagaattgataatttataattagtcacaagttttattgtgactaaaagtaagattttttataatatatccgatccaatctgcatatattattttattcatagtgcatcaagtgtgattttatattttggatatataattcaatctaattagcaaaagtacaaattagatctattattttggataagttactttttaatattgaattatttaatatttattgaagaaaattcacataattaacaacaaaattaaaaaaaatattattactttatatctccatcaacaaattaaaataaataaacaaaaaataacaaattcaaaacaagaagcaaaaaactacatgtataaagaaa

SEQ ID NO: 29353 - DNA, 3836 bp, Cannabis sativa
tgcacgtgtcattttcttattggtaataaaaatttaatgacatggacaaaccagagactatcatttggtcattgatttgacacttaatgttcaggtacttaaacttaggccttgttaccattaaaaattaaacttaagtatttatctgcaactggaagttaagcttaagtatttatgccgcaaattactcaaaataaaacacataaaactaaaatattatacctcagactgatcatgatcatagcgcaccagaaatctacaccgacagccccttacatcatgtcttcgtctttgagcatcaagaacatgagcatcaaaataaagagcctgctccttaccttcctgcaaaatgtattttcgcgtaaatgttaaagaaaacgaaaagaggggttggttgttaacttctttatagagtattcattaaaatataaattccaagaactctaaatgagtttcacctgaaaacagagtatgagatctccaggaaggactgcaacacattccgaggattcacatggaagagagcgttgcctcacgtgcttttttacattgacccactcatcctcttcaggcccaaaaccagcaaatcgaatcaacacttcctaaacaaccaaaaagaaagcattcagaacggtcgagcaagtaacagctgtgccaaattcaacataaaacgaaagaaatttttggaaagaatgaattcgacagagaaataagtaaggcctgtaaaatttgttaccgatataattactaaaacatattaaaaagtaaagaccttgtacttagagcagctaggatctaatcaatcgtctctttaccggttccaaactaacaaactatactcatctccaattctaagtttcgcaacagcatccacatatctcaaacatccaaaattcagtcaaaattcgaccaggtcaaaagaaaatggtatgttcatcttacctaatcgaattatctgatttcaatcttctccactacaactaatgaaaattagaaacgaccacaatctaacaaactcaatgacaactacaaccatctttgaactattttctgcagacaaaaaaatatatatgtctataaaattatccagcagatctttaaaacatgaagctacacatccccggagaagatagatttgaaaattaccggatcaccactgtccagatatctatgggagaaaaagttagcaacgtcgtacctgtgtaaaagacaagaattaataatgtaatatggggattttcccaagttactaagcgggtaatatagcagacaacaatggcaaaagacctgttataataaaattgcgccgagatacttgaatttgttttatccaatttcaatagtcgcctaatattgatcaactttttcctaagaagcagtcaagcaatcccacccgacacaaccatttttattttaatttaggatccccgcctaatcctacaatatttggaaactagaaaactatagcaattgctatgtagataccgaggagggactcgaacctcagaccacatgcttgaccatttgagctaccccttttgggtacccaacacgaccattttaagtttgcagttaatacgcgttataactctcaaaaagatgaattgcattactgatcactcatttaccgttacgaacttaacatcccctgaaaggacaaaagagaatgtgtagacatgaatgacaagagataccaaccatgcaccatccctcccggatttagcttcaaactccattacagaattttctgaagcaactcttcccgcgcctgaaactggttgagaaagaataaagggtaaacaaattgtcaagacgcagaaatatttatagttcaatgcttatacctagaacgaaaaaacagacatataacggatgatgactaaatttgctcgccataacatactttttgaaacttgacacccaaaagaagatctatcgaaatcttaatatgttgagtaaagttaaaaatatacatgacaacctataagtaacattctagtctcataaggcgagtgtttatcctttaaacttaacgacccggcgtgtgcccaaattgataaataaggcgagtcttaacaatatatagtttttgacagtaaaactatctcacaggacagaaaatggaactaattcacacttcaaactacaaatgtaagggcttataatctcggtacataaaacaataagactagacgtgaaagcacacaatttaggagaaagaaataatgataacttcaaccaatgagagagtgcattttacctgaaggattaggcataggagcagttaaactttgaggcatatttctcattggcattggatcctcccgaggcatagatgagacacttaactttccagggttcctacttaatttcgcccttatagcatatcgcctattttgaaaccagttccaaacctgtaataataatcataatattaaagagtgttctaaataatttgccatactaaactaagcgaataaccgtacttgtttcatttgaaccgtaatcttgcctttccgatctggtgaatcactgtggcacaagaccaaataccccaatttaacatatggcacaagttaaaagacttaaaataaatagagctgatttttttttttccgagtctcaaataaactaagctgtacctgaacttatctgcaagacctacaagaacatcacgtccgggcattgaattactgtgttcttgtagaatagcttccatctcagccaccttaaattcaacaaatacaagtgaatacatacatatatatatttatatacactcacacacactggcatgtagaaatgcttatagcatattgttaatgtatacacatattatacacaaaatacaagtatataaacacatttatagcattttgtaacggttcctttagcttgccccgttagcttagcttctataagttctttttttagcttttagaattaaaaaaaaccttctacaaatgtttggataaaaacaattatattgtttaatttaaaaatcattttgagaagctattttcaaatgacttctccaaaaatcattttttaatgatatccgaacactttaaaagaatatttcataaaaaaaaaatgtttcatttatataataattatcgaaactgaaaaaataaactaaaacattttacttggctataagattagctaaagtaaaagattagccaaaacccttgaaaatccatttcaagagctttctaaaaccactaaagctaattccccaaaaaaaaatgaatgaataatgactgttaaggaacccttaaacccacaaataatacagtcccaattattttaaataaatatataaaaacataaccctaactaatccaatagacaaaatcaaaatcagtgagcaatacaaaatgtgtgtaaaaatgccaatgcaaacagatttccagaaaaaaaaaataaccccaaattcaagattaaatatttaagaaaatgaaactcaaaatcgcaataaaaagctcaaataatgaaaacccattaacaaatttggaacttgaagttaataaataacaaaggagaaagtaaaatacctcaataggggtgaaacggaaagcaggacctccattactgggaggcctacccatgagagcaatctttctctttgactttgagttcttagagtttcgagaccaaaaaaaccaaagggggaagcttttgattttgaatcagagaacgattgatgagattaaactggtttcgattctgaattttcctcagttcttcttcttcttcagcctaagaatgatttgaaattgagtaaaataacacttttgccctttcgaagaaagaaataaataaataaattgaca

SEQ ID NO: 29354 - DNA, 1868 bp, Cannabis sativa
attttaaagaattcttaaaagctaatcctttgttgttatatattaaaatatatttttttaaaaaaataaaaatagagattgggaatacattctataatttcttaattttaagtaattaagatcctttactattatacgaaataatatttattattacttaatattttatttatatattattttttttttcataatttcaaaaccttaaatatttcggacccgagacggacatctagctcgcgtacccttgaaggctggccctgttttacaatatattgtaattactcctagtaattacagattgatcgattttattaatgtatgtgttcttttatacccctttatctatatacagatatattaaagtaaaaaagaatttgcatggtagtggggtcatatttatactaaagaaacagaagaatacagctgccactaatttaatgtttactgggctgccactgtcaatatgagtgtggatatatacataaatttagaatgattataaaagataaatgtgattgcattctgtaaaatgtaaatttctactacgggaatcaaaatgtaaaaagtaaaaatccaaagtagaagaatatagcctaggcatgtacaagtttgaataatttattaatagtaattgattatataatgtttagtataatgcgttgtgtttagtgtaacctggaaaatctcctacaaatatagtagattacagctttgtttaattttttttttaacttcagatgatggtgaactgtcaaatgatatatattctttttctttatatgtataaaaaatagaataaattaagcagaggagattctttgtgctttggttccagcatctaaacatacctcggataacccaatctcatctcccaaacagaaacatacatacaagacaaattaaacaaaactctttccctctaataatctcaactctgaaatcttagaagaaggtaagtacagcactcgccggccattagcttatttatttaattttggtagaatgaataattttattatttatttatttatatgtatataattgaagcctccataacgtggtacggtgctgagagttgacacgtgtgtcagtctgttctggcacccaaatattcatatttatgtttgtagcccattatggctccacaggtgtcaactacatcaccggcgtcggctccaaatctacctataattcatctatatttatttttttcatatgaaatttgacattttcaattttacataattaattcattgttattggttatgggttttttcttcttctttttcgtcttagttgattttagtttataattaatgaaattggtacgatttttatatgtgacactattgttattccatgcatctcaagaaaataatacccaaaggaaatcgtgtaatttctagaaatatttttattctccacgagaaaactcagaaacttggcttcacaaaattatgagacttagatttttctttttataacaaactctagcagaaacaaaagaagaaaaagaaaactctaaagctatatatactcgactattatttatagctctgtttttttttttttttaactattatttatagcttttgttaaaaataataataaaaatactattatctatagttagttctcaccatctttataacgtcacacttcatcatctacctacataacaaaattagattatagataattagtttttttttttttttatgaattaatattttaggaacaaagttttatatatattttggtgaaatgaatttagaccaacttaaacaaaatagaaagagaaaattcatttatcctatataaatatatcttcctttttttttttttttgtatgaagagaaaattta

SEQ ID NO: 29355 - DNA, 1609 bp, Cannabis sativa
ttaaaattttacaagatgtcttaaataactataacgtacatgactatgaaaaaaatttgactaaaaaattatttcagatacagaaatagatagagacgcatcaatgtatctcttttaagaatgagtattgtagaattttccaataacaagaatacaacataaaaatatcaaaagaatatatttttacaaataaaatcttaaaattgtaaaaaaaaaaatatttaaaatttcatataatagtatttttttgtaattttttttattatttttatgtatttatgaaacaatccatcatctttttcatataggatgctactttgctttaccttgtggaatttcatgatcacatcacataacacaaaattattatataaagaaaaagaaaaagctagtagtagggggagcacctttagtggaggttatccattttgttgctcaacgaaccaaacattaattttaacaaaaaaaaaaccacacccataaaaaaaaatggtcacatcaactaaagtccacataaactcaaataactcttaggtaatgcccaatggggttactctaatgtgactattgtcaatttgtcacaaagttcaaaagctagatcatcgtaagagcactcataactagtgctctaaaatttgtgtggtttgtgttgatgtgattcatatgagtcgtgccttaaacaaatataaattatatgggctcgtttggaacgtcgtactaggtcgtattgtattgtattatattgaattagattatacatcatatttttatataatactatgttaaacttcaatttatactaaaatattatatatttaggtgtccataaaagtgaataccacatataattttacataaaaatattacataaaatacaattcaatgtaatacaatacaatacaatacgacctaatacggtattccaaacgagcccatattgtgttgtattactatttttaaagggtagaccccatatttttcgtgtcatggttaggttcgtgacgtgttatactcataaaggcttgtttttcgtaaatagattagctcgtttttatatttagcttgaatttgtaatttactttttcatttttttttataattaatgagttaattactaatgttgtatgtgattattttatagtttcaaaatttaattatatttatgtaattttttaataacattttactgacaattattaaaaaaataattaaaatttaaaatttatttataaatacttaatttttacatcatactctataaataaattaatggttttagttttacattttctaataattttaattataaaattataatattcagaattatatttaaattttaatttgtttataattgacaaatacatatatattattatagttattaaattataaagatttttaatattttatgtctcgcctttcaggcttgtcgtgtgtcgtatcttttggacgactgtattcatacttacgtgtcgtgcttttcgtgcttacgtgtcatgtctttcgtacttacatgtcgtgtctttcgtgcttctcgtgttgtgtcaagtttaatcacatattttctatgttatatcatggtaatttatagcatcgtgtcgtgtcc
